United States Patent Application Publication US 2010/0190656 A1 - sequence listing, part 3

SEQ ID NO: 1937 - DNA, 5583 bp, Homo sapiens
ataatctatcccagatcctttcccagagagaaacttggcgatcacgttttcacatgatgctcacgctcagggcgcttcaattatccctccccacaaagataggtggcgcgtgtttcagggtctctcgtctctctcctacagaaaagaaaaagaaaaaaatgtcattagaagaggcgtaacacgtcagtccgtccccaggtttgtgtttcctggagtggccgaaagagatcagttctaacctgctctgcaggaataacggtcctgcctcccgacactcttggcgaggtttttgtacagtttgctccgggagctgtttcttcgcttccacctttttctcccccacacttcgcggcttcttcatgctttttcttctcaccatttctggccaaaactacaaacaagacttcgcagatcgagcctgcgtgctgccgaagcagggcgccgagtccatgcgaactgccatctgatccgctcttatcaatgaagcagccgatcatggcggatggcccccggtgcaagaggcgcaaacaagccaatcccaggaggaaaaacgtggtgaactatgacaatgtagtggacacaggttctgaaacagatgaggaagacaagcttcatattgctgaggatgacggtattgccaaccctctggaccaggagacgagtccagctagtgtgcccaaccatgagtcctccccacacgtgagccaagctctgttgccaagagaggaagaggaagatgaaataagggagggtggagtggaacacccctggcacaacaacgagattctacaagcctctgtagatggtccagaagaaatgaaggaagactatgacactatggggccagaagccacgatccagaccgcaattaacaatggtacagtgaagaatgcaaattgcacatcagattttgaggaatactttgccaaaagaaaactggaggaacgcgatggtcatgcagtcagcatcgaggagtaccttcagcgcagtgacacagccattatttacccagaagcccctgaggagctgtctcgccttggcacgccagaggccaatgggcaagaagaaaatgacctgccacctggaactccagatgcttttgcccaactgctgacctgcccctactgcgaccggggctacaagcgcttgacatcactgaaggagcacatcaagtaccgccacgagaagaatgaagagaacttttcctgccctctctgtagctacacgtttgcctaccgcacccagctcgagcggcatatggtgacacacaagccagggacagatcagcaccaaatgctaacccaaggagcaggtaatcgcaagttcaaatgcacagagtgtggcaaggccttcaaatataaacaccatctgaaagaacacctgcgaattcacagtggtgaaaaaccttacgagtgcccaaactgcaagaaacgtttctcccattctggttcctacagttcgcacatcagcagcaagaaatgtattggtttaatctctgtaaatggccgaatgagaaacaatatcaagacgggttcttcccctaattctgtttcttcttctcctactaattcagccattacccagttaagaaacaagttggagaatggaaaaccacttagtatgtctgaacagacaggcttacttaaaattaaaacagaaccactagacttcaatgactataaagttcttatggctacacacgggtttagtggcactagtccctttatgaatggtgggcttggagccaccagccctttaggagttcatccatctgctcagagtccaatgcagcacttaggtgtagggatggaagcccctttacttgggtttcccaccatgaatagtaatttaagtgaggtacaaaaggttctacagattgtggacaatactgtttccaggcaaaaaatggactgcaaggctgaagaaatttcaaagttgaaaggttatcacatgaaggatccatgctctcaacctgaggaacaaggagttacttctcctaatattccgcctgtcggtcttccggtagtgagtcataatggtgccactaaaagtattattgactatacgttggaaaaagtcaatgaagccaaagcttgcctccagagcttgactactgactcaaggagacagatcagtaatataaagaaagagaagctacgtactttaatagatttggtcactgatgacaaaatgattgagaaccacaacatatccactccattttcatgccagttctgtaaagaaagttttcctggccccatccctttgcatcagcatgaacgttacctttgtaagatgaatgaagagatcaaggcggtcctgcagcctcatgaaaacatagtccccaacaaagccggagtttttgttgataataaagccctcctcttgtcatctgtactttctgagaaaggaatgacaagccccatcaacccatacaaggaccacatgtctgtactcaaagcatactatgctatgaacatggagcccaactccgatgaactgctgaaaatttccattgctgtgggccttcctcaggaatttgtgaaggaatggtttgaacaacgaaaagtctaccagtactcaaattccaggtccccatccctggaaagaagctccaagccgttagctcccaacagtaaccctcccacaaaagactctttattacccaggtctcctgtaaaacctatggactccataacatcaccatctatagcagaactccacaacagtgttacgaattgtgatcctcctctcaggctaacaaaaccttcccattttaccaatattaaaccagttgaaaaattggaccactccaggagtaatactccttctcccttaaatctttcctccacatcttctaaaaactcccacagtagttcatacactccaaacagcttctcttctgaggagctccaggctgagcctttagacttgtcattaccaaaacaaatgaaagaacccaaaagtattatagccacaaagaacaaaacaaaagctagtagcatcagtttagatcataacagtgtttcttcctcatctgaaaactcagatgagcctctgaacttgacttttatcaagaaggaattttcaaattcaaataatctggacaacaaaagcactaacccagtgttcagcatgaacccatttagtgccaaacctttatacacagctcttccacctcaaagcgcatttccccctgctactttcatgccaccagtccagaccagtattcctgggctacgaccatacccaggactggatcagatgagcttcctaccacatatggcctacacctacccaactggagcagctacttttgctgatatgcagcaaaggagaaagtaccagcggaaacaaggatttcagggagaattgcttgatggagcacaagactacatgtcaggcctagatgatatgacagactccgactcctgtctgtctcgcaaaaagatcaagaagacagagagtggcatgtatgcatgtgacttatgtgacaagacattccagaaaagcagttcccttctgcgacataaatacgaacacacaggaaaaagaccacatcagtgtcagatttgtaagaaagcgtttaaacacaagcaccaccttatcgagcactcaaggcttcactcgggcgagaagccctatcagtgtgataaatgtggcaagcgcttctcacactcgggctcgtactcgcagcacatgaatcacaggtattcctactgcaagcgggaggcggaggagcgggaagcggcggagcgcgaggcgcgcgagaaagggcacttggaacccaccgagctgctgatgaaccgggcttacttgcagagcattacccctcaggggtactctgactcggaggagagggagagtatgccgagggatggcgagagcgagaaggagcacgagaaagaaggcgaggatggctacgggaagctgggcagacaggatggcgacgaggagttcgaggaggaagaggaagaaagtgaaaataaaagtatggatacggatcccgaaacgatacgagatgaagaagagactggagatcactccatggacgatagttcggaggatgggaaaatggaaaccaaatcagaccacgaggaagacaatatggaagatggcatgtaataaactactgcattttaagcttcctatttttttttccagtagtattgttacctgcttgaaaacactgctgtgttaagctgttcatgcacgtgcctgacgcttccaggaagctgtagagagggacagaaggggcggttcagccaagacagatgtagacggagttggagctgggtattgttaaaaactgcattatgcaaaaattttgtacagtgttaaggcctaaaaactgtgtggttcagagactaattcctgtgtttaatagcatttatactttaagcacaactagaaaattgtaagaattgcactctacttatgtatcactacaaactttaaaaaactatgtctaatttatattaatacattttaaaaaggtgcccgcactaccatacatcagtatttttattattattattgttattcctttttaatttaatgtgctcgcactacaatgcatcagtattatgattcctctgtactttcctttcgctattcatcaatttcccattttttttttcagcttaagtaaccacacaattttaggcctcaatttttttttttttctgtgaaggaacttgaagtgatgcatgtgtgaatttaagataccgaagtcttaaagtgacctggacgtgaaggaaaaagtaagatgagaaataaagaaagcctttgtaaggtggttttaaaagccttatatgcaaaccttttaatctgtgtttctgcaagtgccatccttgtacagtgttaagagggtaacatgggttacctttgcaccagcttcagtgttaagctcaccctgttctttgaagcacccatgtcagtattagaagaataggcagcagttccttagtttacatatgtttgtgcaattattttctgtacttttttgttcattaattttgtcagtattacaccaaactgtttttgcaacaaaaaaattttttttgcattcatttaattttaggtcaaataacattttatttatgtggctcattttatatttcctaattttatttatttcatactgtagtgtacagtattatagttcttcaatatatagatatattttagtaaaaaaggaacatgacgttgatcatttgggcaaattttacgtaaagagaagagcatttattgtgttttggaacattaattgtgagatgggatttttcaattttattattttatttttgtttttttccaattactggaaattccaaatttgggaacttttgatacgatcttgtgaaaacactgtattttcgactgaaaattccactttcttcatcttgttttttagctaaaaagagggactgttaaatacaatgtatgataccatgacaaaaatctttcctgaattgtctttgtaaaagtattattgaattttcaatttgtaatttcttttgaaaatgaccatgctcgaataaaaatgtagccaaactaaaaaaaaaaaaaaaaaaaaaaaaa

SEQ ID NO: 1938 - DNA, 4436 bp, Homo sapiens
atggagcagctgccgggggtgccaccaggccccccccaccccgttcgaccgccacccccgcctccaccacccatgcccctgcagctcgaggcccacctccgcagccatggcctggagcccgcggcccccagcccccgcctgcgacccgaggagagcctggatccgccaggcgccatgcaggaattgctcggggctctggagccgctgcccccggcgcctggggatactggcgtaggcccaccaaactcggagggcaaggatcccgcaggcgcctaccgcagccccagcccgcaaggcaccaaggcgccgcgtttcgtgccgctcacctccatctgcttccctgactccttgctccaagacgaggagcgcagcttcttccccaccatggaggagatgttcggtggaggggccgcggacgactacggcaaggccgggccacctgaggacgagggggaccccaaggctggcgctgggccaccccccggcccccctgcttatgatccctatgggccctactgtcctggccgggcgtcgggagccgggcccgagacaccgggcctgggcctggaccccaacaaaccgcctgaactgccctccacggtcaacgccgagccgctgggcctgatccagagtggcccccaccaggcggcgccaccacccccgcctccgccaccgccgcctcccgcgccggcctccgaacccaagggtggcctcacctcgcccatcttctgctctaccaagccaaagaagctgctcaagacatcctccttccacctgctgcggcgccgcgacccacccttccagacccccaagaagctgtacgcccaggagtacgagttcgaggcggacgaggacaaggccgatgttcccgccgacatccgcctcaacccccggcgcttgcctgacctggtctccagctgccgctcccgtccggccctctcgccactgggggacatcgacttctgcccacccaacccaggacccgatggcccccggcgccgtggccgcaagcccacgaaggcgaaacgtgatgggccaccccggccacgggggaggccccggatccgccccctggaggtcccgaccactgcggggcccgcctcggcctccacgcccaccgatggcgccaagaaaccccggggccggggccgaggccggggtcgaaaggctgaggaggcagggggcacccggttggagcccctgaagccacttaagatcaagctgtctgtgcccaaggctggcgagggtctgggaacctcatcgggtgatgccatatcaggcactgaccacaacagcctggactcgagcctgactcgggagaagatcgaggccaagattaaggaggtggaggagaagcagccggagatgaagtcgggtttcatggcctccttcttggacttcctcaagtcaggcaagcgccacccaccactctaccaggcgggcctgacgcctccgctcagccctcccaagagtgtgccaccctctgtgccagcccgaggcctgcagccccagccccctgccacccctgctgtgccacatcccccaccttccggagcctttgggcttgggggcgccctggaggctgcagagagtgagggtctggggcttggctgcccttcaccctgcaagcggcttgatgaggagctgaagcggaacctcgagacgctgccctccttctcctcggatgaggaagactctgtcgccaagaaccgagacctgcaggagagcatctcctccgccatctctgccctcgatgacccaccccttgctgggccaaaagacacttccaccccagatgggccgcccttggcccccgcggctgcagttccagggccaccccctcttccggggctccccagtgccaacagcaatggcactcccgagcccccgctgctggaggagaaacccccacccactccacctcctgccccgactcctcagcctcagcctccgccaccccctccgccgccacagccagccctgccctcgccacccccgctggtggcccccacgcccagctcaccaccgccaccgccgctgccgccgccacctccaccagccatgccctcgcctccaccaccacccccaccagccgctgccccactggctgctcctcctgaggagcccgccgccccgtctcccgaagaccccgagctgccggacacccggcccctgcatctggccaaaaagcaggagacggcggcagtgtgtggggagacggacgaggaggccggcgagagtggcggagagggcatcttccgggaacgggacgagttcgtcatccgtgctgaggacatcccttccctcaagctggcgttgcagacggggcgtgaacccccacccatctggcgagtccagaaggcccttctgcagaaattcactccggagatcaaggacggccagaggcagttttgtgccaccagtaattatttggggtattttggggatgcaaaaaatcggtaccagcgcctctatgtaaagttcctggaaaatgtcaataagaaggactacgtgagggtctgtgctcggaaaccctggcatcggcccccagtgccagtcagacgctctgggcaggccaagaaccccgtatctgctgggggtagctctgcacctccccctaaggccccagcaccacctcccaagcctgagacccctgaaaagacgacatctgagaagcccccagagcagactcctgagacggccatgcctgagccccctgcccccgagaagccctccctcctgcggcctgttgagaaggaaaaggagaaggagaaggtgacacgtggagagcggccattgcggggtgagcgggccaccagcggacggcagacacggccagagcggagtctcgccacgggacaacctgccacatcccggctgcccaaagcccggcctaccaaggtgaaggctgaaccgccccctaagaagaggaagaaatggctgaaggaggcaggcggcaacgctacagcaggcgggggcccaccaggcagctcctcggactcggagtcctcccctggagcccccagcgaggacgagcgggcagtacctgggcgtctgctcaaaaccagggcgatgcgggagatgtaccggagctacgtggagatgttggtgagcacagcacttgacccagacatgatccaggccctggaggacacgcatgacgagctgtacctgccccccatgcggaagatagacggcctgctgaatgagcacaagaagaaagtcctgaagcggctgtcgctaagcccagccctgcaggatgctctgcacacgttcccacagctgcaagtggagcagagtggggagggctctccggaagagggggctgtgcggctgcggcctgctggggaaccctacaaccgcaagacgctcagcaagctcaagaggagcgtggtcagagcccaggagttcaaggttgagctggaaaagtcgggatactatacactctaccattcgctccaccactataaataccacaccttcctgcgctgccgggaccagaccctggccatcgagggcggcgccgaggacctgggccaggaggaggtggtccagcagtgcatgcggaaccagccgtggctggaacagctctttgactccttcagtgacctgctggcccaagcacaggcccacagccgctgcgggtgaccccgccccagcttgtgaggggggcgcctcctccatgaaccgagaattgggacagaaccgtgtcctcaggagctaacacctgggctccatcgccggggaaagggggtcatgggtcagggtgtgtctgtgctgccccctccagggcagggttcaaagtccgactccccccctctcccaagccccctccactccctccccattcctcccactgttcggtgtacgtaacggtttccctctccccttgccccgaccccccctccacagccacagcccccgccccctccaccttgtacataatgtataggaaaagtctatgtatggctggggggggtggggtggcttcagagagctgggggaccccttccccccaagtcccccctgcaggccaagatctttgctaaaggccattccctccgcagggcatttggcgtcgggtgggaggggaaaacgcatcttgttaattatttttaatcttatttattgtacatacctggggcaggggcttggggaggtggaggggggagaagggtcccctctctctgcccctcccactccttttctacggcgatttgtctgtgtctggcccccacccactgcccatcccccattgttgtctggatgtggttctattttttatcggtctcctttcccctcctccccgttctcgcccccgccccaccccctgctcccactaccctttgtctcttgctctttcttgggcttctgtacaactcaacttgtatacactgtgtacacacaaccagccaaacgaaaacccaacggcaaac

SEQ ID NO: 1939 - DNA, 2919 bp, Homo sapiens
agtgaagaggctcaccggagatgaagtcgggtttcatggcctccttcttggacttcctcaagtcaggcaagcgccacccaccactctaccaggcgggcctgacgcctccgctcagccctcccaagagtgtgccaccctctgtgccagcccgaggcctgcagccccagccccctgccacccctgctgtgccacatcccccaccttccggagcctttgggcttgggggcgccctggaggctgcagagagtgagggtctggggcttggctgcccttcaccctgcaagcggcttgatgaggagctgaagcggaacctcgagacgctgccctccttctcctcggatgaggaagactctgtcgccaagaaccgagacctgcaggagagcatctcctccgccatctctgccctcgatgacccaccccttgctgggccaaaagacacttccaccccagatgggccgcccttggcccccgcggctgcagttccagggccaccccctcttccggggctccccagtgccaacagcaatggcactcccgagcccccgctgctggaggagaaacccccacccactccacctcctgccccgactcctcagcctcagcctccgccaccccctccgccgccacagccagccctgccctcgccacccccgctggtggcccccacgcccagctcaccaccgccaccgccgctgccgccgccacctccaccagccatgccctcgcctccaccaccacccccaccagccgctgccccactggctgctcctcctgaggagcccgccgccccgtctcccgaagaccccgagctgccggacacccggcccctgcatctggccaaaaagcaggagacggcggcagtgtgtggggagacggacgaggaggccggcgagagtggcggagagggcatcttccgggaacgggacgagttcgtcatccgtgctgaggacatcccttccctcaagctggcgttgcagacggggcgtgaacccccacccatctggcgagtccagaaggcccttctgcagaaattcactccggagatcaaggacggccagaggcagttttgtgccaccagtaattatttggggtattttggggatgcaaaaaatcggtaccagcgcctctatgtaaagttcctggaaaatgtcaataagaaggactacgtgagggtctgtgctcggaaaccctggcatcggcccccagtgccagtcagacgctctgggcaggccaagaaccccgtatctgctgggggtagctctgcacctccccctaaggccccagcaccacctcccaagcctgagacccctgaaaagacgacatctgagaagcccccagagcagactcctgagacggccatgcctgagccccctgcccccgagaagccctccctcctgcggcctgttgagaaggaaaaggagaaggagaaggtgacacgtggagagcggccattgcggggtgagcgggccaccagcggacggcagacacggccagagcggagtctcgccacgggacaacctgccacatcccggctgcccaaagcccggcctaccaaggtgaaggctgaaccgccccctaagaagaggaagaaatggctgaaggaggcaggcggcaacgctacagcaggcgggggcccaccaggcagctcctcggactcggagtcctcccctggagcccccagcgaggacgagcgggcagtacctgggcgtctgctcaaaaccagggcgatgcgggagatgtaccggagctacgtggagatgttggtgagcacagcacttgacccagacatgatccaggccctggaggacacgcatggtgacaagctcaagaggagcgtggtcagagcccaggagttcaaggttgagctggaaaagtcgggatactatacactctaccattcgctccaccactataaataccacaccttcctgcgctgccgggaccagaccctggccatcgagggcggcgccgaggacctgggccaggaggaggtggtccagcagtgcatgcggaaccagccgtggctggaacagctctttgactccttcagtgacctgctggcccaagcacaggcccacagccgctgcgggtgaccccgccccagcttgtgaggggggcgcctcctccatgaaccgagaattgggacagaaccgtgtcctcaggagctaacacctgggctccatcgccggggaaagggggtcatgggtcagggtgtgtctgtgctgccccctccagggcagggttcaaagtccgactccccccctctcccaagccccctccactccctccccattcctcccactgttcggtgtacagagaaattatttatatatatgtataaatgtctatttagtaacggtttccctctccccttgccccgaccccccctccacagccacagcccccgccccctccaccttgtacataatgtataggaaaagtctatgtatggctggggggggtggggtggcttcagagagctgggggaccccttccccccaagtcccccctgcaggccaagatctttgctaaaggccattccctccgcagggcatttggcgtcgggtgggaggggaaaacgcatcttgttaattatttttaatcttatttattgtacatacctggggcaggggcttggggaggtggaggggggagaagggtcccctctctctgcccctcccactccttttctacggcgatttgtctgtgtctggcccccacccactgcccatcccccattgttgtctggatgtggttctattttttatcggtctcctttcccctcctccccgttctcgcccccgccccaccccctgctcccactaccctttgtctcttgctctttcttgggcttctgtacaactcaacttgtatacactgtgtacacacaaccagccaaacgaaaacccaacggcaaac

SEQ ID NO: 1940 - DNA, 4436 bp, Homo sapiens; identical to SEQ ID NO: 1938

SEQ ID NO: 1941 - DNA, 2919 bp, Homo sapiens; identical to SEQ ID NO: 1939

SEQ ID NO: 1942 - DNA, 4498 bp, Homo sapiens
atggagcagctgccgggggtgccaccaggccccccccaccccgttcgaccgccacccccaaatccacctccaccgccacccccgcctccaccacccatgcccctgcagctcgaggcccacctccgcagccatggcctggagcccgcggcccccagcccccgcctgcgacccgaggagagcctggatccgccaggcgccatgcaggaattgctcggggctctggagccgctgcccccggcgcctggggatactggcgtaggcccaccaaactcggagggcaaggatcccgcaggcgcctaccgcagccccagcccgcaaggcaccaaggcgccgcgtttcgtgccgctcacctccatctgcttccctgactccttgctccaagacgaggagcgcagcttcttccccaccatggaggagatgttcggtggaggggccgcggacgactacggcaaggccgggccacctgaggacgagggggaccccaaggctggcgctgggccaccccccggcccccctgcttatgatccctatgggccctactgtcctggccgggcgtcgggagccgggcccgagacaccgggcctgggcctggaccccaacaaaccgcctgaactgccctccacggtcaacgccgagccgctgggcctgatccagagtggcccccaccaggcggcgccaccacccccgcctccgccaccgccgcctcccgcgccggcctccgaacccaagggtggcctcacctcgcccatcttctgctctaccaagccaaagaagctgctcaagacatcctccttccacctgctgcggcgccgcgacccacccttccagacccccaagaagctgtacgcccaggagtacgagttcgaggcggacgaggacaaggccgatgttcccgccgacatccgcctcaacccccggcgcttgcctgacctggtctccagctgccgctcccgtccggccctctcgccactgggggacatcgacttctgcccacccaacccaggacccgatggcccccggcgccgtggccgcaagcccacgaaggcgaaacgtgatgggccaccccggccacgggggaggccccggatccgccccctggaggtcccgaccactgcggggcccgcctcggcctccacgcccaccgatggcgccaagaaaccccggggccggggccgaggccggggtcgaaaggctgaggaggcagggggcacccggttggagcccctgaagccacttaagatcaagctgtctgtgcccaaggctggcgagggtctgggaacctcatcgggtgatgccatatcaggcactgaccacaacagcctggactcgagcctgactcgggagaagatcgaggccaagattaaggaggtggaggagaagcagccggagatgaagtcgggtttcatggcctccttcttggacttcctcaagtcaggcaagcgccacccaccactctaccaggcgggcctgacgcctccgctcagccctcccaagagtgtgccaccctctgtgccagcccgaggcctgcagccccagccccctgccacccctgctgtgccacatcccccaccttccggagcctttgggcttgggggcgccctggaggctgcagagagtgagggtctggggcttggctgcccttcaccctgcaagcggcttgatgaggagctgaagcggaacctcgagacgctgccctccttctcctcggatgaggaagactctgtcgccaagaaccgagacctgcaggagagcatctcctccgccatctctgccctcgatgacccaccccttgctgggccaaaagacacttccaccccagatgggccgcccttggcccccgcggctgcagttccagggccaccccctcttccggggctccccagtgccaacagcaatggcactcccgagcccccgctgctggaggagaaacccccacccactccacctcctgccccgactcctcagcctcagcctccgccaccccctccgccgccacagccagccctgccctcgccacccccgctggtggcccccacgcccagctcaccaccgccaccgccgctgccgccgccacctccaccagccatgccctcgcctccaccaccacccccaccagccgctgccccactggctgctcctcctgaggagcccgccgccccgtctcccgaagaccccgagctgccggacacccggcccctgcatctggccaaaaagcaggagacggcggcagtgtgtggggagacggacgaggaggccggcgagagtggcggagagggcatcttccgggaacgggacgagttcgtcatccgtgctgaggacatcccttccctcaagctggcgttgcagacggggcgtgaacccccacccatctggcgagtccagaaggcccttctgcagaaattcactccggagatcaaggacggccagaggcagttttgtgccaccagtaattatttggggtattttggggatgcaaaaaatcggtaccagcgcctctatgtaaagttcctggaaaatgtcaataagaaggactacgtgagggtctgtgctcggaaaccctggcatcggcccccagtgccagtcagacgctctgggcaggccaagaaccccgtatctgctgggggtagctctgcacctccccctaaggccccagcaccacctcccaagcctgagacccctgaaaagacgacatctgagaagcccccagagcagactcctgagacggccatgcctgagccccctgcccccgagaagccctccctcctgcggcctgttgagaaggaaaaggagaaggagaaggtgacacgtggagagcggccattgcggggtgagcgggccaccagcggacggcagacacggccagagcggagtctcgccacgggacaacctgccacatcccggctgcccaaagcccggcctaccaaggtgaaggctgaaccgccccctaagaagaggaagaaatggctgaaggaggcaggcggcaacgctacagcaggcgggggcccaccaggcagctcctcggactcggagtcctcccctggagcccccagcgaggacgagcgggcagtacctgggcgtctgctcaaaaccagggcgatgcgggagatgtaccggagctacgtggagatgttggtgagcacagcacttgacccagacatgatccaggccctggaggacacgcatgacgagctgtacctgccccccatgcggaagatagacggcctgctgaatgagcacaagaagaaagtcctgaagcggctgtcgctaagcccagccctgcaggatgctctgcacacgttcccacagctgcaagtggagcagagtggggagggctctccggaagagggggctgtgcggctgcggcctgctggggaaccctacaaccgcaagacgctcagcaagctcaagaggagcgtggtcagagcccaggagttcaaggttgagctggaaaagtcgggatactatacactctaccattcgctccaccactataaataccacaccttcctgcgctgccgggaccagaccctggccatcgagggcggcgccgaggacctgggccaggaggaggtggtccagcagtgcatgcggaaccagccgtggctggaacagctctttgactccttcagtgacctgctggcccaagcacaggcccacagccgctgcgggtgaccccgccccagcttgtgaggggggcgcctcctccatgaaccgagaattgggacagaaccgtgtcctcaggagctaacacctgggctccatcgccggggaaagggggtcatgggtcagggtgtgtctgtgctgccccctccagggcagggttcaaagtccgactccccccctctcccaagccccctccactccctccccattcctcccactgttcggtgtacagagaaattatttatatatatgtataaatgtctatttagtaacggtttccctctccccttgccccgaccccccctccacagccacagcccccgccccctccaccttgtacataatgtataggaaaagtctatgtatggctggggggggtggggtggcttcagagagctgggggaccccttccccccaagtcccccctgcaggccaagatctttgctaaaggccattccctccgcagggcatttggcgtcgggtgggaggggaaaacgcatcttgttaattatttttaatcttatttattgtacatacctggggcaggggcttggggaggtggaggggggagaagggtcccctctctctgcccctcccactccttttctacggcgatttgtctgtgtctggcccccacccactgcccatcccccattgttgtctggatgtggttctattttttatcggtctcctttcccctcctccccgttctcgcccccgccccaccccctgctcccactaccctttgtctcttgctctttcttgggcttctgtacaactcaacttgtatacactgtgtacacacaaccagccaaacgaaaacccaacggcaaac

SEQ ID NO: 1943 - DNA, 1845 bp, Homo sapiens
gtctctgtggttataaagttgggggtggagtggccgggagatgatggctgatgaagaggaagaagtcaagccgatcttgcagaaattgcaggaactcgtggatcagctctactcatttcgagactgctatttcgagacacatagtgttgaggatgctgggaggaagcaacaggatgtgcggaaggagatggagaaaaccctacagcagatggaagaagtagtgggttctgtccagggcaaggcacaagttctaatgctaactgggaaagcactaaatgtgactcctgactatagccctaaggctgaggagcttctgtcaaaggctgtgaagctggagcccgagctggtggaagcctggaaccagctgggtgaggtgtactggaaaaaaggggatgttgcagctgcccacacctgcttctcaggagccctcacccattgcaggaacaaagtctccttgcaaaacctgtcaatggtgcttcgtcagctgcggactgacactgaagatgaacattctcaccatgtcatggacagtgtccgacaggctaagttggctgttcagatggatgtccatgatggccgctcctggtatattcttgggaattcatatctttccctttacttctctactggccagaaccctaagatctcccagcaagccctcagtgcctatgcccaagcagagaaagttgacagaaaagcttctagcaatcctgaccttcatctgaacagggcgacgttgcataaatatgaagagagttatggggaggccctggagggcttctctcgggctgcagccctggaccctgcctggccagagccccggcaacgagagcaacaacttctggaattcctggatagattaaccagcctccttgagagtaagggaaaggtgaagaccaaaaagctgcagagcatgctgggaagcttgcgcccagcccatctaggcccttgcagtgatgggcactatcagtcagcctctgggcagaaagtgaccctggagctcaagccactgagtacgcttcagcctggggtgaacagcggtgccgtcatcctgggaaaggtggtatttagcctcaccacagaggagaaagtcccctttacatttggcctggtagattcagatggaccttgctatgcagtgatggtgtacaatatagtgcagagctggggagtgctcattggagactctgtagccattcctgagcccaacctgcggcttcaccgaattcagcacaaaggaaaggactattccttttccagtgttcgagtggagacgcccctcctgctagtggtgaatgggaagcctcagggatccagcagccaggctgttgccacagtggcatcgcgaccacagtgtgaatgacctttgacttgcatgctcaacagggagtggaggagaggagacaaggctctggacagccggtccagccacatccagtgattcagcagggatgggaggaatgttttaaatgaagactttctctttccctgcctgtattacacttcgtatctcttctctctcctctgtcctcatcatgttccagctctctacagggccacatactcttctggcatatctctcctgtctcttccactgctctctatgttttaagcaaagagcatggaattggtagaagtcttgggatcttgccatgggacagagtccccaaggttcctgttgttgcctccttcctaagcctcatatgtatatatcagttcagtatttattgctaaaggagggggcttaattttgtaatggcttttacttttagcaatttttatttttatttttgaactttaggtccttcctcttctttggggctggaacagaattaaatttgtttg

SEQ ID NO: 1944 - DNA, 2836 bp, Homo sapiens
ccagctcctctgctaccatgaatagggcccctctgaagcggtccaggatcctgcacatggcgctgaccggggcctcagacccctctgcagaggcagaggccaacggggagaagccctttctgctgcgggcattgcagatcgcgctggtggtctccctctactcggtcacctccatctccatggtgttccttaataagtacctgctggacagcccctccctgcggctggacacccccatcttcgtcaccttctaccagtgcctggtgaccacgctgctgtgcaaaggcctcagcgctctggccgcctgctgccctggtgccgtggacttccccagcttgcgcctggacctcagggtggcccgcagcgtcctgcccctgtcggtggtcttcatcggcatgatcaccttcaataacctctgcctcaagtacgtcggtgtggccttctacaatgtgggccgctcactcaccaccgtcttcaacgtgctgctctcctacctgctgctcaagcagaccacctccttctatgccctgctcacctgcggtatcatcatcgggggcttctggcttggtgtggaccaggagggggcagaaggcaccctgtcgtggctgggcaccgtcttcggcgtgctggctagcctctgtgtctcgctcaacgccatctacaccacgaaggtgctcccggcggtggacggcagcatctggcgcctgactttctacaacaacgtcaacgcctgcatcctcttcctgcccctgctcctgctgctcggggagcttcaggccctgcgtgactttgcccagctgggcagtgcccacttctgggggatgatgacgctgggcggcctgtttggctttgccatcggctacgtgacaggactgcagatcaagttcaccagtccgctgacccacaatgtgtcgggcacggccaaggcctgtgcccagacagtgctggccgtgctctactacgaggagaccaagagcttcctctggtggacgagcaacatgatggtgctgggcggctcctccgcctacacctgggtcaggggctgggagatgaagaagactccggaggagcccagccccaaagacagcgagaagagcgccatgggggtgtgagcaccacaggcaccctggatggcccggccccggggcccgtacacaggcggggccagcacagtagtgaaggcggtctcctggaccccagaagcgtgctgtggtgtggactgggtgctacttatagacccaatcagaatacggtggttgagaaggaaccagtgtttacaagtaatatcagaaagttgaaggaaccagtgtttacaagtaataccagaaagttgccaaacccttctctatcctctcgtatttctgagtttttgtccttcccgagggagcaccctagtgagagttgaaccccttccttctgcctccagggcctgtctgcctccacatcactctgaggacagggacaggcaacaaccttgaagggacagcaatggcaaagccacaaaggcttcactgtactcaggggagatggccctaccacagccacctggagagggttgggaagccttccgtctgcggtgggcaggcagcctcaccctgggcccacagaccggccttcctttggaggaaagtgtggcctggactgagggaggaaatgagcgagttccctctgacaccagcagatccccaggggctgctgggcagtggcctgggaatggggtggattgtgagaaagtgctcaccatctatacaccctgtatgtccagcttttgaacacaagggaaccatgcttctcttagaggttaagcagggtcattaacatcctcccccagtccctaacatcacattgtcctgcgtggctcctctggccctgagtggcacctgtccctctggtctcccagcacctggcccaggtaacagccttctgaaagcagagccaaggagctgcttctctcttctcccagttctacctccccagaagccttcctccccaggtggggctgatggagcaagggtccagactaggagccttccaccccagctgtgtctggcgcccctagatctctgcaagggaggtgttacagctggttctgagccgcttgccttgtgatggtaagacaccaacctttacattcttccctgaggttgtggctgacagagcctgcttggccccactgttagtccagcgagctcctatatcaaaatgccgtaggccgggtggcttacaaacaacagaaacgtattgctcacagtcctggggggctgggacgcccaagatcaagaggccagcagattcggactccgctgagggctgtttcccgatccatagatggtgccttctcgctgtatcctcaatggtagaagcacaaacaagcaagctccttcctgcctcttttataaggactccaaccctgttcatgagggttccgcccccatgacccaatcagctccaaaggccccacctcctaatactgtcaccttgggggtgagaattccaatgtgaatttgcagggggagtgggggacacacacaaatttcggggccataccacccttcaccacaccctcctgcgctcagggtggcttgcagtccctggcccttctggtgggcatttggtatgtcctttctcttggggtgatttctgatgtttttactctatatagtgaaaagctagggagagcgggtcttctcccccctccctctccagtcccctcacaatcccagatgggttctaatgcagctgctggggcctgatgccctgagttgtttgtgattcaataaagaatccataagaaaaaaaaaaaaaaaaaaaaaaaaaaaaaaaaaaaaaaaaaaaa

SEQ ID NO: 1945 - DNA, 5910 bp, Homo sapiens
cggaggacagccggaccgagccaacgccggggactttgttccctccacggaggggactcggcaactcgcagcggcagggtctggggccggcgcctgggagggatctgcgccccccactcactccctagctgtgttcccgccgccgccccggctagtctccggcgctggcgcctatggtcggcctccgacagcgctccggagggaccgggggagctcccaggcgcccgggactggagactgatgcatgaggggcctacggaggcgcaggagcggtggtgatggtctgggaagcggagctgaagtcccctgggctttggtgaggcgtgacagtttatcatgaccgtgttcaggcaggaaaacgtggatgattactacgacaccggcgaggaacttggcagtggacagtttgcggttgtgaagaaatgccgtgagaaaagtaccggcctccagtatgccgccaaattcatcaagaaaaggaggactaagtccagccggcggggtgtgagccgcgaggacatcgagcgggaggtcagcatcctgaaggagatccagcaccccaatgtcatcaccctgcacgaggtctatgagaacaagacggacgtcatcctgatcttggaactcgttgcaggtggcgagctgtttgacttcttagctgaaaaggaatctttaactgaagaggaagcaactgaatttctcaaacaaattcttaatggtgtttactacctgcactcccttcaaatcgcccactttgatcttaagcctgagaacataatgcttttggatagaaatgtccccaaacctcggatcaagatcattgactttgggttggcccataaaattgactttggaaatgaatttaaaaacatatttgggactccagagtttgtcgctcctgagatagtcaactatgaacctcttggtcttgaggcagatatgtggagtatcggggtaataacctatatcctcctaagtggggcctccccatttcttggagacactaagcaagaaacgttagcaaatgtatccgctgtcaactacgaatttgaggatgaatacttcagtaataccagtgccctagccaaagatttcataagaagacttctggtcaaggatccaaagaagagaatgacaattcaagatagtttgcagcatccctggatcaagcctaaagatacacaacaggcacttagtagaaaagcatcagcagtaaacatggagaaattcaagaagtttgcagcccggaaaaaatggaaacaatccgttcgcttgatatcactgtgccaaagattatccaggtcattcctgtccagaagtaacatgagtgttgccagaagcgatgatactctggatgaggaagactcctttgtgatgaaagccatcatccatgccatcaacgatgacaatgtcccaggcctgcagcaccttctgggctcattatccaactatgatgttaaccaacccaacaagcacgggacacctccattactcattgctgctggctgtgggaatattcaaatactacagttgctcattaaaagaggctcgagaatcgatgtccaggataagggcgggtccaatgccgtctactgggctgctcggcatggccacgtcgataccttgaaatttctcagtgagaacaaatgccctttggatgtgaaagacaagtctggagagatggccctccacgtggcagctcgctatggccatgctgacgtggctcaagttacttgtgcagcttcggctcaaatcccaatatccaggacaaaggaagaagaaacccccctgcactgtgctgcttggcacggctattactctgtggccaaagccctttgtgaagccggctgtaacgtgaacatcaagaaccgagaaggagagacgcccctcctgacagcctctgccaggggctaccacgacatcgtggagtgtctggccgaacatggagccgaccttaatgcttgcgacaaggacggacacattgcccttcatctggctgtaagacggtgtcagatggaggtaatcaagactctcctcagccaagggtgtttcgtcgattatcaagacaggcacggcaatactcccctccatgtggcatgtaaagatggcaacatgcctatcgtggtggccctctgtgaagcaaactgcaatttggacatctccaacaagtatgggcgaacgcctctgcaccttgcggccaacaacggaatcctagacgtggtccggtatctctgtctgatgggagccagcgttgaggcgctgaccacggacggaaagacggcagaagatcttgctagatcggaacagcacgagcacgtagcaggtctccttgcaagacttcgaaaggatacgcaccgaggactcttcatccagcagctccgacccacacagaacctgcagccaagaattaagctcaagctgtttggccactcgggatccgggaaaaccacccttgtagaatctctcaagtgtgggctgctgaggagctttttcagaaggcgtcggcccagactgtcttccaccaactccagcaggttcccaccttcacccctggcttctaagcccacagtctcagtgagcatcaacaacctgtacccaggctgcgagaacgtgagtgtgaggagccgcagcatgatgttcgagccgggtcttaccaaagggatgctggaggtgtttgtggccccgacccaccacccgcactgctcggccgatgaccagtccaccaaggccatcgacatccagaacgcttatttgaatggagttggcgatttcagcgtgtgggagttctctggaaatcctgtgtatttctgctgttatgactattttgctgcaaatgatcccacgtcaatccatgttgttgtctttagtctagaagagccctatgagatccagctgaacccagtgattttctggctcagtttcctgaagtcccttgtcccagttgaagaacccatagccttcggtggcaagctgaagaacccactccaagttgtcctggtggccacccacgctgacatcatgaatgttcctcgaccggctggaggcgagtttggatatgacaaagacacatcgttgctgaaagagattaggaacaggtttggaaatgatcttcacatttcaaataagctgtttgttctggatgctggggcttctgggtcaaaggacatgaaggtacttcgaaatcatctgcaagaaatacgaagccagattgtttcggtctgtcctcccatgactcacctgtgtgagaaaatcatctccacgctgccttcctggaggaagctcaatggacccaaccagctgatgtcgctgcagcagtttgtgtacgacgtgcaggaccagctgaaccccctggccagcgaggaggacctcaggcgcattgctcagcagctccacagcacaggcgagatcaacatcatgcaaagtgaaacagttcaggacgtgctgctcctggacccccgctggctctgcacaaacgtcctggggaagttgctgtccgtggagaccccacgggcgctgcaccactaccggggccgctacaccgtggaggacatccagcgcctggtgcccgacagcgacgtggaggagctgctgcagatcctcgatgccatggacatctgcgcccgggacctgagcagcgggaccatggtggacgtcccagccctgatcaagacagacaacctgcaccgctcctgggctgatgaggaggacgaggtgatggtgtatggtggcgtgcgcatcgtgcccgtggaacacctcacccccttcccatgtggcatctttcacaaggtccaggtgaacctgtgccggtggatccaccagcaaagcacagagggcgacgcggacatccgcctgtgggtgaatggctgcaagctggccaaccgtggggccgagctgctggtgctgctggtcaaccacggccagggcattgaggtccaggtccgtggcctggagacggagaagatcaagtgctgcctgctgctggactcggtgtgcagcaccattgagaacgtcatggccaccacgctgccagggctcctgaccgtgaagcattacctgagcccccagcagctgcgggagcaccatgagcccgtcatgatctaccagccacgggacttcttccgggcacagactctgaaggaaacctcactgaccaacaccatgggggggtacaaggaaagcttcagcagcatcatgtgcttcgggtgtcacgacgtctactcacaggccagcctcggcatggacatccatgcatcagacctgaacctcctcactcggaggaaactgagtcgcctgctggacccgcccgaccccctggggaaggactggtgccttctcgccatgaacttaggcctccctgacctcgtggcaaagtacaacaccaataacggggctcccaaggatttcctccccagccccctccacgccctgctgcgggaatggaccacctaccctgagagcacagtgggcaccctcatgtccaaactgagggagctgggtcgccgggatgccgcagaccttttgctgaaggcatcctctgtgttcaaaatcaacctggatggcaatggccaggaggcctatgcctcgagctgcaacagcggcacctcttacaattccattagctctgttgtatcccggtgagggcagcctctggcttggacagggtctgtttggactgcagaaccaagggggtgatgtagcccatccttccctttggagatgctgagggtgtttcttcctgcacccacagccagggggatgccactcctccctccggcttgacctgtttctctgccgctacctccctccccgtctcattccgttgtctgtggatggtcattgcagtttaagagcagaacagatcttttactttggccgcttgaaaagctagtgtacctcctctcagtgttttggactccatctctcatcctccagtaccttgcttcttactgataattttgctggaattcctaacttttcaatgacattttttttaactatcatattgattgtcctttaaaaaagaaaagtgcatatttatccaaaatgtgtatttcttatacgcttttctgtgttataccatttcctcagcttatctcttttatatttgtaggagaaactcccatgtatggaatcccactgtatgatttataaacagacaatatgtgagtgccttttgcagaagagggtgtgtttgaaatcatcggagtcagccaggagctgtcaccaaggaaacgctacctctctgtcccttgctgtatgctgatcatcgccagaggtgcttcaccctgagttttgttttgtattgttttctgacagtttttctgttttgtttggcaaggaaaggggagaagggaatcctcctccagggtgattttatgatcagtgttgttgctctaggaagacatttttccgtttgcttttgttccaatgtcaatgtgaacgtccacatgaaacctacacactgtcatgcttcatcattccctctcatctcaggtagaaggttgacacagttgtagggttacagagacctatgtaagaattcagaagacccctgactcatcatttgtggcagtcccttataattggtgcatagcagatggtttccacatttagatcctggtttcataacttcctgtacttgaagtctaaaagcagaaaataaaggaagcaagttttcttccatgattttaaattgtgatcgagttttaaattgataggagggaacatgtcctaattcttctgtcctgagaagcatgtaatgttaatgttatatcatatgtatatatatatatgcactatgtatatacatatatattaatactggtatttttacttaatctataaaatgtcgttaaaaagttgtttgtttttttctttttttataaataaactgttgctcgttaaaaaaaaaaaaaa

SEQ ID NO: 1946 - DNA, 3775 bp, Homo sapiens
ggcagctaggagggttgctccgggcttggtgctcactgcgacttcccgcgcagggcccggtcggactaggacccgcggcctgagagacgctggaggatgcggacgcggaggccgcctggggtagcggcggcgggagtcctggcgctctgcaggtcagaagttgagtagcaggggcctaggagggctcgaagccttcacagcgatggcagagaagcgacccctgagaaccctggggcctgtgatgtatggcaagctgccccgcttagagacagactccgggctcgagcacagcctgccccactctgttggtaaccaggatccctgcacctacaaggggtcctacttctcctgccccatggcgggtactcctaaggccgagtctgagcagttggcgtcctggaccccatacccacccttgtactctaccggtatggcaggacccccacttcaggcagacaacctgctgaccaactgcctgttctaccgctcgccagcagaaggccctgagaagatgcaggactccagccctgttgagctcctgcccttcagtccccaggctcactcctacccaggcccaccactggcagcacccaaacctgtctaccgcaaccctctgtgctatgggctctcaacttgtctgggggaaggagcagtgaagaggccactggatgttgactggactctggcgactgggcccctgttgccctcagctgacccaccctgctctctggccccagctcctagcaagggccagactctggatggcaccttcttgcggggggtgccagctgaggggtccagtaaagactcctcagggagcttctccccatgccagcccttcctggagaaatatcagaccatccacagcacgggcttcctggcctccaggtacacaggtccttaccctaggaactccaagcaagcaatgtctgaggggccctcaagtccttggacccagctggcccagcccctggggccaccctgtcaggacaccgggcccacccactacccaccaccccaccacccaccaccccaccctccacaggccctgccttgccctccagcctgtcgccacccagagaagcagggcagctacagcccagcactcccactgcagcctctggggggccacaaggggaccgggtaccaggctggtgggctgggcagcccctacctgaggcagcaggcagcccaggcaccttacattcccccactggggctggacgcttacccctacccctctgcccctctcccagcaccctctccaggcctcaagctggagccgcctctcactccacggtgcccattggactttgccccccagacactgagttttccttatgcccgggatgacctctctctctatggagcatcccctgggcttggagggacaccaccttcccagaacaatgtgagggctgtgccacagcccggtgccttccagagggcatgccagcctttgccagcgagccagccctgctcagagcctgtgaggcctgcacaggaagccgaagagaagacctggctgcccagctgcaggaaagagaagctccagccccggctcagtgagcactctgggccgcccatcgtcatccgagacagtccagttccctgtacccccccagcactgcccccctgtgcccgggagtgccagtctcttccacagaaggaggacgcaaggccacccagctctccaccaatgcctgtcattgacaatgtcttcagcctggccccctaccgtgactatctggatgtgccggcacccgaggccacaactgagcctgactctgccacagctgagcctgactcagccccagccaccagtgaaggtcaggacaaaggctgcagggggaccctgcctgcccaggagggcccctcagggagtaaacccctaaggggctcacttaaggaggaggtagccctggatttgagtgtgaggaagcccacagcagaggcctcccctgtcaaggcttcccgttctgtggagcatgccaagcctactgcagccatggatgtgccagatgtgggcaacatggtgtcagatctgccaggcctgaaaaagatagacacagaagcaccaggcttgcctggggtgccagtgaccacagatgccatgccaaggaccaacttccacagctctgtggccttcatgttccgaaagttcaagatcctccgtccggcacctttgcctgcagccgtggtcccgtccacgcccacctcagctcctgctcccacacagcctgcacccacccccacatctgggcccattggactgcggattctcgctcaacagcccttgtctgtgacctgcttcagcctggcactgcccagccctccagccgtagctgtggcctcccctgcccctgctccagctccatcccctgctccggctcgagctcaggctccagcttcagcccgggatccagctccagctccagctccagttgcaggccctgctccagcatctacttcagccccaggggactccctggagcagcattttacaggactacatgcgtccctgtgtgatgctatttctggctccgtcgcccactctcctccagagaagcttcgcgagtggctagagacggctgggccctggggccaggctgcgtggcaggactgccagggtgtgcaggggctgctggccaagctgctgtctcagctgcagcgcttcgatcgcacccaccggtgccccttcccccatgtggtgcgagctggcgccatcttcgtgcccattcacctggtgaaggagcggctcttccctcggctgccacccgcttctgtggaccatgtgctgcaggagcatcgtgtggagctgcggcccaccacgctgtcggaggagcgggcactgcgggagctcgccctgccaggctgcacctcacgcatgctgaagttactggcgctgcgccagctgccggacatttaccccgaccttctcggcctgcagtggcgcgactgtgtacgccgccagctgggtgactttgacactgaggctggagctgtgtcctcctcagagcccactgtggccagagatgagccagagagcctagccctggctcagaagtcaccggcccccaaggtcaggaagccaggcaggaagccaccaacccctggcccggagaaagcagaggcagctgctggggaagagtcctgtggtgcctcccctacccctgctaccagtgccagcccacctggccccacactgaaggcccgcttccgcagtctgctggagaccgcctggctcaatggcctggctctgcccacctggggccacaagtcctcaagaccagaccagccctcaccctgcccacagctgctggacagccagagccatcacctgtagcactggttgccagtgctgtgtgtatagcagtcactctccacccttcccttctgcctgcccagctgccccggggccacgagtggatgctggggctgtggctgctcccctggaggggttccatctctgaccctgtggcccattcagggtgggctgaagagcccctgagcttttaacgtgagggtctttattggataggactactccctatttcttgcctagagaacacacatgggctttggagcccgacagacctgggcttgaatcccggctcgtgttcttgctgcaggacctgggcaagaaacttcacctctgctgagccctcattccccatgtgtaaaatgggacaacgcaacctacctcacagggttgttgtggggatgctgcctgatacataccctgtccccaaaaaaaaaaaaaaaaaaaaaaaaa

SEQ ID NO: 1947 - DNA, 2701 bp, Homo sapiens
gttgctgcggagccaggaggggaagcgatggctgggcccgcgtggatctctaaggtctctcggctgctgggggcattccacaacccaaaacaggtgaccagaggttttactggtggtgttcagacagtaactttaattccaggagatggtattggcccagaaatttcagctgcagttatgaagatttttgatgctgccaaagcacctattcagtgggaggagcggaacgtcactgccattcaaggacctggaggaaagtggatgatcccttcagaggctaaagagtccatggataagaacaagatgggcttgaaaggccctttgaagaccccaatagcagccggtcacccatctatgaatttactgctgcgcaaaacatttgacctttacgcgaatgtccgaccatgtgtctctatcgaaggctataaaaccccttacaccgatgtaaatattgtgaccattcgagagaacacagaaggagaatacagtggaattgagcatgtgattgttgatggagtcgtgcagagtatcaagctcatcaccgagggggcgagcaagcgcattgctgagtttgcctttgagtatgcccggaacaaccaccggagcaacgtcacggcggtgcacaaagccaacatcatgcggatgtcagatgggctttttctacaaaaatgcagggaagttgcagaaagctgtaaagatattaaatttaatgagatgtaccttgatacagtatgtttgaatatggtacaagatccttcccaatttgatgttcttgttatgccaaatttgtatggagacatccttagtgacttgtgtgcaggattgatcggaggtctcggtgtgacaccaagtggcaacattggagccaatggggttgcaatttttgagtcggttcatgggacggctccagacattgcaggcaaggacatggcgaatcccacagccctcctgctcagtgccgtgatgatgctgcgccacatgggactttttgaccatgctgcaagaattgaggctgcgtgttttgctacaattaaggacggaaagagcttgacaaaagatttgggaggcaatgcaaaatgctcagacttcacagaggaaatctgtcgccgagtaaaagatttagattaacacttctacaactggcatttacatcagtcactctaaatggacaccacatgaacctctgtttagaatacctacgtatgtatgcattggtttgcttgtttcttgacagtacatttttagatctggccttttcttaacaaaatctgtgcaaaagatgcaggtggatgtccctaggtctgttttcaaagaactttttccaagtgcttgttttatttattaagtgtctacctggtaaatgttttttttgtaaactctgagtggactgtatcatttgctattctaaaccattttacacttaagttaaaatagtttctcttcagctgtaaataacaggatacagaattaacaagagaaaatgtctaactttttaagaaaaaccttattttcttcggtttttgaaaaacataatggaaataaaacaggatattgacataatagcacaaaatgacactcttctaaaactaaatgggcacaagagaattttcctgggaaagttcacatcaaaaagagtgaatgtggtatatttctaaatgatatggaaaatagagacagatttgtcctttacagaaattactgagtgtgaataaaaacttcagatccaagaaatatataatgagagatataatttttgttaataagacaaaggtaatatattggatacaaagacacaaatgtattgtgtgttcaattattttgttgtcttgagatttaatattctttccaagagcttttaatgaagcagagagctagtacttcattttcactggatacattttcagcatcatgagttgtcacagcctctgagcccctgatctgaagccagaagggctgagtgtattgtaaacttattcttgcatgttgctgtctgggaatggaccacactacagcaggtagttctgggggcgatactgccgaaaggcccgaacacatgtattttggctgcaattgaggaacttgggatgctattaattttgtatttcagcaactgccccttctcctatcccaaagcaccaattactgccctctgcctcagcagtaccagtataagatgacattccaaagactggaggcaactcagcctgagttaattcacaaaattatgccatgctggggcttgagcttgagcttgggcttaggcttgggctcagcttttgaccctcaggcatctcctttcccttcctgtcttcctctcccttctcctctgctgcagcatgattttcttaatcttcagacactcactattttcatgaacagttaccctctgtccccacaaccaaagacaactcatggcctcctttggcccttgtgtaacattgcaaacctgtggctttgcaaaatgtacccaggtcacaaggggatttttttttttttagcaatgatatccctgtctgggtcactttttaagcttgtaaccgcccccccagacttataatcttaaatgtattttcctttgtttaagctgctgcttcctctgtttcattggattgtgccagttatcagtggctcttgggttcaaagtaataaagaattccaaaactgaaaaaaaaaaaaaaaaaaaaaaaaaaaaaaaaaaaaa

SEQ ID NO: 1948 - DNA, 1832 bp, Homo sapiens
gctttgcggctgtcgtcggagaggcatctgggttcggactggggccgccatggggaaagtgaatgtggccaagttgcgttacatgagccgagatgacttcagggtcttgaccgcggttgaaatgggcatgaagaaccatgaaattgttcccggcagtttgattgcttctatagccagccttaaacatggtggctgtaataaagttttaagagaattagtgaaacataaactcatagcttgggagcgtaccaaaactgtccagggctatcggttgacaaatgcaggatatgattacctagctttgaaaacactttcttctaggcaagtagttgagtctgttggaaaccagatgggtgttggcaaagaatcagatatttacattgttgcaaatgaagaaggacaacaatttgcattaaagcttcacagactaggaagaacctcgtttcgaaatttgaaaaacaaacgcgattatcataaacataggcacaatgtgtcttggctttatttatctcgtctctctgccatgaaggaatttgcctatatgaaggcattgtatgagaggaaatttccagttccaaagccaattgattacaatcgtcatgcagtggtcatggaactcataaatggttatccactatgtcagatacaccatgttgaagatcctgcatcagtatatgatgaagctatggaactaattgtcaaacttgcaaatcatgggctgattcatggagattttaatgaatttaatctcattttggatgaaagtgaccatatcaccatgattgattttccacagatggtttcaacttctcatcccaatgctgagtggtattttgacagagatgttaaatgcattaaagatttctttatgaaacgtttcagctacgaaagtgagctttttccaacttttaaggatatcaggagagaagacactcttgatgtggaggtttctgccagtggctacacaaaggaaatgcaggcagatgatgaactgcttcatccattaggtccagatgataaaaatattgaaacaaaagagggatctgaattctcattttcagatggagaagtggcagaaaaagcagaggtttacaggtcagaaaatgaaagtgaacggaactgtctagaagaatcagagggctgctattgcagatcatctggagaccctgaacaaataaaggaagacagtttatcagaagagagtgctgatgcacggagttttgaaatgactgaattcaatcaagctttagaagaaataaaagggcaggttgttgaaaacaactctgtaactgaattttctgaggagaaaaacagaactgaaaattacaacaggcaagatggtcagagagttcaaggaggagtccctgctggctctgacgagtatgaagatgaatgccctcatctaattgccttgtcgtcattaaatagagaattcaggcctttcagagatgaagaaaatgtgggagctatgaatcagtatagaacaagaactctgagtatcacttcttcaggcagtgctgtaagctgttcaacaattcctccagaactggtgaaacagaaggtgaaacgtcagttgacaaaacagcaaaaatcagctgtcagacgtcgattgcagaaaggagaagcaaatatatttaccaagcaacgtagggaaaacatgcaaaatatcaaatcaagtttggaagcagctagcttttggggagaataatatatttaggatcttggatatgtttaatatattttttaaagttactgtaattcctttttgagccctcatttgtcttttttgagccaaggctatcatatattaataaataaaccctctttcatct

SEQ ID NO: 1949 - DNA, 3346 bp, Homo sapiens
gagagccgagaaccgcctactccaggaggaaagcccgagggttgtgggtcctgctatagccagggccaagctccaggaaatcgtggccattcaggggtagtttgcagcctcatttgtaacattattgtgttgtcctgtgcatttccaatgcattacataaagacatggtcgcttttaggagaaatgtctgaaaaactaagaagatgcagaaaggaactgactgcagccattgaccgggcctttgaaggagttagttattcccaggagtgcacaggccagcagaggctggaactgagcgccgcgccgctctccttctcgctgcccgtgcacaggctcctctgcagaagacatcctctggcagcctgctcttctgctgctccttttgctgctgtcccatgtgctcctgagaatgagaaccctgcctttgcaacaaaccatgccccggtaaatgcaaaaccacatgctctgtgccccgagagaaaacctctaaccagcaaggaaaatgtattgatgcattcctccattttggcacctgaaagagagtcttggagaactgcaggagagggggaaaactggagaaaagaaaatttaaggaaagatatggagagagatttgaaggctgactcaaacatgccactcaacaattctagccaagaggtcacaaaggatctgcttgatatgattgaccatacaagcatccgaactattgaagaattggctggaaaaatagaatttgaaaacgaattgaaccacatgtgtggtcattgccaagattcacccttcaaagaggaagcctgggccctgctcatggacaagagccctcagaaggccacagatgctgaccctggcagcctcaaacaggcttttgatgatcataatattgttgagactgttctggacttggaagaggactacaatgtgatgacgtcttttaaataccaaattgagtaaggacagttatctaagctttgattccttacagcaggaggctgcccttgagcctgagcagaagcagctacaatggccgtcaggggccacatttctcaaaaggttggcagaacctgaattaccagaccctttttaaatcccagttgtgtccctttttaagctgtgagaccagttttttgaattccattgctttgaaatgtttcctattactgattttttttttttaactttccttgacatcttgaatgtgtttttttgattgatgttcaatatacccagtacccatggtaggtgtgggtcatgggcctctgctgtgtctcttagtgttcttttccacgggcccctaaaaaagtacaggagtggccaggcacagtggctcacgtctgtaatcccagcactttgggaggccaaggcgagtggatcacttgaggttaggagtttgagaccagcctggccaacatggcgaaaccccatctccactaaaaatacaaaaattagccaggagtggtggtgtgcacctgtagtcccagctactttggaggctgaggtaggagaattgcttgaacctggaggcggaggttgcaatgagccgagatggcaccgctcccctccatcctgagtgacagagcaagactctgtctcaaaaaaataataatttagctggtcatggtggttcgtgcctgtagttccagctacttgggtagggactgaggcgaaaggatcacttgaggccaggaggcagaggttgcagtgagctgagatcacgccactgcactccagcatgagtgacagagtgagaccctgtctcaaaaaaaaaaagaaaaaaaaagggaagaaaggaaactgaatctcagggaagtgcccacctcctgagctaataagaggaaggaatatgggggtgaggcagagctggcaaaaggctgttttttgttttgattgtttttaaagaccaagtgaagtatagtataagaagtggggaaggagtggaacaaggagttagatctgtaactgtgagtagtcaattgagataactcaatacctttggacctgattgtttttaaagactgagggtagtataagaagaggggaaggagtagaacaaggagttagatctgaaactgtgagtagtcgattgagataactcactacctttggaccagccagggctgtttataagtgctaaagcccgaacaaaccaaagagttggggagaaaggcctaactaacagctgagtgattgtctaacagactgtcttttaggccagtgactctggcatagggcaggctgcatagccagcaacatcccttaccacaggtctagtgattcctctgggctcaaatgtggaggctacacacccactccttagcagaggttggcctggcacctgctggtgccccaagaactatggcatggttagaccctggccacttgattgcatgtgcctccccagtgggcgtgccctggttcccaaccagttgtggccactgccactgccctgcctggggcaggagttgaggttaaggctaactacaggctccttccaggccacctaccactcagaccctgcaggaggtagcacaaagcattcacagcctgtggagtcagaggccaatttcttctccctgagcaagaagaatggaagcaaatgaaaagtgctcacagtatgctcaactgcccctgctcaggtgaagaatagcctgtctggatggagagatgtcaggctacttgatactcagaaaaacaggtctcaaaacagtgccttccaaataatacatgtggatgtggacactcttctatagacgaggtggagcttaattcctgtccttacccccatattcccacctcattaccaccctttgaaggtgaactagacttaatgatacttcccacgactaaagtagggaaagggaaaagtcacaaacttatagtggggaagcctggcagacacctaaccaagtgatgtcatgtatatgtcatgagaggggtgcatcacttccctggtattcctaccaaaaacccaaattcccagtgtatgatcttgagacaaatgttagacaaatccagacgtggggtacattctacaagatacctggccagaactcaagactgttgagatggccgggtgcagtggctcatgcctataatccccgacactttgggaggctgaggcgggcagatcacttgaggtcagaagttcgagaccagcctggcaaacatggtgaaaccccatctctgctaaaaatacaaaaattagccaggcatcatggcatgtgcctttagtcatagctacacaggaggctgaggcaggagaattgcttgaacccaggaggtggaggttgcagtgagccaagatcgcatcactgcactccagcctgggcaacaagcaagactccacctc

SEQ ID NO: 1950 - DNA, 2839 bp, Homo sapiens
caccatcgctgctggagcagctgccttcaggccctgcgccgcctccggagtccatggccggcacgcgctgggtactcggggcgctgctccggggctgcggctgtaactgcagcagctgccggcgcaccggcgccgcctgcctgcccttctactccgccgcgtcctaccctgccctccgtgcctctctgctgccgcagtcgctggcggcggcggccgccgtcccgacgcgcagctacagccaggagtccaaaactacttacctggaagaccttccaccaccccctgagtatgaattggccccgtccaagttagaagaggaagtggatgatgtctttctcattcgagctcaaggactgccctggtcatgcactatggaagatgtgcttaactttttttcagactgcagaatccgcaacggtgagaatggaatacattttctcctaaacagagatgggaaacgaaggggtgatgccttaattgaaatggagtcagagcaggatgtgcagaaagccttagagaagcaccgcatgtacatgggccagcggtatgtggaagtatatgagataaacaatgaagatgtggatgccttaatgaagagcttgcaggtcaaatcttcgcctgtggtaaatgatggtgtggttcgtttgagaggacttccttatagttgcaatgagaaagacattgtagacttctttgcaggactgaatatagttgacattacttttgtgatggactatagagggaggcgaaaaacaggggaagcctatgtgcaatttgaagaaccagaaatggccaaccaagccctgttgaaacacagggaagaaattggtaatcgatacatcgagatatttccaagcagaaggaatgaagttcgaacacatgtcggttcttataagggaaagaaaatcgcatcttttcctactgctaagtatataactgagccagaaatggtctttgaagaacatgaagtaaatgaggatattcaacccatgacagcttttgaaagtgagaaggaaatagaattgcctaaggaggtgccagaaaagcttccagaggctgctgattttggaactacgtcttctctgcattttgtccacatgagaggattacctttccaagccaatgcccaagacattataaacttttttgctccactcaagcctgttagaatcaccatggaatacagctccagtgggaaggccactggagaagctgatgtgcactttgagacccatgaggatgctgttgcagcgatgctcaaggatcggtcccacgttcatcataggtatattgaactgttcctgaattcatgtccaaaaggaaaataagactctaggggctccagataataagggtgaagcaagaagcatttcatttgcacatctttcttggacttgggatatacagttccagtttattagcagcaactgctagggaaatgattttggtgttttgggttaattgcttctaagaaaagtttcatagtggactgtttagaagaagaaatgaaagatccagtttgggattatgaaataaaccacaaattaaaatttttgtttaaactgtccaggatctgatttaaaaatatggtctttgttttatatgattaaatggtttgttttcatagatgatatgttactcattgtaaagaccacatatttttattcagcagtgttctttaaacggtttcatttaaaaagtaactttttttttttgcctgtgaattgagtgctctgatgtaaaacttctcatggagtgaaacagtgatttattttaaccaaacattcaccaaagcaaagaacggtttcagacctttgaactggtatggtttggcagaatagttttaaattttgctgtatttgattacttagagataggaatttttaaaaatcaaaacaaaaaataccacagcttagtgtaaatgacaatttggcggttttatgtctttagaaatgttttgcctttctaagccttgtgctaaaggcgtataacggtggtgcctatctacttaagggggcattctagtcttaacttaaaagttgtctaaactgtccctccctggctttttttggtttggggtagacctaagggtgtttgttagtctcaaaactgtgaagtgacatgtcagaacagtccagactggtaagaaaattaatggcttcacttgaatttaaaccagctctagataggaaaaaaatcagtctcctcatttgctttttaaatggagtagtacatcccatattttagaacaagtaggggtgccttgcttaaataaaaatagcatttaatgtataattgtgtgaagggtttatggataaagctgtacttctgtcacaatgtggcagtactttctgctttaatattaaacagcttgttatttaaatattggacaaaatggctggcttcaaaatatagtcattaataaactaactttatgtgcacctgtgtaggagaatcaaaatcctgtatgctttctttgccttgttcctgttctcagggtgacgactgccaccaggagatgcagttctagttcttaaaattaaatttgcccaggtttctgacaggtgatacctggaagagagactatgtcttctcttacttaatacataaccatctttgattaccagctaagatgcgaaatcactgtactgtagtcaataaatgaagacttgtttcaggctgaagattacctaagagtatttattattggagtctgtgagtcaactgaatatattattacctcaagtcctgctatattaatataagtagtaagggttaattttcgtgtgtgtgttctctaaaatcctgtgaacatgacttaaccagcttaacatcatca

SEQ ID NO: 1951 - DNA, 8448 bp, Homo sapiens
ctcctgctccgtctaggagtcaaaatggcggcgaggggaacctggagcagtcccggagcctgagccactgacaggagaggagagggcggcggcggcggcggtgggaggaggatggccgggggtgctggcgccggtgcggacggcggtgctggtggcggcggcggcggaggcgacggcagcggtcccagcggcagcagcagcggcgggaggagcctccgggaaatggatgaaaagaggctgctggatccagggttgaaggttcataaaggcctctgggattatactctgaagaacccgcagacggaatgcctgagtgactgaagaaaatgggtgctaatgcatctaattatcctcattcatgttccccgagggtagggggaaattcacaggcccaacagacttttatagggacctcatcctattctcagcaaggctatggttgcgaatcaaagttgtatagccttgaccatggccatgagaaaccacaagacaaaaaaaagagaacctctggtcttgccaccctcaaaaagaagtttattaagcgtcggaaatctaataggtctgccgatcatgccaagcagatgcgagaactcctctctgggtgggatgttagagatgtcaatgcattagtggaggaatatgagggaacatcagcattaaaggagctttctctacaagccagtttggctagaccagaagcccggacattgcagaaagatatggctgatctttatgagtacaagtattgtactgatgtagacttaatatttcaagaaacttgttttcctgttcatcgtgccattttggcagcaaggtgtccattttttaaaacactgctttcttcctcaccagagtatggggcagagataataatggacatcaatacagctggtattgatatgcccatgttttctgctttgttacactacctttatacaggagagtttggaatggaggactcaaggtttcaaaatgtcgatatccttgttcagcttagtgaagaatttggaacaccaaattcccttgatgtagatatgcgtggactctttgattacatgtgttattatgatgtcgtccttagtttttcttcagactctgaactggttgaagcttttggtggaaatcagaactgtttagatgaagagctcaaagcccacaaggctgttatttctgcacggtccccattttttcgaaatttattacaaaggaggatacgaactggtgaagaaatcacagaccgaactttgaggactcccacaagaattatattagatgagtccattataccaaaaaaatatgcaacagtgatattacactgtatgtataccgacgtggtggacctctctgttttgcactgtagcccctctgtggggagtctcagtgaagttcaggctctcgtcgcagggaagccaaacatgaccagggcagaagaagccatggaactttaccacatagcactgttcttggaatttaacatgcttgcacaaggctgtgaggatatcattgctgagagcatctcattagataccttaattgccatcctcaagtggagttctcatccatatggctctaaatgggtgcaccgacaagctttacatttcctctgtgaggaattttcccaggtcatgacttcggatgttttttatgaactcagcaaagaccatctgcttactgctatccagtctgactacctacaggcaagtgaacaagatatccttaaatatctgattaaatggggagagcatcagttgatgaaaagaatagcagatagagagccaaacttactgagtggcactgcccatagtgtgaacaaaagaggtgtaaaaagacgggacctggacatggaagagctcagagagatcctttcttctctcttaccttttgtgcgaattgaacacatcttacctataaacagtgaagtcttaagtgatgcaatgaaaagaggcttgattagtactcctccatcagatatgcttcctacaacagaaggtgggaagtcaaatgcctggttacggcaaaaaaatgctggcatctatgttcgtcctcgactcttctctccctatgtggaagaagcaaagtcagtgctagatgagatgatggtggaacaaacggatcttgtgcgcttgcgaatggttagaatgtccaatgtgccagacacgctctacatggtcaataatgccgtgccacagtgttgtcacatgatcagccaccagcagatcagcagcaaccagtcaagccctccttcagttgtagccaacgaaattccagttcctcgtctcctcattatgaaagacatggtcagacgactgcaggaactgcggcacacggagcaggtgcagagggcctatgccctgaactgcggggaaggcgccactgtcagctatgaaattcagattcgagtgctaagagagtttggtcttgcagatgctgctgcagagctgttgcagaatcctcacaaattctttcctgatgaacgttttggggatgaaagtccactcttgacaatgagacagcctgggagatgtcgcgtaaacagtacacctcctgcagaaaccatgtttacagatctggactcttttgtggccttccatccacccttgccccctccaccacctccctaccaccccccagctaccccaatccataaccaactcaaagcaggctggaagcaaagacctcccagtcagcacccttcacgttcattttcttatccctgtaatcattcgctgttccactccagaacagctcctaaagctggccctcccccagtctacttgccgagtgtgaaagctgcaccgcctgattgtaccagcactgcaggactgggcagacagacggtggctgctgctgccgccaccaccacctcaacagcaacagcagcagcagcagcagcatctgagaagcaagtgcgaacacaacctgtgctgaatgatctgatgccagacatcgcggtgggtgtgtccacactgtcactcaaggacaggaggcttccagagcttgctgtagacacagaattaagccagtcagtttctgaagcaggaccagggcctccccagcatctgtcgtgtattccacagagacatacacacacttctcggaaaaaacacacactagagcaaaaaacagacaccagagaaaatccacaggaatatccggatttctatgacttctcaaatgctgcttgcagaccttctactcctgctctcagcagacgcaccccttccccttcgcaaggtggatattttggtcccgatctgtacagccacaataaggcatcaccaagtggcttaaagtcagcctacctacctggtcagacgtctcctaaaaaacaggaagaagctaggagagaatatccactttcccctgacgggcatctacacagacaaaagaatgagccgatacacctggatgtcgttgagcaacctccccagcggtcagactttcctttggcagccccagaaaatgctagtaccggtccagcccatgtcaggggacgaactgcagtagaaactgacttgacttttgggctgactcctaacagaccttcactttctgcatgtagctctgaagctcccgaagagagatccggtagaagactggcagacagtgagtccctgggccatggagctcagagaaatacagatttggaaagggaagattcaataagcagaggaaggaggtcaccaagcaagccggacttcctctacaaaaagtctgccctctgagagcaacctccaagtcgtctgtgcctgagatgtgaaacatcccattttatgatgtaacccaacaacttacagaccagttcatcaatgccagctgataactcggtttcacatgattttgttctagtttttgtgtatatatgtgtttattagacatggcatgctaagaaggttttgttttttttttttaatgttgcatctgtctaatttgtctttgaacaattatgtcgggaggcatttttaagaacaagcaggctggcactttttatttctctttacaaatgatggaatttttttgcacttgtacatttattttctctgtattgattttatatcagtatgttaaactttattgccacatttaaaggactgtattttcatacttttttgcattttacctttcatctaccaatccatgtgcattggattgcacactaagatgtattttcttacgaaatagttctgtgtttattttttaattatagaaattccaaagaacagcacatcagaatgctcctctcttttcagtaattgttttagttcagagatcttcccgctcagcctccataaatctaatgtcattttttttttaataagtcctaggagctgggcttcattcctccagcgggagtccagtcagggtcctgaagtttgctggttcaggaaagaacaggaaagagaaaagccttctgtgcccaggctaaagctgttacatttccacagtgtggatgcagtcagaatccctgcacattctggtcataaggattagagtcaccagatgaggctctaaacagatcgcatcccttggaattagaaagcagtggagaccgggcgcagtgactcacacctgtgatcggcacttcggaaggccgaggcgggcagatcactgaagctcaggagttcaagaccagcctgggcaacatggcgaaactccatttctataaaaaatacaaaaaaaaaaaaatctagccaggcgtggtggtgcgtgcctgtagtcccagctacttggggggctgaggtggcaggatcgcttgagcctgggaggttgagactgcagtgagccaagattgcaccactgtgctcccacctgggcaacagtgagaccctgtctcaaaaaaaaaaaaaaaggcagtggaaatagagaagtaacttaaaggtcacactgacagaatttctggttctgagcgtcaactctccagctgtgatggcggaactgactgcttgctgcctttaattgtcttgctctctatgggaaaaaaacaaaagggcttcagtctcatggatgttatttggtgtttgtaaagatacgttttcttttaaacgattttcaaaatatgtctaaattttggtgttgtgtaatgcataatgctttctcaccaacagaaaaaaggaaaaaaattgttttcagttaaacactacatgtcctacttgaactccactgggacgctggtttggcatttactaaaccactgagcacatggggtctttcaggatcctctcccttggaagggcaatgtgtgagctaaggactgttttttttcttactctccaatgtaaatatatgagtatttgagtttttaaatcacttcaacattatttgagcatttactttgtatttttacaaacacataaacacacagccgtagcacttagaagaaaagaggctttctaagcattccttcctctgcaggatatttgggatcctcttttctatgtatgtatatatataaaaaactatgaatcactcacactcactcgaaaactatgcagggctagggagcgtttatgagctaccgggtaaatgaattacatgcactttgaagtaaataggttttctattgggtgtcaacaacgctgatttctcccaaaactatagtttctcttacggtcttttcctcctttaccctgtggatatacactcaggaataatctgacattttagaaaagccgaacagtagatagtctccaagatgggaaacatgtcgtgtgtctgcacgccccggcaaactgccgccactcgttctgctgcctgactggttagctgctgtgcgggtgcgctcggtgacactggtggtggtgcacgctcccgagctcccagagttaacactaatctgcaggtcggctgtgcatcgcattcgaggctccttttttaaagagaaaagcataggcctctgttctcatttgtaagaagtttgactcataatagaagacggtgtcttttgaagcccagtctctgtctgtcttcagaaacaaaagtgaatgccgtcatgttccttgatgtgtgtttctgccacatatgtatgttgacatgttcatgtactgcgccggtactgcaagtaagactcaacagacctaatttggatggggagaaaaactctcatccctgacccttccccccccgcaaatgttagaccagagctgttgatcccacacattcatttttctgaaaattcatgaactattctctcatatccctgaaatataaaagtaagtggccactattcctaagattatttagtttataaagtttgcttttaatcatacaatagcttacctggctaaaactttgcgtataaagggaaaacttgctttaatctgtgggattgcggaccgatgcgacttgcagaaggtaaacaggcgtgggttttgtgtgcgttaggttaggtgttagtggacttttaatgtatcttgtgaagtatggttactagggtaggttcaagagctacatgcctctggcttttgaacccatctattaaatcttttttaatgctgtactaagataaatgtgaagtctgagtaaggttgctctcagaaaaaaaaaaaaagcatatatatatataaaataaaatttaggccatgggaactggcattttacttggtataggaatttaatgagaaccaaatcacaaaaataccagatctccttttgagatcgtggacaatcaggcctttggacaatcaccgcttccagtgcccgctgtgcgttgaggttagagacctaccgtttacacgctagagccgagaggacgttcaagtttcttaaagatgctgttggtcttttttcttatgttattgttttagttttgtgattttgatgaataattgaagttcagagtcacccgtggctcctaaggaaaaaacagcatcatgaaaggcaaaaagtatttgaaacgtaattgtttcaattttccacgcccgttctcacatgccccctttagctttatttctgggaacatgtcactagacctcagctagcctgacaccgcaataacccgttaggctttgaggcttttcagtgaattcttgacatttaaatcttcttatagaattctttatgaagccttaactaattcttgtttttgcttcctcagaaactttttattgcatctgccatccttcattggatttttgttttggtttgttgttgccattctagcaatgagcttagtccttgtacatctgcattaaggtgccgatgcagaaggcaaattggaaacacgcgccagcggcagtggggctcaaagccgacctccatgcatcattctctagagttgaaaggattgacatttctcagtaactacccggcaaaatatatattttcataatgttgaatttgccttttaggaaaacaatgtttcatgaaacacttgtaagatacttattttgaaattaattataaggcattcatatttttaggactgaattcaaagggaaatgcttctttgactttttttcattgttcggttgactttcagctttctggagtgacaaagcagcagtgatgggtgctattcctggttctgtggtggtttactttgtctactaagtgatttactttcaaacctcattacagataatcttactaaaagacttaacatgcacactgctaaaaggtgttttactgttttccattaacgctgttgtatgaacaatatttggtgacatgttgtctttttgtcctgtagattgtcatatctgttatgtagttatccttttggcaagtcctttgatttttttttcctctagaaaatcctcagactgtcaatcttccatattttgaatattataatgctgtggccatttctatagaaagattacttgcaagtgtgtgtcttgaaaataacctcttgtatttgtgtgtttatgtgagttctgtctaagagatcagataagctctggaagcttcatcatctgtacctacatgtaactgtatctgggttacatgggcaggcggtaccaagtcctgctcttcgatggggtggctgagagataaaggttcctgaactctccttgctgtgtatgcaccacatctgtacttcagagaggtggaaaatcatctacaacactgcgtttcttgtggttgtgctgttactggtataaagtcaagtgccttcaatgctaaaggctcagaaatttttcttaaactgatttcatgtcctatgcaagtgttttctacaacctgcataaccagtactttgtaaaacttgtttacgcttcaattgtacatagtgatttttaaagaaatatatagtatttttatttaggtacctccaaacttgaattcgtctgtgtgaagcattgtaaaacgatacatttctcttttgagtaccattacagttgtacagaggttttcactgcttctatttttctactgttactgataagcatgtaacactgactttatcctacatatagttggcatttcaaataaatggcttgtatagaa

SEQ ID NO: 1952 - DNA, 2568 bp, Homo sapiens
ctcctgctccgtctaggagtcaaaatggcggcgaggggaacctggagcagtcccggagcctgagccactgacaggagaggagagggcggcggcggcggcggtgggaggaggatggccgggggtgctggcgccggtgcggacggcggtgctggtggcggcggcggcggaggcgacggcagcggtcccagcggcagcagcagcggcgggaggagcctccgggaaatggatgaaaagaggctgctggatccagggttgaaggttcataaaggcctctgggattatactctgaagaacccgcagacggaatgcctgagtgactgaagaaaatgggtgctaatgcatctaattatcctcattcatgttccccgagggtagggggaaattcacaggcccaacagacttttatagggacctcatcctattctcagcaaggctatggttgcgaatcaaagttgtatagccttgaccatggccatgagaaaccacaagacaaaaaaaagagaacctctggtcttgccaccctcaaaaagaagtttattaagcgtcggaaatctaataggtctgccgatcatgccaagcagatgcgagaactcctctctgggtgggatgttagagatgtcaatgcattagtggaggaatatgagggaacatcagcattaaaggagctttctctacaagccagtttggctagaccagaagcccggacattgcagaaagatatggctgatctttatgagtacaagtattgtactgatgtagacttaatatttcaagaaacttgttttcctgttcatcgtgccattttggcagcaaggtgtccattttttaaaacactgctttcttcctcaccagagtatggggcagagataataatggacatcaatacagctggtattgatatgcccatgttttctgctttgttacactacctttatacaggagagtttggaatggaggactcaaggtttcaaaatgtcgatatccttgttcagcttagtgaagaatttggaacaccaaattcccttgatgtagatatgcgtggactctttgattacatgtgttattatgatgtcgtccttagtttttcttcagactctgaactggttgaagcttttggtggaaatcagaactgtttagatgaagagctcaaagcccacaaggctgttatttctgcacggtccccattttttcgaaatttattacaaaggaggatacgaactggtgaagaaatcacagaccgaactttgaggactcccacaagaattatattagatgagtccattataccaaaaaaatatgcaacagtgatattacactgtatgtataccgacgtggtggacctctctgttttgcactgtagcccctctgtggggagtctcagtgaagttcaggctctcgtcgcagggaagccaaacatgaccagggcagaagaagccatggaactttaccacatagcactgttcttggaatttaacatgcttgcacaagaggagactacagtcatcaggcctgcctgtgcagcagagctttcaaacagctgcttactgcctcaatcttaaatatgaaaacccatccaaggataactggacatttgaggaaagcttccaaattgagacagagatcagagcaaaaagaacaaagtcctggaggaagcagacaatgaagggagcagaagaaaacttcagtagaatcaaaatatccttatataaaagaactttttatggaatcagtgagacataagcaggatgctattaaagtaaaaacaggagcttttagaaataagatagcagaaatgaaagatataatggaagcattgaaaggtacagttgaggaaatctagaaagtaaataatataataaagagatgagtggagacaaataaaactagagtattcatccagggtctaacatctaacaaatagtggctttagaaatatataccagagaaaagtgaagagaagacagtatctaaggagtaatataagaaatatttccaaaactaaaggaatttctatataaaaagtttctttttcagaacactggggaaaaagagacaattttaaaatgttgcagggaggagaaaaattaggttccatgcaaagaaataggaatcagatggtattgagattttcagtagcaacaactgaataccacaatacagtgaagtagtgtcttccaaaagctgatggaaaattattttaaacacaaaatcctatatttagccaaacagtcaatcaagtgtaaggctaaataaaggcatttttcagtcatacctcgaaaaactgcctgtgtagggatatttcccctgcttccccactcaggcagctgctgggaatgtattccaccaaatgacgaagcaaaccaagaacaaagaagtgaaggatctagaaaatgggctccaacacgggaaggaagcaaagggagatcccacgcatcagccacacagtaggtcttgtgggcattcagtctagcccagaccgggagggtgaaagtctccaaggaaagaggtgtctcggaagaaatcaattactttcaatgtttgaacattaaatagcaaatgacaaagcaa

SEQ ID NO: 1953 - DNA, 3438 bp, Homo sapiens
cggttctttccggaaattatgactgcagctgttttcactccgctgtgactcagagcgctccgggctgcaggagaggaagaaatcttgcatcaccatggtgcacttctgtggcctactcaccctccaccgggagccagtgccgctgaagagtatctctgtgagcgtgaacatttacgagtttgtggctggtgtgtctgcaactttgaactacgagaatgaggagaaagttcctttggaggccttctttgtgttccccatggatgaagactctgctgtttacagctttgaggccttggtggatgggaagaaaattgtagcagaattacaagacaagatgaaggcccgcaccaactatgagaaagccatctcccagggccaccaggccttcttattggagggggacagcagctccagggatgtcttctcttgcaatgtgggtaacctccaacctgggtcgaaggcggcagtcaccctgaagtatgtgcaggagctgcctctggaagcagatggggctctgcgctttgtgctcccagctgtcctgaatcctagataccagttctctgggtcgtctaaggacagttgccttaatgtgaagactcctatagtccctgtggaggacctgccctacacactcagcatggtcgccaccatagattcccagcatggcattgagaaggtccaatccaactgccccttgagtcctaccgagtacctaggagaggacaagacttctgctcaggtttccctggctgctggacacaagtttgatcgggacgtggaactcctgatttactacaatgaggtgcatacccccagcgtggttttggagatggggatgcctaacatgaagccaggtcatttgatgggagatccatctgcaatggtgagtttctatccaaatatcccagaagatcaaccatcaaatacctgtggagagtttatctttctcatggaccgctcgggaagtatgcagagccccatgagtagccaggatacatctcagctgcgaatacaggcagccaaggaaacactgattttgctgctgaagagtttacctataggctgttatttcaacatctatggatttggctcttcctatgaggcatgctttccggagagtgtgaagtacactcagcaaacaatggaggaggctctggggagagtgaagcttatgcaggccgacctagggggcactgaaatcttggcaccactccagaacatttacaggggaccctccatcccaggccaccccctacagctttttgtctttacagatggagaagttacagacacgtttagtgtaattaaagaagttaggatcaacagacagaaacacaggtgtttctcatttggtattggagaaggcacctccaccagcctaataaaaggtattgcccgggcatcagggggcacctcagaatttatcacaggcaaagacaggatgcagtccaaggctctcaggactctgaaacgctctctgcagcctgtggtagaggatgtctctctgagctggcatttgcctcctggtctgtctgctaaaatgctttccccagaacagactgtcatctttaggggtcagagattaatcagctatgcccagctgaccgggaggatgccagcagcagagacaacaggagaagtatgcctcaaatatacactccagggcaagacttttgaggataaggtgacatttcctctacaacccaagcctgatgtcaacctcaccattcaccgccttgctgccaagtccttgctccagaccaaggacatgggcctcagggagactccagcaagtgataaaaaagatgcattgaaccttagccttgagtctggtgtcataagctccttcacagctttcattgctatcaataaggagctcaacaagccggttcaggggcctctggctcatagggacgtcccaaggccaattctgttgggtgcttctgccccattgaagataaaatgccaatcaggttttcgaaaggccttacactctgaccgtcctccttctgcatctcagcccagaggggaacttatgtgttataaggccaagacattccagatggacgattacagtctctgtgggttgataagtcacaaggaccagcacagtccaggctttggagagaatcaccttgtgcagctgatttaccaccaaaatgcaaatggttcctgggatctgaatgaagatctagccaagatcctaggtatgagtttggaagaaataatggctgcacagcctgccgagcttgtggattcctcaggctgggccaccatcctggccgtgatctggctgcacagcaatggtaaggacttgaagtgtgaatgggagcttctggaaaggaaggccgtggcctggatgcgtgcccatgcaggctccaccatgccttcggttgtgaaagctgctattactttcctgaagtcatctgtggatcctgctatctttgccttttgaagataccatccagaaaaagaagtgcctttaatttgctactgtcatttcctctagtatcacttttgctgtgatgatgtgttcttgtgtattataactctttattttttgccataaaagtaaaggatgcttactccacttcgcttctctgctccaggttcactttggatatgatctttcttttcccaacatatgccctcagaaaagtgacagtggtcccagaacctattccctttcttgagggagttcaaaacattcataggcagtaatgttcctcccagggtttccagggaaacaacatgaaaaacaggtgacatgaactacagactaaagattgcagcatttatgttagagaatgcttgaattagagaattttctgcattatctttgtctgttcactttctatcttatatacttatcagggccatactggtaagcttgcgtaggaggagttagagggaagttgaaagccaacatctggatcaatgtaatgtcaagatcacaaagacagagactgcaggggtccactgtgagaggtgacactgttggggaccttcctgattcattcttcttgggctttgctagcctgtacaacctacatgtcttttcttccactgcctgaaagacttgggttgaactataactgttggagagagatgttcctctttaatcatgaaacaccttaagaagtctataatgcaatccttagtcctaccctgaacctatgtgtcctctaagtcaggccctgatctagtgcagtaaagggaagggtgggcttaatgggagctttgcctgggacctgaacctggagcacttaccgcattaggaagaaaggagctccccgtaatcgttcctgacccttgtgtctcatataccctatcctggtggaaatgaccctatttgatatgctgtcccttaaaataacttgtatcaatattaaaatgactatttctaccctttgatgagtaaaaaaaaaaaaaaaaaaa

SEQ ID NO: 1954 - DNA, 1874 bp, Homo sapiens
cggttctttccggaaattatgactgcagctgttttcactccgctgtgactcagagcgctccgggctgcaggagaggaagaaatcttgcatcaccatggtgcacttctgtggcctactcaccctccaccgggagccagtgccgctgaagagtatctctgtgagcgtgaacatttacgagtttgtggctggtgtgtctgcaactttgaactacgagaatgaggagaaagttcctttggaggccttctttgtgttccccatggatgaagactctgctgtttacagctttgaggccttggtggatgggaagaaaattgtagcagaattacaagacaagatgaaggcccgcaccaactatgagaaagccatctcccagggccaccaggccttcttattggagggggacagcagctccagggatgtcttctcttgcaatgtgggtaacctccaacctgggtcgaaggcggcagtcaccctgaagtatgtgcaggagctgcctctggaagcagatggggctctgcgctttgtgctcccagctgtcctgaatcctagataccagttctctgggtcgtctaaggacagttgccttaatgtgaagactcctatagtccctgtggaggacctgccctacacactcagcatggtcgccaccatagattcccagcatggcattgagaaggtccaatccaactgccccttgagtcctaccgagtacctaggagaggacaagacttctgctcaggtttccctggctgctggacacaagtttgatcgggacgtggaactcctgatttactacaatgaggtgcatacccccagcgtggttttggagatggggatgcctaacatgaagccaggtcatttgatgggagatccatctgcaatggtgagtttctatccaaatatcccagaagatcaaccatcaaatacctgtggagagtttatctttctcatggaccgctcgggaagtatgcagagccccatgagtagccaggatacatctcagctgcgaatacaggcagccaaggaaacactgattttgctgctgaagagtttacctataggctgttatttcaacatctatggatttggctcttcctatgaggcatgctttccggagagtgtgaagtacactcagcaaacaatggaggaggctctggggagagtgaagcttatgcaggccgacctagggggcactgaaatcttggcaccactccagaacatttacaggggaccctccatcccaggccaccccctacagctttttgtctttacagatggagaagttacagacacgtttagtgtaattaaagaagttaggatcaacagacagaaacacaggtaggaagaaaatgtgatttccgggtgattggtgctgagtagtgacacacagactctagtgctacatgatgccggtgttgaccttccttcaagaggaccaaatgatttcagaatttagttttagcagctgaaaatttatttctccctgtaaacgttaaaaacagttttccaaataacatcaacaacacagcaaaaccattgtttcttattctttctaaactacaacgaacacaagaattgaatagtaagatgttaattttttttactataaacatttttagagaagtaaaacatgctgaaaactacacaaattataagcatacaactggactcattatcacagtgaatgcactgtgtgatcgccacataggtaaaaactggaatggtcgtaggcctctccatctgtacccttttccatcatgtcctattccctgtcactacacactaaaactttcctgacttacaataccatgggttatttatgcttgtttttgaatgaaaataaataagttatacagtaaaaaaaaaaaaaaaaa

SEQ ID NO: 1955 - DNA, 1953 bp, Homo sapiens
gaggagctccagccgcgctctctcccggcagtggctgtgcttcacagcgcttgttgggttccccaccccttttaaataagccgggctggtcaccgccctcgcagacgagtcagcttaagggaggcggcggcagcgcggcggtggggccccaagctgggccggcgcgcggggtcggcggagctgtactgcgcgtccgacatctacgaggcggtgtccggggacgcggtggcggtagcgcccgctgtggtggagcctgccgagttggatttcggagagggcgagggccaccacctgcagcacatcagcgaccgcgagatgcccgaagatttagctttggagtcaaacccttctgaccatccaagggcaagcacaattttcctgagcaaatctcaaacggatgtgcgagaaaagaggaagagcaaccatttgaaccatgtatctccagggcagcttactaaaaagtatagctcatgctcaacaatatttctagatgacagcacagtcagccagcctaatcttagaaccacagtaaaatgtgtgaccttagcaatatattaccacataaagaacagagatgcaaatagatccctggatatttttgatgagagatcacatccacttacacgagaaaaagttccagaggaatactttaagcatgatcctgagcacaaatttatttacagatttgttcgtactctttttagtgctgcacagctaacagctgaatgtgcaatagtaactttggtttacttagaaaggcttttaacttatgctgaaatcgacatttgtcccaccaactggaaaaggattgttctgggagccattcttcttgcctccaaggtttgggacgatcaggctgtatggaatgtggactactgccagatcctcaaggacattacagttgaggacatgaatgaaatggaaaggcattttctggagcttcttcagtttaatattaatgttcctgccagtgtttatgccaaatactactttgaccttcgctccttagcagatgacaacaacctgaattttctatttgctcctcttagcaaagaaagagcacagaacctagaggctatttctagattgtgtgaagacaaagacttgtgtagagccgctatgagaaggtctttcagtgctgataacttcattggtattcagcgctctaaagccatcctctcttaaaaggagaaatgaggggttataacgtcatgggaccttcatctacaaagactggagaaataccacctttcctgctcaaaaaccagcaaaattagtgttttcatcaaaaggaaagatctcaaattcaagagactcatggacaacaaggattatactccacaggaaagaatgggaccttgtcaatgcaacaaaacactcttctgtcctttttaatgtaaacagagttacaaaaaccactccaaagtgaaggctcccatcctacacacagatatttgcttactgtgtgggccgatagctgtgaactatgtaaggttttttaaacaatagtttaaatttttagactttaaagacactaaccatataacttttatgtttcttccagtttctctccctccccccgcattttgctgcatatgcctttaaaatcaatgcagtattaccattaaaacatgggactctaactaaagccacttaggagcagacagcagcgttgttaggtactgaagggttcttcctccctactgttaaccattgaagctgctagtcattggcaatcattttaaaccaaaaagctgctggataacatttgtcattcatattctttgcaagcattactttagcattttagcatgtttggggtcataaacagaggaagtatcagttattgatatctacttctattggagtccatgttgcatttcttgtgaactataaatggtgcttctcattttctgataatttttctcttgctaaataaatgtattaaaagat

SEQ ID NO: 1956 - DNA, 3098 bp, Homo sapiens
cacggaacagccctcctggggtccccacgagccgcgtcctgctgtgccccggcgcctacgcagcagcggccgcggccgcggtgggcacgcacggttaccccgggcagctccggccgccagctgcagccccgtcgcctcggccgcgccagccggctgcgggcacctgggggcgggctgggggcgccggccgcggcaggaggcgctgtagcgagggctgcggcgccggtcctgcggcggccgcgggaggcagcggggcaggcgctgtgggccgggctcctcctccggctcctgcgcgaccgcctcccgccgggctctgccggcgcccgccgtccccgcagcgccgctctgcgcccgccgccccgagcgcccgcgcggggctggcgggagcctcggcgggcgcgcgggcgcgcggggccatggtcgtggccccctgacgggccgcggccgcctccatgaagcggaaaagcgagcggcggtcgagctgggccgccgcgcccccctgctcgcggcgctgctcgtcgacctcgccgggtgtgaagaagatccgcagctccacgcagcaagacccgcgccgccgggacccccaggacgacgtgtacctggacatcaccgatcgcctttgttttgccattctctacagcagaccaaagagtgcatcaaatgtacattatttcagcatagataatgaacttgaatatgagaacttctacgcagattttggaccactcaatctggcaatggtttacagatattgttgcaagatcaataagaaattaaagtccattacaatgttaaggaagaaaattgttcattttactggctctgatcagagaaaacaagcaaatgctgccttccttgttggatgctacatggttatatatttggggagaaccccagaagaagcatatagaatattaatctttggagagacatcctatattcctttcagagatgctgcctatggaagttgcaatttctacattacacttcttgactgttttcatgcagtaaagaaggcaatgcagtatggcttccttaatttcaactcatttaaccttgatgaatatgaacactatgaaaaagcagaaaatggagatttaaattggataataccagaccgatttattgccttctgtggacctcattcaagagccagacttgaaagtggttaccaccaacattctcctgagacttatattcaatattttaagaatcacaatgttactaccattattcgtctgaataaaaggatgtatgatgccaaacgctttacggatgctggcttcgatcaccatgatcttttctttgcggatggcagcacccctactgatgccattgtcaaagaattcctagatatctgtgaaaatgctgagggtgccattgcagtacattgcaaagctggccttggtcgcacgggcactctgatagcctgctacatcatgaagcattacaggatgacagcagccgagaccattgcgtgggtcaggatctgcagacctggctcggtgattgggcctcagcagcagtttttggtgatgaagcaaaccaacctctggctggaaggggactattttcgtcagaagttaaaggggcaggagaatggacaacacagagcagccttctccaaacttctctctggcgttgatgacatttccataaatggggtcgagaatcaagatcagcaagaacccgaaccgtacagtgatgatgacgaaatcaatggagtgacacaaggtgatagacttcgggccttgaaaagcagaagacaatccaaaacaaacgctattcctctcactctctccatttcaaggactaaaacagtcttgcgttaagtaaaaacctgtgaccagagctgaaggaagactctaggactgaaaactgcaacagaaattagcacaatttgaaaacaaaacaaaattgcaaaagccttagttgctttttccacctaagaagttgatcaatggagaaaatgtccactggagtttgaataatgaactttgagtttgggtgcaagcaaatgactcagagaagggtccagctctcaagctgaatgacaaacatgctgttgtaaatttagtctcaggtgtaaatacccaagccctctggtacccagggagctggctggtctgtggtgcatgtgtgtccctgtgatggcaatcattgtagttgctggccttcagaagaattgaggatctgatggaggttttttatgtatttattttctgttcaccttgtgaccctgtgtcaaaatttataaagatacaaaaggcattactgaaatggtactttctgtaatttgatactatttggcttaatcatcttcacttgactatttgtaatactgttgtaatgttaactctgttaagtacccaagctgcttgtcttccaccaaagagtgctttattaacaagaatctgtgaaaatcacatttaaacactgttgcatgttgtaagaccaggtggtaccttagtaacctaaaacttgcaagagaatattaatggtagctttagaagactcaggaggagaaactgacttcagagttggaagatgttgcaagtcgttcctttttctgtccttcagggactgaagaactgggaggctgcccattgtttggttgccagtcatacaaattaaaatcatatttccttccatgaatggaagaaacacactattggtttttccccttggaaacagcaatcccaaataatgtcggcttacaaaaaaaaaaagttaccacttttttagagtccttccctgtaacattggattttttttttcccttatgagatccacctaaggccattgacgtggcctgcgatctcagtgacaatgatctgcttctggatctcactgttgcctttggttagggaacacagagtgcttctcccgcagccctactggaacacagcagagtctgtgccatgaagcagttacagaaacagaattgatgtgctgctaaaaaaaaaaaaaaaaatggggcccgggggggcgtccgccggccctgcgggccgccggtgaaataccactactctgatcgttttttcactgacccggtgaggcgggggggcgagccccgaggggctctcgcttctggcgcg

SEQ ID NO: 1957 - DNA, 4624 bp, Homo sapiens
cacggaacagccctcctggggtccccacgagccgcgtcctgctgtgccccggcgcctacgcagcagcggccgcggccgcggtgggcacgcacggttaccccgggcagctccggccgccagctgcagccccgtcgcctcggccgcgccagccggctgcgggcacctgggggcgggctgggggcgccggccgcggcaggaggcgctgtagcgagggctgcggcgccggtcctgcggcggccgcgggaggcagcggggcaggcgctgtgggccgggctcctcctccggctcctgcgcgaccgcctcccgccgggctctgccggcgcccgccgtccccgcagcgccgctctgcgcccgccgccccgagcgcccgcgcggggctggcgggagcctcggcgggcgcgcgggcgcgcggggccatggtcgtggccccctgacgggccgcggccgcctccatgaagcggaaaagcgagcggcggtcgagctgggccgccgcgcccccctgctcgcggcgctgctcgtcgacctcgccgggtgtgaagaagatccgcagctccacgcagcaagacccgcgccgccgggacccccaggacgacgtgtacctggacatcaccgatcgcctttgttttgccattctctacagcagaccaaagagtgcatcaaatgtacattatttcagcatagataatgaacttgaatatgagaacttctacgcagattttggaccactcaatctggcaatggtttacagatattgttgcaagatcaataagaaattaaagtccattacaatgttaaggaagaaaattgttcattttactggctctgatcagagaaaacaagcaaatgctgccttccttgttggatgctacatggttatatatttggggagaaccccagaagaagcatatagaatattaatctttggagagacatcctatattcctttcagagatgctgcctatggaagttgcaatttctacattacacttcttgactgttttcatgcagtaaagaaggcaatgcagtatggcttccttaatttcaactcatttaaccttgatgaatatgaacactatgaaaaagcagaaaatggagatttaaattggataataccagaccgatttattgccttctgtggacctcattcaagagccagacttgaaagtggttaccaccaacattctcctgagacttatattcaatattttaagaatcacaatgttactaccattattcgtctgaataaaaggatgtatgatgccaaacgctttacggatgctggcttcgatcaccatgatcttttctttgcggatggcagcacccctactgatgccattgtcaaagaattcctagatatctgtgaaaatgctgagggtgccattgcagtacattgcaaagctggccttggtcgcacgggcactctgatagcctgctacatcatgaagcattacaggatgacagcagccgagaccattgcgtgggtcaggatctgcagacctggctcggtgattgggcctcagcagcagtttttggtgatgaagcaaaccaacctctggctggaaggggactattttcgtcagaagttaaaggggcaggagaatggacaacacagagcagccttctccaaacttctctctggcgttgatgacatttccataaatggggtcgagaatcaagatcagcaagaacccgaaccgtacagtgatgatgacgaaatcaatggagtgacacaaggtgatagacttcgggccttgaaaagcagaagacaatccaaaacaaacgctattcctctcacagtaattcttcaatccagtgttcagagctgtaaaacatctgaacctaacatttctggcagtgcaggcattactaaaagaaccaccagatctgcttcaaggaaaagcagtgttaaaagtctctccatttcaaggactaaaacagtcttgcgttaagtaaaaacctgtgaccagagctgaaggaagactctaggactgaaaactgcaacagaaattagcacaatttgaaaacaaaacaaaattgcaaaagccttagttgctttttccacctaagaagttgatcaatggagaaaatgtccactggagtttgaataatgaactttgagtttgggtgcaagcaaatgactcagagaagggtccagctctcaagctgaatgacaaacatgctgttgtaaatttagtctcaggtgtaaatacccaagccctctggtacccagggagctggctggtctgtggtgcatgtgtgtccctgtgatggcaatcattgtagttgctggccttcagaagaattgaggatctgatggaggttttttatgtatttattttctgttcaccttgtgaccctgtgtcaaaatttataaagatacaaaaggcattactgaaatggtactttctgtaatttgatactatttggcttaatcatcttcacttgactatttgtaatactgttgtaatgttaactctgttaagtacccaagctgcttgtcttccaccaaagagtgctttattaacaagaatctgtgaaaatcacatttaaacactgttgcatgttgtaagaccaggtggtaccttagtaacctaaaacttgcaagagaatattaatggtagctttagaagactcaggaggagaaactgacttcagagttggaagatgttgcaagtcgttcctttttctgtccttcagggactgaagaactgggaggctgcccattgtttggttgccagtcatacaaattaaaatcatatttccttccatgaatggaagaaacacactattggtttttccccttggaaacagcaatcccaaataatgtcggcttacaaaaaaaaaaagttaccacttttttagagtccttccctgtaacattggattttttttttcccttatgagatccacctaaggccattgacgtggcctgcgatctcagtgacaatgatctgcttctggatctcactgttgcctttggttagggaacacaactagtaactctgcagagtgccttctcccgcagccctactggaacacagcagagtctgtgccatgaagcagttacagaaacagaattgatgtgctgccaaaaaaaaaaaaaaaatggggcccgaaataaaagaatatatagtactcacctcagttccttccataagaagtgggtggtttaatgattgttaagccatttttgcctgtgccgggagcatggagggctgagatgtcgacaggcagtgggaaacaaatgccctcctaagccacaaggcgtgcgccagattagtaggcaactccattttaagaagctgcctttttcacaaaactggaagaaataaaagcggttggaataaacaagttaaaagtctttaatgcaaaaagtaattgaaaggcagtgcctccattttggtgtactttcttggaagaaagtataaaattgaccggcatcatgagagacggaagatgccgtgttctcagccaaacaagcaactctttccccgccaggcactgtcgggtggggtcaggccagcttttaaacactggggactggatcacagaaaaacagtggttttctgtccctggaaatgaataggcacaaagacccacttggctgtgggcagactactcttcaataagatttgggtgggaggaggaacattccttttgctattttgagctgagacaatataaatattcaaactgtgccatgcataaagcattgaattctcagggcacctcttcttccccttaccccttttaaggccatcccctccattaataataatccaggtagttgtgaaaatcgtgcttctatctgatcccttcttagtttggcttttcatcccatcagaacaagtaaacgtaggcgccacagctcttgtgagtactgtctccctcacggtgaatgagcctcctggtgtttcgtccaagaaaagaaagggtgtcactggaaccacagccctttttcattttataaactgcctcttcatgttgcctgctcaagtttccacctagaattgctatcactgtggctctttctaaaaatctttctatttaactggttcactgaaattagtcatagaaaacttgtgatttggtgaagaggcattccttgtaataaccaaatgacttgggatggtgtgcatagcaagggcagtgttacacttatgaggactgtctctagcatccaggaagtctctgggtctgagggatggaaagttcttcctgctatgaatgagagtggactcttcccctcacccccaactgaaaccacaaacaaccagaatcttctggaattctgacttagagtcgttgttatagaagaccttgttgctatggaacatgaaactgtgtgtcagatggagagatccccttaacctaagagccttaaatagccctgaaagtacactgggacggtttgcgatggaattaaaattggaagtgaatatttttaggtgctcttgaagctttctggggactcaaaattatcaaaagtcagggacagtccggaggaagagcgtctgcaaaactgggttcctagaagtatagacggacttagctttttgtagaatttggtgaggagcagcgcctcgtgagagcagaatggcctggcgtggccagtgcttcccgg

SEQ ID NO: 1958 - DNA, 736 bp, Homo sapiens
cgagctggagaggtggtcggagaagtaggaacctcctgccgggctcgtggcggcttctgtccgctccgcggagggaagcgccttccccacaggacatcaatgcaagcttgaataagaaaaacaaattcttcctcctaagccatggcatatcagttatacagaaatactactttgggaaacagtcttcaggagagcctagatgagctcatacagtctcaacagatcaccccccaacttgcccttcaagttctacttcagtttgataaggctataaatgcagcactggctcagagggtcaggaacagagtcaatttcaggggctctctaaatacgtacagattctgcgataatgtgtggacttttgtactgaatgatgttgaattcagagaggtgacagaacttattaaagtggataaagtgaaaattgtagcctgtgatggtaaaaatactggctccaatactacagaatgaatagaaaaaatatgacttttttacaccatcttctgttattcattgcttttgaagagaagcatagaagagactttttatttattctagaattgcagaaatgactacactgtgctataccagagaattccagtagaaagaaacttgtaactctgtagcctcttacatcacctttattatacagcatgaaaaaccataacttttttttaaggacaaaagttgttgccttcctaagaaccttctttaataaactcattttaaaactctg

SEQ ID NO: 1959 - DNA, 2855 bp, Homo sapiens
gaggaggggaggcctcctccgccgccgccatcttggaccgggcccggtcagcttccgcggagccatcggcagacgccgcggcctcccttgagccccgacccccgtcgtcagaacaaccccgggcccactcccccaaccccacttccgcttcgcgccgctatcgcgatagcgcccgggcccggggcgcgagaaaaaggcggcgggcgctcgcctcccccgcctgtcgcgatacgctcctcagcggcggcgccagctcctgtgcgtccgtctccaagagagtatgaagagagtgcgtctgtagggcagggaagatggcggacaagcgcaaactccaaggtgagattgatcgctgcctcaagaaggtgtccgagggcgtggagcagtttgaagatatttggcagaagctccacaatgcagccaacgcgaaccagaaagaaaagtatgaggctgacctaaagaaggagattaagaagctacaacggctgagggaccaaatcaagacatgggtagcgtccaacgagatcaaggacaagaggcagcttatagacaaccgcaagctcattgagacgcaaatggaacggttcaaagttgtggaacgagagaccaaaaccaaagcttacagcaaagagggcctgggcctggcccagaaggtagatcctgcccagaaggagaaggaagaggttggccagtggctcacgaataccatcgacacgctcaacatgcaggtggaccagtttgagagtgaagtggagtcactgtcagtgcagacacgcaagaagaagggcgacaaggataagcaggaccggattgagggcttgaagcggcacatcgagaagcaccgctaccacgtgcgcatgctagagaccatcctgcgcatgctggacaatgactccatcctcgttgacgccatccgcaagatcaaggacgacgttgagtactatgttgactcatcccaggaccccgacttcgaggagaacgagtttctctacgatgacctggacctcgaggacattccacaggcgctggtcgccacctccccccccagccacagccacatggaggatgagatcttcaaccagtccagcagcacgcccacctcaaccacctccagctctcccatcccgcccagcccagccaactgtaccacggaaaactctgaagatgataagaagaggggacgttccacagacagtgaagtcagccagtctccagccaaaaacggctccaagcctgtccacagcaaccagcaccctcagtccccagctgtgccgcccacctacccctccggccccccgcctgctgcctctgccttgagcaccactcctggcaacaatggggtccccgcccccgcagcacccccaagtgccctgggccccaaggccagtccagctcccagccacaactcgggcacccctgctccctatgcccaggctgtggccccaccagctcccagtgggcccagcacgacccagccccggccccccagcgtccagcctagcggaggcggaggcggcggcagcggaggtggagggagcagcagcagtagtaacagcagtgccggtggaggggctggcaagcagaatggcgccaccagttacagctcagttgtggcagacagcccggcagaggtggctttgagcagcagtgggggcaacaatgccagcagccaggccttgggccccccttccggcccccacaacccacctcccagcacctcgaaggaacccagtgcggcagccccaacgggggctgggggcgtggccccaggctcagggaacaactcagggggacccagcctcctggtgccactgcctgtgaatcctcccagctccccaacgcccagcttcagtgatgccaaggcagccggtgccctgctcaatgggcctccacagttcagcaccgccccagaaatcaaggcccctgagcctctgagctccttgaagtccatggcggaacgggcagccatcagctctggcattgaggaccctgtgccaacgctgcacctgaccgagcgagacatcatcctgagcagtacatcagcacctccggcctcagcccagccgcccctgcagctgtcagaggtgaacataccgctgtcgctgggtgtctgtccactgggccctgtgcccctcaccaaggagcagctctatcagcaggccatggaagaggccgcctggcaccacatgcctcacccctctgactctgagcgtattcggcagtacctcccccggaacccctgtccgacgcccccctaccaccaccagatgccacccccacactcggacactgtggaattctaccagcgcctgtcgaccgagacactcttcttcatcttctactatctggagggcactaaggcacagtatctggcagccaaggccctaaagaagcagtcatggcgattccacaccaagtacatgatgtggttccagaggcacgaggagcccaagaccatcactgacgagtttgagcagggcacctacatctactttgactacgagaagtggggccagcggaagaaggaaggcttcacctttgagtaccgctacctggaggaccgggacctccagtgacaccggcccctccctctacccacccccttcccccgcatgctgatccccctgcccaggtgagggccctgccctggaagactggagggaggccccaagccacggggcatccccctctcccaggaagcagggagggggccgggaggttttcctctcagccccaccctgggggcccgggggcgagggctgccccctcctcccctccccagtgagggacattttttggtaaacctattttcattttggaaaatatttatgaataaatagttttatatgacggctggc

SEQ ID NO: 1960 - DNA, 2034 bp, Homo sapiens
aaaccttggccatggtcacttcctcttttccaatctctgtggcagtttttgccctaataaccctgcaggttggtactcaggacagttttatagctgcagtgtatgaacatgctgtcattttgccaaataaaacagaaacaccagtttctcaggaggatgccttgaatctcatgaacgagaatatagacattctggagacagcgatcaagcaggcagctgagcagggtgctcgaatcattgtgactccagaagatgcactttatggatggaaatttaccagggaaactgttttcccttatctggaggatatcccagaccctcaggtgaactggattccgtgtcaagacccccacagatttggtcacacaccagtacaagcaagactcagctgcctggccaaggacaactctatctatgtcttggcaaatttgggggacaaaaagccatgtaattcccgtgactccacatgtcctcctaatggctactttcaatacaataccaatgtggtgtataatacagaaggaaaactcgtggcacgttaccataagtaccacctgtactctgagcctcagtttaatgtccctgaaaagccggagttggtgactttcaacaccgcatttggaaggtttggcattttcacgtgctttgatatattcttctatgatcctggtgttaccctggtgaaagatttccatgtggacaccatactgtttcccacagcttggatgaacgttttgccccttttgacagctattgaattccattcagcttgggcaatgggaatgggagttaatcttcttgtggccaacacacatcatgtcagcctaaatatgacaggaagtggtatttatgcaccaaatggtcccaaagtgtatcattatgacatgaagacagagttgggaaaacttctcctttcagaggtggattcacatcccctatcctcgcttgcctacccaacagctgttaattggaatgcctacgccaccaccatcaaaccatttccagtacagaaaaacactttcaggggatttatttccagggatgggttcaacttcacagaactttttgaaaatgcaggaaaccttacagtctgtcaaaaggagctttgctgtcatttaagctacagaatgttacaaaaagaagagaatgaagtatacgttctaggagcttttacaggattacatggccgaaggagaagagagtactggcaggtctgcacaatgctgaagtgcaaaactactaatttgacaacttgtggacggccagtagaaactgcttctacaagatttgaaatgttctccctcagtggcacatttggaacagagtatgtttttcctgaagtgctacttaccgaaattcatctgtcacctggaaaatttgaggtgctgaaagatgggcgtttggtaaacaagaatggatcatctgggcctatactaacagtgtcactctttgggaggtggtacacaaaggactcactttacagctcatgtgggaccagcaattcagcaataacttacctgctaatattcatattattaatgatcatagctttgcaaaatattgtaatgttatagggcgtctctttatcactcagcttctgcatcatatgcttggctgaatgtgtttatcggcttcccaagtttactaagaaactttgaagggctatttcagtagtatagaccagtgagtcctaaatattttttctcatcaataattattttttaagtattatgataatgttgtccatttttttggctactctgaaatgttgcagtgtggaacaatggaaagagcctgggtgtttgggtcagataaatgaagatcaaactccagctccagcctcatttgcttgagactttgtgtgtatgggggacttgtatgtatgggagtgaggagtttcagggccattgcaaacatagctgtgcccttgaagagaatagtaatgatgggaatttagaggtttatgactgaattccctttgacattaaagactatttgaattcaaaaaaaaaaaaaaaaaaaaaaaaaaaaaaa

SEQ ID NO: 1961 - DNA, 1976 bp, Homo sapiens
gactggaggagcacaggccttggaaaggaaagcagctgagatccagaggagtggaaggctcccccttgactaaagctaaacaccagtttctcaggaggatgccttgaatctcatgaacgagaatatagacattctggagacagcgatcaagcaggcagctgagcagggtgctcgaatcattgtgactccagaagatgcactttatggatggaaatttaccagggaaactgttttcccttatctggaggatatcccagaccctcaggtgaactggattccgtgtcaagacccccacagatttggtcacacaccagtacaagcaagactcagctgcctggccaaggacaactctatctatgtcttggcaaatttgggggacaaaaagccatgtaattcccgtgactccacatgtcctcctaatggctactttcaatacaataccaatgtggtgtataatacagaaggaaaactcgtggcacgttaccataagtaccacctgtactctgagcctcagtttaatgtccctgaaaagccggagttggtgactttcaacaccgcatttggaaggtttggcattttcacgtgctttgatatattcttctatgatcctggtgttaccctggtgaaagatttccatgtggacaccatactgtttcccacagcttggatgaacgttttgccccttttgacagctattgaattccattcagcttgggcaatgggaatgggagttaatcttcttgtggccaacacacatcatgtcagcctaaatatgacaggaagtggtatttatgcaccaaatggtcccaaagtgtatcattatgacatgaagacagagttgggaaaacttctcctttcagaggtggattcacatcccctatcctcgcttgcctacccaacagctgttaattggaatgcctacgccaccaccatcaaaccatttccagtacagaaaaacactttcaggggatttatttccagggatgggttcaacttcacagaactttttgaaaatgcaggaaaccttacagtctgtcaaaaggagctttgctgtcatttaagctacagaatgttacaaaaagaagagaatgaagtatacgttctaggagcttttacaggattacatggccgaaggagaagagagtactggcaggtctgcacaatgctgaagtgcaaaactactaatttgacaacttgtggacggccagtagaaactgcttctacaagatttgaaatgttctccctcagtggcacatttggaacagagtatgtttttcctgaagtgctacttaccgaaattcatctgtcacctggaaaatttgaggtgctgaaagatgggcgtttggtaaacaagaatggatcatctgggcctatactaacagtgtcactctttgggaggtggtacacaaaggactcactttacagctcatgtgggaccagcaattcagcaataacttacctgctaatattcatattattaatgatcatagctttgcaaaatattgtaatgttatagggcgtctctttatcactcagcttctgcatcatatgcttggctgaatgtgtttatcggcttcccaagtttactaagaaactttgaagggctatttcagtagtatagaccagtgagtcctaaatattttttctcatcaataattattttttaagtattatgataatgttgtccatttttttggctactctgaaatgttgcagtgtggaacaatggaaagagcctgggtgtttgggtcagataaatgaagatcaaactccagctccagcctcatttgcttgagactttgtgtgtatgggggacttgtatgtatgggagtgaggagtttcagggccattgcaaacatagctgtgcccttgaagagaatagtaatgatgggaatttagaggtttatgactgaattccctttgacattaaagactatttgaattcaaaaaaaaaaaaaaaaaaaaaaaaaaaaaaa

SEQ ID NO: 1962 - DNA, 4901 bp, Homo sapiens
gagccaggccatgtcggggctcctcaagaagagggccagtgggactgctggggtcgggctggaggggatctgattgggggaagcgtctggggactgcttggggcctgattgggggacgtcgcgaggatcggcttgccttgcgccatggactggcagccagacgagcagggcctgcagcaggtcctgcagctgctcaaagactcacagtcgcccaacacagccactcagcgcatcgtgcaggataaactcaaacaactcaatcagtttcctgacttcaacaactacctgattttcgtcctgaccagactcaagtcagaagatgagccaacgcgctctctcagtggcctcatcctcaagaacaacgtgaaggcacactatcagagcttcccaccccctgtggcagacttcatcaaacaggagtgtctcaacaacattggcgatgcctcctcgctcatccgagccaccattggcattctcatcaccaccatcgcttccaagggtgagctgcagatgtggcccgagctgctgccccagctctgcaacctgcttaactcggaggattacaacacttgtgagggagcctttggagccctgcagaagatctgtgaagactcatcagagcttctggacagtgacgccctcaacaggcccctcaacatcatgatccccaagttcctgcagttcttcaagcactgcagtcccaagatccggtcccacgccatcgcctgcgtgaaccagttcatcatggaccgggcccaggcgctgatggacaatattgacaccttcatcgagcacctatttgccctggctgtggatgatgaccccgaggtgcggaagaatgtgtgccgtgccctggtgatgcttctggaagtgcggattgacaggctcatcccccacatgcacagcatcatccagtacatgctgcagaggacccaggaccatgatgagaacgttgcccttgaggcctgtgagttctggctgacgctggccgagcagcccatctgcaaggaagtcctggcctcccatctggtccagttgatccccatcttggtgaatgggatgaagtactcggaaattgacatcatcctgctcaagggggatgtggaggaggatgaggctgtccccgacagtgagcaggacatcaagccacgcttccacaagtcacgcacggtcacactgccccacgaggctgagcggcctgatggctccgaggacgcggaggatgacgatgatgatgatgctctgtccgactggaatttgaggaagtgctcagcggctgcactggacgtcctcgccaatgtcttccgggaggaactgctgccccacctactcccactactcaaaggcctcctcttccaccccgagtgggtggtcaaggagtcgggcatcctggtgctgggcgccattgctgagggctgcatgcagggcatggtgccctacctgcctgagctgatcccgcacctgatccagtgcctgtcggataagaaggccttggtccgctccatcgcctgctggacgctgagccgctatgcccactgggtggtcagccagccacccgacatgcacctcaagcccctgatgacagagctgctcaaacgcatcctggatggcaacaagagggtacaggaggcggcctgcagtgcttttgccaccctggaggaagaggcctgcacggagctggtgccctacctcagctacatcctggacacccttgtctttgcctttgggaaataccagcacaagaacctgctcatcctctatgacgccattggcaccctggccgactctgtaggccaccacctcaaccagccggaatacatccagaagctgatgcccccactgatccagaagtggaatgagctcaaggacgaagacaaggacctcttccccctgctggagtgtctgtcatcggtggccaccgccctgcagagtggcttcctgccttactgtgagcccgtctaccagcgctgtgtcaccctggtgcagaagacactggctcaggccatgatgtacacccagcaccctgagcagtatgaggctcccgacaaggacttcatgatcgtagcactggatctgctcagcggcctggccgagggcctgggtggtcacgtggagcagctggtggcccgcagcaacatcatgacattgctgttccagtgcatgcaggactcgatgcctgaggtccggcagagctcctttgccctcctgggagacctcaccaaagcctgcttcatccatgtcaagccctgtatcgccgagttcatgcccattctgggcaccaacctgaacccagagttcatctccgtctgcaacaacgccacctgggccattggtgaaatctgcatgcagatgggggcagagatgcagccttatgtgcagatggtcctcaacaacctggtggaaatcattaaccgacccaacacacccaagacactgctggaaaacacagccatcaccatcggccgcttgggctacgtgtgcccccaggaggtggcacccatgctgcagcagttcatccggccttggtgcacgtccctcaggaacatcagggacaacgaggagaaggactcagccttccgcggcatctgcatgatgatcggtgtcaacccggggggcgttgtgcaggactttattttcttctgcgatgctgtagcctcctgggtgagcccgaaggatgaccttcgggacatgttttataagattctccacggcttcaaagaccaagttggggaagataactggcagcagttctctgagcaattcccgccgctgctcaaggagaggctggcggctttctatggggtctaggtgatcatggagactgccaggtttctgtctgcgtcgtcgtcggagggattactggggagtgcgctgcatccggaagtcgctgtgccctggttgaggggggttagggaggagtgagtgggactcaaatccagatgccttccccgtccgtccgtccgtccgtccatccgtccacttgccctcctggcaggtgggtggggccaccatgctcatcctacaaacggggaggtgggggggacttctggtgggcaagggcccctgggctctaatagggtcatctctggcagcccacttgggccagctacgtgggagggaggaattacacagctgaccgaatccggcttcggatgaggtgagggaggagcaggtcaggaggggggccctcgtagggacgcgtacactcacacggacacacatggccacacgcatgtgcgggtgccataaccggcgaggctgggccagccgctccaccatttccccgactgcatggagacagtagaattagtgaacccctgagttaacccgtaaggccttccgtgtaacctgcatctagagtttaagaagcttctgctgttttgccggaattggcggtgactggggagggctgggtgggtggggggcctcaggcgggatctcggggcggggggaggaggatggtgaccttgggagtcgccctgtcagcacgcacatgcttgggacccactccacacactccctgccagctttgttgcagcctcagctggtggtgtctccgtccttatcctagcctagctcgcagggtgagaaccactggagtggctggggctggccagaggtcaccgtttctccttcctgtgtgctccagtggcttttgaagacactgggttgggacctttttcctgaagagagctgggtgtagccagagctactggcacctaccccgagcatctctctctgtaagcagcttcaggggcagtccgtttctctgtgcttctgaaacccccttctcacgtttcaggccccagttttaactcaaggcctggggcaggggcgtttaattgatgatgacagaggacacaggtttttgccagcaaaaaggaaaaccaaggcttggtggaagggaaaggtggtgtgtcccctgttccctattccatctccctgggacttcctgctcatcatagtacccagtgagcccagagatcctactagactgggtcagcaattctagagaaccttccggaatagtctgggaacatggtcaaggtggaaggggctcccctagagagggtgggggtgtagttacttcccagttggccagaaaactgggccttgcagacccccttagcattttttccctttttttccttccctgctttctacttctttggggagccccttgtgttttggagtctgactggagtctcgcatcctggggcctgctccatccatccctcctgggcgccagaccctccatccaagccctgtgtctttccatagtcagggtcaggccctgcatctattccaaggggcactcagtacacattccataaattagctgggtgtccctgcacgcccaccccatgaaactcgagcaggtctctggaagccatttgttaaaaaaaaaaaaaaaagttttaaaaataccttttaattttctggtaattccagttctttgaagcatcctctgctgggtcttggggtgtgtggatggattggctgtctgatgggattggtaacccctcgctactcaagatggggggatacaaacaccttcagggaaggggagcctggttcttctcgttttccttttttttttttttttttaaaaaaaaactatttaattttttaatttatttttggttgttttttgcacaatgaagtttcagcttctcaaccttctcccctacccagggctgtggacccagactggccttgagccacagtccctctttccctcctcaccctcttccccctgcgggctcccgggtctgtccatttgttactgtgctgtgctggggattggcgccgaggtggcgtgagattccacttgtgtagaactttgttgagtaaagatcagtttcttgtgaaaaaaaaaaaaaaaaaaaaaaaaaaaaaaa

SEQ ID NO: 1963 - DNA, 2143 bp, Homo sapiens
ttcccttactgagcttgctgagctccggggcccgcggagctcgcgccaggctcctgggaaaggacggggagtgttaccggggagcagctgctccattgtgcctcgaggccccgatcgggctaggccgacggcctccctcccttcacctttcctctcctggcggggttcggcggcgggcgagtgactgcggccacgcctgaaaggcgactctcctgattcaagatgaccaacgaagaacctcttcccaagaaggttcgattgagtgaaacagacttcaaagttatggcaagagatgagttaattctaagatggaaacaatatgaagcatatgtacaagctttggagggcaagtacacagatcttaactctaatgatgtaactggcctaagagagtctgaagaaaaactaaagcaacaacagcaggagtctgcacgcagggaaaacatccttgtaatgcgactagcaaccaaggaacaagagatgcaagagtgtactactcaaatccagtacctcaagcaagtccagcagccgagcgttgcccaactgagatcaacaatggtagacccagcgatcaacttgtttttcctaaaaatgaaaggtgaactggaacagactaaagacaaactggaacaagcccaaaatgaactgagtgcctggaagtttacgcctgatagccaaacagggaaaaagttaatggcgaagtgtcgaatgcttatccaggagaatcaagagcttggaaggcagctgtcccagggacgtattgcacaacttgaagcagagttggctttacagaagaaatacagtgaggagcttaaaagcagtcaggatgaactgaatgacttcatcatccagcttgatgaagaagtagagggtatgcagagtaccattctagttctgcagcagcagctgaaggagacacgccagcagttggctcagtaccagcagcagcagtctcaggcctctgccccaagtaccagcaggactacagcttctgaacctgtagaacagtcagaggccacaagtaaagactgcagtcgtctgacaaacggaccaagtaatggtagctcctcccgccagaggacgtctgggtctggatttcacagggagggcaacacaaccgaagatgactttccttcttctccagggaatggtaataagtcctccaacagctcagaggagagaactggcagaggaggtagtggttacgtaaatcaactcagtgcggggtatgaaagtgtagactctcccacgggcagtgaaaactctctcacacaccaatcaaatgacacagactccagtcatgaccctcaagaggagaaagcagtgagtgggaaaggtaatcgaactgtgggttcccgccacgttcagaatggcttggactcaagtgtaaatgtacagggttcagttttgtaatattttttcagcaaatttttatacagtgtcatttaatttgggagaggatactgtccagaaaattaatgcatacttttgtcacaatttgcctttttgtgggtgtacgttttggtttttttttgttgttttttttctttgttttttttttcttttctttttttttttttttttttttttttgcttcaatacttctgccgctttggaaattgtaacagttaattactttgaatgttgctaaaaggacattttgtgtagggtcaagttatttttatatgagttaatgtgaaattgtaaatggaaatttttccttaaaatacaacacaatgatgtctgtataaatctgtctgtttagaatctgtgctgtgtaagggcattcgtactcatgctgttactgtacttatgcaccattcagacttgttagagtagatgtgggtttatgactgccaagtttgcccagtacagtagttttttatcactaaaagttggactcattgatggagtcctgtagtagtttcagtgttagatacagttttttccaccatacatctgtgcattttctctttaggtgactgtttaagaaatttgtgtgcatagttactcagtttttatgaactgttgtatcctgttaatgcatattgctctgtgactccagtatatcttacctgtactgaccaaacctaaataaagatttttattgtaactccttaaaaaaaaaaaaaaaaaaaaaaaa

SEQ ID NO: 1964 - DNA, 1644 bp, Homo sapiens
ggccggcggcagagctgtccggctgcgcggtggcccggggggcccgggcggcagggcaagcagcgcggcctcggcctatgcgaccggtggcgccggcgcggcttctgcctggagaggattcaagatgaccaacgaagaacctcttcccaagaaggttcgattgagtgaaacagacttcaaagttatggcaagagatgagttaattctaagatggaaacaatatgaagcatatgtacaagctttggagggcaagtacacagatcttaactctaatgatgtaactggcctaagagagtctgaagaaaaactaaagcaacaacagcaggagtctgcacgcagggaaaacatccttgtaatgcgactagcaaccaaggaacaagagatgcaagagtgtactactcaaatccagtacctcaagcaagtccagcagccgagcgttgcccaactgagatcaacaatggtagacccagcgatcaacttgtttttcctaaaaatgaaaggtgaactggaacagactaaagacaaactggaacaagcccaaaatgaactgagtgcctggaagtttacgcctgataggtaaacaaatcatactccccagtcaagacttccctgacagtcccactacgagaaagctgtggtgggacagccaagtactcgtttccacaccaagactcagactttttgagccaaaaaaaagccacattcttacactgtccagcttgtaatggttaatgtaaaacttaccagatgaaccttgtgtttcagcttttttcttttccccttccccttgcttcagaggcctgatggcgtcggactattccgaagaagtggccacctccgaaaaattccccttctagaacatgtagacacttgagaaatgtttctgtttgaagaaaatagagggagaaacagaagtcttaagtctgtggcacactgtgtcttcagacagtttgaaggaatgaaaacctagagattttaaatcatgaattgaacatgtaaaattccagtaaaatgtaaaaacggaatatgcatcgctcttaaccttgagcatagtgacttagagacactgtgtatcagttttgccaataagactgtggacttcatgattgttgttgaacttctgggtcaaaactcaaatgaggtgaattttgcctttaaagggtttatttgctgagaaccaactttcaatagtcatgagagaatcaaataatagatgtccgtacaagtagcgcatatatttaaccatttagtttggggctctatattacttgcttgagccttaatcaatgtggttttattcaatggtttgttctttgaatggttgcaaaaactgtagataatcttactgaggactgtacaaacatgaaggtgtggtatcaaacttcaggttgaaactgtttgaagcattataaacattcatttcacaactagattgtataaggatattagctgtgatgagactcactgcattattttttttagtgaattttatgaaatccccgttccattcaacaggcacatgtttaaaagagctttgtcgttggtgttaatgggggaatgtgttccttcattgtatttgggccttttgtattgcactcttgatattaaattaaatgtgccttgaaataaaaaaaaaaaaaaaaa

SEQ ID NO: 1965 - DNA, 1742 bp, Homo sapiens
ttcccttactgagcttgctgagctccggggcccgcggagctcgcgccaggctcctgggaaaggacggggagtgttaccggggagcagctgctccattgtgcctcgaggccccgatcgggctaggccgacggcctccctcccttcacctttcctctcctggcggggttcggcggcgggcgagtgactgcggccacgcctgaaaggcgactctcctgattcaagatgaccaacgaagaacctcttcccaagaaggttcgattgagtgaaacagacttcaaagttatggcaagagatgagttaattctaagatggaaacaatatgaagcatatgtacaagctttggagggcaagtacacagatcttaactctaatgatgtaactggcctaagagagtctgaagaaaaactaaagcaacaacagcaggagtctgcacgcagggaaaacatccttgtaatgcgactagcaaccaaggaacaagagatgcaagagtgtactactcaaatccagtacctcaagcaagtccagcagccgagcgttgcccaactgagatcaacaatggtagacccagcgatcaacttgtttttcctaaaaatgaaaggtgaactggaacagactaaagacaaactggaacaagcccaaaatgaactgagtgcctggaagtttacgcctgataggtaaacaaatcatactccccagtcaagacttccctgacagtcccactacgagaaagctgtggtgggacagccaagtactcgtttccacaccaagactcagactttttgagccaaaaaaaagccacattcttacactgtccagcttgtaatggttaatgtaaaacttaccagatgaaccttgtgtttcagcttttttcttttccccttccccttgcttcagaggcctgatggcgtcggactattccgaagaagtggccacctccgaaaaattccccttctagaacatgtagacacttgagaaatgtttctgtttgaagaaaatagagggagaaacagaagtcttaagtctgtggcacactgtgtcttcagacagtttgaaggaatgaaaacctagagattttaaatcatgaattgaacatgtaaaattccagtaaaatgtaaaaacggaatatgcatcgctcttaaccttgagcatagtgacttagagacactgtgtatcagttttgccaataagactgtggacttcatgattgttgttgaacttctgggtcaaaactcaaatgaggtgaattttgcctttaaagggtttatttgctgagaaccaactttcaatagtcatgagagaatcaaataatagatgtccgtacaagtagcgcatatatttaaccatttagtttggggctctatattacttgcttgagccttaatcaatgtggttttattcaatggtttgttctttgaatggttgcaaaaactgtagataatcttactgaggactgtacaaacatgaaggtgtggtatcaaacttcaggttgaaactgtttgaagcattataaacattcatttcacaactagattgtataaggatattagctgtgatgagactcactgcattattttttttagtgaattttatgaaatccccgttccattcaacaggcacatgtttaaaagagctttgtcgttggtgttaatgggggaatgtgttccttcattgtatttgggccttttgtattgcactcttgatattaaattaaatgtgccttgaaataaaaaaaaaaaaaaaaa

SEQ ID NO: 1966 - DNA, 3430 bp, Homo sapiens
agacgtttcccgccggcgggagctgtggctgtgattgagagaggggttagaggcgggtcccagcgctgccgcaccatggcggaccagctttatctggaaaatatagacgagttcgtcacggaccaaaacaagatcgtgacatacaaatggctgagctatacactaggggttcatgttaaccaggccaaacagatgctgtatgattatgttgaaaggaaacgaaaagaaaattcaggagcccaactgcatgttacctacttggtgtctggcagtctcattcagaatggacattcctgccacaaggttgcagtagtgagagaagataaattggaagcagtgaagtccaagctagctgtgactgccagcatccatgtgtacagcatccagaaagccatgctaaaggacagtgggcctctgttcaatactgactatgacatccttaaaagcaacttgcagaactgcagcaaatttagtgctatacaatgtgcagctgccgtccctagagctcctgctgaatcctcttcgtcttccaaaaagtttgagcagtcacatcttcacatgtcaagtgagacacaagccaacaatgagctgaccaccaatggtcatggcccacctgcatccaagcaggtttcccagcagcccaaaggaattatgggaatgtttgcctccaaagctgctgctaaaacccaagaaaccaacaaggaaacgaaaacagaggctaaagaagtaacaaatgcatctgcagcaggcaacaaggcaccagggaaagggaatatgatgagcaacttttttggaaaagctgctatgaataaatttaaagtcaatttggactcagaacaagcagtgaaagaagaaaaaatagtggagcagcctacagtgtctgtcacggaaccaaagctggcaactcctgcaggcctgaaaaaatccagcaaaaaagcagagcctgttaaggtgctgcagaaggaaaaaaaaagggggaagcgagtagcattatctgatgatgagacaaaggaaactgaaaacatgaggaaaaagaggagaagaatcaaacttcctgaatctgatagcagtgaagatgaagtctttccagactctcctggggcttatgaagctgagtcaccatccccacctcctcctccgtctccacctcttgaaccagtgccaaagactgagcctgaacctccttctgtcaagagctcaagtggagaaaacaaaagaaaacgaaaacgcgtactaaaatctaaaacttacctggatggggaaggctgcatagtgactgaaaaagtctacgagagtgaatcctgcacagatagtgaagaggagcttaacatgaagacatcctcagtacacagaccccctgccatgactgtgaaaaaagaacccagagaggaacgaaagggccccaagaaagggactgctgctctgggcaaagccaacagacaggtgtccattactggcttcttccagaggaaataaactgccatctctggtagatcagagacttggagtggtcaagggagaagaccaagaaatgtactcctcacttactatgtaagttcatctagatctccacctcacctgtatcaaaagactgttctttcatcctgtgaggtttatactatttctggtttttaaccaaaaggaaatcatctggaagcaggaggcaaaaagctgttaccttctaatgacatttaaaaagcacagtctttgacctgtccaggagaaggatttactccaaaattatactggaacagttttcagaattctcactgaagccatttagtggctaacccactgtgctccactcaccctatgccctggtccgcatatggcacaggaattattccttcttgttcctctgtattctaagaattcatgtgggtgtttcttatccttacattctgctggatacgtttacccctcttgtcttcctgcagtaccacacttctgtcccctaacctcctgaggctgttctctgtaagtcttttaagttttggttggactaaaggctgaagtgaaaatctccctgtaatcctcttcctccattatgcagtacacggacacctggctacagaccaggacgtggcttgtgttctgttcctttcacaaaagctctctgggaccttcacttgcaattagtggttagggaaaagcctcaggcagaacacaaatagaaatttaatgatgtgttcaactccaccagaaattacctcgagtcagcattgacgatattggaggagctgccgtgctgctgatacggggtgtgctttatgctgctctttgcggtttgttgatcccctcctcccccactctcaatacctagagagtgaaacccgtacaatgagataaagactaaaaagagaaatcccttcctatatacagtgtgctacatttacaaaaaatttctccttaagaaaacagaatattcaaaaacagcacttttccaggaagttagtgaggaagataaggcacacatttatttataaatggatgttgctcctttgtatttttagcttccctatttgcttaaaagtacaggctccctaagagaggatggagagggagagactgaattgttagtaggtctaaacatcaaagaaaacatttttattagttacttatggaaaatcatctattacaatgataaccttcaagtgacttccattatggctggacaggcggtgagctcagtggattgcagtggtgtgctggtgattttgcacagtgagctctgcggaaggggtcaggctcaactgctgatgtgtctcacacgtagcagacaaggggtgtctgactggcttcttttgcctcaagatggtgtatgtcgtaagtgatgcaatcagctgtctgctttttaaggttgggattgtgctgactttgggattaacatgagcttctttagcaaccaagcatgaacttgattaagaccagaagtttgggagatgagtcctggcattatgtctaggactaaagcagtggctttgtatagcaagctgagtaaaggttgacatattccaaaacccttctttttaaaatgaaaaaggatggagagaaggatggaaagcctggacttaaacctttagaaaaaacttctggagagaaatcccttttaaacagttacttttgtcattgcctctggtcatttgtctaaataggaatggaaaattaaaagaaaagcaacaatccaatcttttttctaaaaattatgctggggtctcgactaaaactgaatttgaattggaaaattctggtgttggttggagttccatcttgcaagggataatacaaatcctatgatctctatgcccaatatgctgcctcaactctgagctgtctgcaaggcttagtaagtattgagtggtgttttttttttctttttatacaataccatgttaaccacatgagttaaataaatttgagaagttgtttt

SEQ ID NO: 1967 - DNA, 3524 bp, Homo sapiens
gggatgccgggggggcaagatggcggcggcagtaggggttcgtggccggtacgagctgccgccttgctccggcccaggctggctcctcagcctttccgccttgctgagtgtggcggcacgaggggccttcgccaccacgcactgggtcgtcacggaggacgggaaaatccagcagcaggtggattcaccaatgaacttgaagcatcctcatgacctagtcatattaatgagacaagaagcaacagttaactacctcaaagaattagagaaacaattagttgctcaaaaaattcacatagaagagaatgaggacagagacacaggactggaacagagacataataaagaagacccagactgcatcaaagccaaggtgcccttaggggacctggatctatatgatggcacatacataactttggagagcaaagacatcagtcctgaagattatatagacacagaatctcctgtccctccagacccagagcaacctgattgtactaaaattctagaacttccatatagtatacatgcttttcagcacttgagaggtgtacaggagagagttaatctttctgcacctctgctacctaaagaagacccaatcttcacatatttatctaaacggttaggaaggagtatagatgacataggtcacctcattcatgaaggcctacagaagaacacttcctcgtgggtactgtataacatggcttcattttactggagaattaagaatgagccatatcaggtagtagaatgtgccatgcgagcacttcacttctcttccaggcacaataaagacattgccctggtcaacctggcaaacgttctacacagagcacacttctctgctgatgctgctgtcgtggtccatgcagctctggatgacagtgacttcttcaccagctattacactttggggaatatatatgcaatgcttggggaatataaccactcagtgctctgttatgaccacgctttgcaggccagacctgggtttgagcaagctataaagaggaagcatgctgtcctatgtcagcaaaaactggagcagaaattggaggctcagcatagatctctccagcgaacactgaatgagttaaaagagtatcaaaagcagcatgaccactacctgagacagcaggaaatcctagaaaaacataaactgattcaggaggagcaaatcttaagaaatatcattcatgagactcagatggcaaaagaggcacaattaggaaatcatcagatatgccgactggtcaaccagcagcatagtttacattgccagtgggaccagcctgtacgctatcatcgtggagatatctttgaaaatgtggactatgttcagtttggtgaggattcatcaacctccagtatgatgtctgtgaactttgatgttcaatcaaatcagagtgatatcaatgattcggtcaagtcttctcccgtagcccattctattctctggatttggggcagggactctgatgcatatagggacaaacagcatattctatggcctaaaagagcagattgtacagaaagctaccctagagtccctgttggtggggaattgccaacgtattttctgcctccggaaaacaaaggactcaggatccacgaactcagcagtgatgattattctacagaagaagaggcccaaacccctgactgttccataactgacttcagaaaaagccacactctgtcctacttagtcaaagaattagaggttcgcatggatctgaaagccaaaatgccagatgaccatgcacgaaaaattttgctttcccgtattaataactatactatcccagaagaagaaattgggtctttcttatttcatgctattaataagccaaatgctcctatctggctcatactcaatgaagctggactatactggagagcagtaggaaatagcacttttgctattgcctgtcttcagagggctttgaatttagctccacttcaataccaagatgttcctcttgtcaacttggccaaccttttgattcattacggccttcatcttgatgccactaagctgctacttcaagctttggccatcaatagctctgagcctctgacctttttgagcctgggaaatgcttaccttgctctgaagaatatcagtggggcacttgaggcctttagacaggccttgaaattaaccaccaaatgtccagagtgtgaaaacagcctgaagttgatccgctgtatgcagttttatccttttctgtacaacatcacttcttctgtttgcagtggtacggtggttgaggagagcaatggttctgatgagatggagaattcagatgaaaccaaaatgtcagaagaaatactggctttggtggatgaatttcaacaggcatggcctttggaaggctttgggggtgcactagagatgaaagggcggcgtctagacttacaaggaatacgggtgctgaagaaaggtccccaggatggagtggccagaagctcttgctatggagactgcagaagtgaagatgatgaagcaacagaatggattacattccaggtcaaacgtgtaaagaaacccaaaggagatcataagaaaactcctgggaaaaaagtagaaacaggtcagatagaaaatggacatcgttaccaagcaaacctagagatcactggccccaaggtggcatctcctgggccacaaggaaaaaaacgtgactaccagcgtctgggatggcccagcccggacgaatgcctcaaactccgctgggtagagctgactgccatcgtgagtacctggcttgcagtttcttcaaaaaacattgacatcacagaacacatagattttgccacccctatacagcagccagcaatggagcctctttgcaatggcaatctccccacgagtatgcataccctggaccacttgcatggggtttccaaccgagccagcctgcactacacaggggagagtcagttaacagaggtattacaaaatctcggcaaagaccaatatccacaacagtcgcttgaacagattggcacccgaattgccaaagttttggaaaagaaccagacgtcctgggtcctctccagcatggcagccctctactggagggtgaaaggccaaggaaagaaggcaatcgactgcctccgccaggctctgcactatgcgccacaccagatgaaggatgtgcccctgattagcctggccaacatcttgcacaatgccaagctctggaatgacgccgtcatagtagccaccatggcagtagagatcgcaccacactttgctgtgaaccacttcactctgggcaatgtctacgtggcaatggaagaatttgaaaaagcactggtgtggtatgaatccacattgaagcttcagcccgagtttgtcccagccaagaaccgaatccagaccatccagtgtcacttaatgctgaagaagggacggcgctctccttagtgcacttcttccttctctctttctctttactcatgctctaaaaaaaaaaaaaaaaaaaaaaaaaaaaaaaaaaaaaaaa

SEQ ID NO: 1968 - DNA, 1202 bp, Homo sapiens
gagagcctcagagtcatcctcccgcccacccagcatacaggcggggcgttcctccttagccaatgggaaaagacattcgcccgcggtccgcacgcgctgcttgcaaaggggtggggttgtggagtggatgctttggcaagatggcggggagcggcgtccgccaagctacttctaccgccagcaccttcgtgaagcccattttcagtcgggacatgaacgaggccaagcggagggtgcgcgagctctaccgcgcctggtatcgggaggtgccgaacactgtgcaccaattccagctggacatcactgtgaaaatgggacgggataaagtccgagaaatgtttatgaagaatgcccatgtcacagaccccagggtggttgatcttctggtcattaagggaaagatcgaactggaagaaacaattaaagtatggaagcagcggacacatgttatgcggttcttccatgaaacagaagcgccaaggccaaaggatttcctatccaagttctatgttggccacgatccatgaagtcattcagtggaaagatgcacgttgatactattttagagcacaaataaactcactatacaatggtcactttgtgatagaattccattgatgaaccaattttctgcagcctctttttgcctgagcaagtgggaccttggtatacacatcacctgttctttcccttttcttgaaatgtggtgtttgctgtaaattggattgaattatttttctcagagccttgcatgtcagtaaacaggaaggaaggaggccatctgttcaaaaattgtgacattgggcatgaggctggacgacttgttaatgtagttgtttctatagcccctatgattagacacttcagtgtcagggcacagattatctaaaattagccagctcttcctgtcagggatcagggcagcactaacaggcgcaaaagtagagctgtcaagatgggctagttttccttgggttctgaagaaaatggatgtgcaaaggcttggctccgctacttgtaacaagctccagcccttaaaatgaaattaacttcctactcaggcaccctgcttaggtgcacagctgttcaatatacacagagaacagaaatattcctactgtctttggaaaccctggtgtacctctcagtggcagaataaacatcaacacaggttcaagaactgaaaaaaaaaaaaaaaaaaa

SEQ ID NO: 1969 - DNA, 2663 bp, Homo sapiens
gatagaaaatcaagtatattttaaaagaagggatgtgggatcaaggaggacagccttggcagcagtggcccttgaaccagcaacaatggatgcagtcattccagcaccaacaggatccaagccagattgattgggctgcattggcccaagcttggattgcccaaagagaagcttcaggacagcaaagcatggtagaacaaccaccaggaatgatgccaaatggacaagatatgtctacaatggaatctggtccaaacaatcatgggaatttccaaggggattcaaacttcaacagaatgtggcaaccagaatggggaatgcatcagcaacccccacacccccctccagatcagccatggatgccaccaacaccaggcccaatggacattgttcctccttctgaagacagcaacagtcaggacagtggggaatttgcccctgacaacaggcatatatttaaccagaacaatcacaactttggtggaccacccgataattttgcagtggggccagtgaaccagtttgactatcagcatggggctgcttttggtccaccgcaaggtggatttcatcctccttattggcaaccaggacctccaggacctccagcacctccccagaatcgaagagaaaggccatcatcattcagggatcgtcagcgttcacctattgcacttcctgtgaagcaggagcctccacaaattgacgcagtaaaacgcaggactcttcccgcttggattcgcgaaggtcttgaaaaaatggaacgtgaaaagcagaagaaattggagaaagaaagaatggaacaacaacgttcacaattgtccaaaaaagaaaaaaaggccacagaagatgctgaaggaggggatggccctcgtttacctcagagaagtaaatttgatagtgatgaggaagaagaagacactgaaaatgttgaggctgcaagtagtgggaaagtcaccagaagtccatccccagttcctcaagaagagcacagtgaccctgagatgactgaagaggagaaagagtatcaaatgatgttgctgacaaaaatgcttctaacagaaattctgctggatgtcacagatgaagaaatttattacgtagccaaagatgcacaccgcaaagcaacgaaagctcctgcaaaacagctggcacagtccagtgcactggcttccctcactggactcggtggactgggtggttatggatcaggagacagtgaagatgagaggagtgacagaggatctgagtcatctgacactgatgatgaagaattacggcatcgaatccggcaaaaacaggaagctttttggagaaaagaaaaagaacagcagctattacatgataaacagatggaagaagaaaagcagcaaacagaaagggttacaaaagagatgaatgaatttatccataaagagcaaaatagtttatcactactagaagcaagagaagcagacggtgatgtggttaatgaaaagaagagaactccaaatgaaaccacatcagttttagaaccaaaaaaagagcataaagaaaaagaaaaacaaggaaggagtaggtcgggaagttctagtagtggtagtcccagtagcaatagcagaactagtagtactagtagtactgtctctagctcttcatacagttctagctcaggtagtagtcgtacttcttctcggtcttcttctcctaaaaggaaaaagagacacagtaggagtagatctccaacaatcaaagctagacgtagcaggagtagaagctattctcgcagaattaaaatagagagcaatagggctagggtaaagattagagatagaaggagatctaatagaaatagcattgaaagagaaagacgacgaaatcggagtccttcccgagagagacgtagaagtagaagtcgctcaagggatagacgaaccaatcgtgccagtcgcagtaggagtcgagataggcgtaaaattgatgatcaacgtggaaatcttagtgggaacagtcataagcataaaggtgaggctaaagaacaagagaggaaaaaggagaggagtcgaagtatagataaagataggaaaaagaaagacaaagaaagggaacgtgaacaggataaaagaaaagagaaacaaaaaagggaagaaaaagattttaagttcagtagtcaggatgatagattaaaaaggaaacgagaaagtgaaagaacattttctaggagtggttctatatctgttaaaatcataagacatgattctagacaggatagtaagaaaagtactaccaaagatagtaaaaaacattcaggctctgattctagtggaaggagcagttctgagtctccaggaagtagcaaagaaaagaaggctaagaagcctaaacatagtcgatcgcgatccgcggagaaatctcaaaggtctggtaagaaggcaagccgcaaacacaagtctaagtcccgatcaaggtagtatactttttaaagtattttgtctgatttttaaaaaaaattgactgaatttattcaaagttgaaagtgtcctttctctctctctttaataaactcagtttggtacttgataaataatcatagtcttaaatgttagaaatcctatataatattatttatttaaaattgcagatttttaatttaaaatacatttttatttttaaattttgtcttt

SEQ ID NO: 1970 - DNA, 7787 bp, Homo sapiens
gaattcggggaacggtgtggagcggaggccgcggaggctcctcggtccttcagcacccctcggcccgacgcacccacgcccctcaccccccgagagccgaaaatggacccaagtggggtcaaagtgctggaaacagcagaggacatccaggagaggcggcagcaggtcctagaccgataccaccgcttcaaggaactctcaacccttaggcgtcagaagctggaagattcctatcgattccagttctttcaaagagatgctgaagagctggagaaatggatacaggaaaaacttcagattgcatctgatgagaattataaagacccaaccaacttgcagggaaagcttcagaagcatcaagcatttgaagctgaagtgcaggccaactcaggagccattgttaagctggatgaaactggaaacctgatgatctcagaagggcattttgcatctgaaaccatacggacccgtttgatggagctgcaccgccagtgggaattacttttggagaagatgcgagaaaaaggaatcaaattgctgcaggcccagaacttggtgcagtacttacgagaatgtgaggacgtgatggactggatcaatgacaaggaagcaattgttacttctgaagagctgggccaggatctggagcatgtagaggttttacagaagaaatttgaagagtttcaaacagatatggctgctcatgaagaaagagttaatgaagtgaaccagtttgctgccaaactcatacaggagcagcaccctgaggaggaactgatcaagactaagcaggatgaagtcaatgcagcctggcagcggctgaagggcctggctctgcagaggcaggggaagctctttggggcagcagaagttcagcgctttaacagggatgtggatgagactatcagttggattaaggaaaaggagcagttaatggcctctgatgattttggccgagacctggcaagtgttcaggctctgcttcggaagcacgagggtctggagagagatcttgctgctctagaagacaaggtcaaagccctgtgtgctgaggctgaccgcctgcaacagtcccaccctctgagtgcaacacagattcaagtgaagcgagaggaactgattacaaactgggagcagatccgcaccttggcggcagagagacatgcacggctcaatgattcatacaggcttcaacgcttccttgctgacttccgtgacctcaccagctgggtgactgagatgaaagccctcatcaatgcagatgagcttgccagtgatgtggctggggctgaagccctgctagatagacaccaagagcacaagggtgaaattgatgcccatgaagacagcttcaaatctgcagatgaatctggacaggcactgcttgctgctggtcactatgcctcagatgaagtgagggagaagctgaccgtcctttccgaggagagagcggcgctgctggagctgtgggagctgcgcaggcagcagtacgagcagtgcatggacctgcagctcttctaccgggacactgagcaggtggacaactggatgagcaagcaggaggcgttcctgttgaatgaagacttgggagatttcttggatagtgtggaagcgcttcttaagaagcacgaagactttgagaaatcccttagtgcccaggaggaaaagattacagcattagatgaatttgcaaccaagctaattcagaacaaccactatgcaatggaagatgtggccactcgccgagacgctctgttgagccgccgcaatgcccttcacgagagagccatgcgtcgccgggcccagctagccgattctttccatctgcagcagtttttccgtgattctgatgagctcaagagttgggtgaatgagaagatgaaaactgccacagatgaagcttataaagatccatccaacctacaaggaaaagtacagaagcatcaggcttttgaggctgagctctcagcaaaccagagccgaattgatgccttggagaaagctggccaaaagctgattgatgtcaaccactatgccaaggatgaagtggcagctcgtatgaatgaggtgatcagtttgtggaagaaactgctagaggccactgaactgaaaggaataaagcttcgtgaagccaaccagcaacagcaatttaatcgcaatgttgaggatattgaattgtggctatatgaagtagaaggtcacttggcttcggatgattacggcaaagatcttaccaatgtgcagaacctccagaagaaacatgccctgctagaggcagatgtggctgctcaccaggaccgaattgatggcgtcaccattcaggcccgccagttccaagatgctggccattttgatgcagaaaacatcaagaagaaacaggaagccctcgtggctcgctatgaggcactcaaggagcccatggttgcccggaagcagaagctggccgattctctgcggttgcagcagctcttccgggatgttgaggatgaggagacgtggattcgagagaaagagcccattgccgcatctaccaacagaggtaaggatttaattggggtccagaatctgctaaagaaacatcaagccttacaagcagaaattgctggacatgaaccacgcatcaaagcagttacacagaaggggaatgccatggtggaggaaggccattttgctgcagaggatgtgaaggccaagcttcacgagctgaaccaaaagtgggaggcactgaaagcaaaagcttcccagcgtcggcaggacctggaggactctctgcaggcccagcagtactttgctgatgctaacgaggctgaatcctggatgcgggagaaggaacccattgtgggcagcactgactatggcaaggacgaagactctgctgaggctctactgaagaaacacgaagctttgatgtcagatctcagtgcctacggcagcagcatccaggctttgcgagaacaagcacagtcctgccggcaacaagtggcccccacggatgatgagactgggaaggagctggtcttggctctctacgactatcaggagaagagtccccgagaggtcaccatgaagaagggagatatccttaccttactcaacagcaccaacaaggattggtggaaagtggaagtgaacgatcgtcagggttttgtgccggctgcgtacgtgaagaaattggaccccgcccagtcagcctcccgggagaatctcctggaggagcaaggcagcatagcactgcggcaggagcagattgacaatcagacacgcataactaaggaggccggcagtgtatctctgcgtatgaagcaggtggaagaactatatcattctctgctggaactgggtgagaagcgtaaaggcatgttggagaagagttgcaagaagtttatgttgttccgtgaagcgaatgaactacagcaatggatcaatgagaaggaagccgctctgacaagtgaggaggtcggagcagacttggagcaggttgaggtgctccagaagaagtttgatgacttccagaaggacctgaaggccaatgagtcacggttgaaggacattaacaaggtagctgaagacctggagtctgaaggtcttatggcagaggaggtgcaggctgtgcaacaacaggaagtgtatggcatgatgcccagggatgaaactgattccaagacagcctccccgtggaagtctgctcgtctgatggttcacaccgtggccacctttaattccatcaaggagctgaatgagcgctggcggtccctacagcagctggccgaggaacggagccagctcttgggcagcgcccatgaagtacagaggttccacagagatgctgatgaaaccaaagaatggattgaagagaagaatcaagctctaaacacagacaattatggacatgatctcgccagtgtccaggccctgcaacgcaagcatgagggcttcgagagggaccttgcggctctcggtgacaaggtaaactcccttggtgaaacagcagagcgcctgacccagtcccatcccgagtcagcagaagacctgcaggaaaagtgcacagagttaaaccaggcctggagcagcctggggaaacgtgcagatcagcgcaaggcaaagttgggtgactcccacgacctgcagcgcttccttagcgatttccgggacctcatgtcttggatcaatggaatacgggggttggtgtcctcagatgagctagccaaggatgtcaccggagctgaggcattgctggagcgacaccaggaacaccggacagaaatcgatgccagggctggcactttccaggcatttgagcagtttggacagcagctgttggctcacggacactatgccagccctgagatcaagcagaaacttgatattcttgaccaggagcgtgcagacctggagaaggcctgggttcagcgcaggatgatgctggatcagtgccttgaactgcagctgttccatcgggactgtgagcaagctgagaactggatggctgcccgggaggccttcttgaataccgaagacaaaggagactcactggacagcgtagaggctctgatcaaaaaacatgaagactttgacaaagcgattaacgtccaggaagagaagattgctgctctgcaggcctttgccgaccagctcatcgctgccggccattatgccaagggagacatttctagccggcgcaatgaggtcttggacaggtggcgacgtctgaaagcccagatgattgagaaaaggtcaaagctaggagaatctcaaaccctccaacagttcagccgggatgtggatgagattgaggcttggatcagtgaaaaattgcaaacagcgagtgatgagtcgtacaaggatcccaccaacatccagagcaagcaccagaagcaccaggcttttgaagcagagctgcatgccaacgctgaccggatccgtggggttatcgacatgggcaactccctcattgaacgtggagcctgtgccggcaatgaggatgctgtcaaggcccgcctggctgccttagctgaccagtggcaattcttggtgcaaaagtcagcggaaaagagccagaaactgaaagaagccaacaagcagcagaacttcaacacagggatcaaggacattgcattctggctgtctgaggtggaggccctgctggcatccgaagattatggcaaagacctggcttctgtgaacaacctgctgaaaaagcatcaactgctggaagcagatatatctgcccatgaggatcgcctgaaggacctgaacagccaggcagacagcctgatgaccagcagtgccttcgacacctcccaagtaaaggacaagagggacaccatcaacgggcgcttccagaagatcaagagcatggcggcctcccggcgagccaagctgaatgaatcccatcgcctgcaccagttcttccgggacatggatgacgaggagtcctggatcaaggagaagaagctgctggtgggctcagaggactacggccgggacctaactggcgtgcagaacctgaggaagaagcacaagcggctggaagcagaactggctgcgcatgagccggctattcagggtgtcctggacactggcaagaagctgtccgatgacaacaccatcgggaaagaggagatccagcagcggctggcgcagtttgtggagcactggaaagagctgaagcagctggcagctgcccggggtcagcggctggaagagtccttggaatatcagcagtttgtagccaatgtggaagaggaagaagcctggatcaatgagaaaatgaccctggtggccagcgaagattatggcgacactcttgccgccatccagggcttactgaagaaacatgaagcttttgagacagccttcaccgtccacaaggatcgcgtgaatgatgtctgcaccaatggacaagacctcattaagaagaacaatcaccatgaggagaacatctcttcaaagatgaagggcctgaacgggaaagtgtcagacctggagaaagctgcagcccagagaaaggcgaacgtggatgagaactcggccttccttcagttcaactggaaggcggacgtggtggagtcctggatcggtgaaaaggagaacagcttgaagacagatgattatggccgagacctgtcttctgtgcagacgctcctcaccaaacaggaaacttttgacgctgggctgcaggccttccagcaggaaggcattgccaacatcactgccctcaaagatcagcttctcgccgccaaacacgttcagtccaaggccatcgaggcccggcacgcctccctcatgaagaggtggagccagcttctggccaactcagccgcccgcaagaagaagcttctggaggctcagagtcacttccgcaaggtggaggacctcttcctgaccttcgccaaaaaggcttctgccttcaacagctggtttgaaaatgcagaggaggacttaacagaccccgtgcgctgcaactccttggaagaaatcaaagctttgcgcgaggcccacgacgccttccgctcctccctcagctctgcccaggctgacttcaaccagctggccgagctggaccgccagatcaagagcttccgcgtagcctccaacccctacacctggtttaccatggaggccctggaggagacctggaggaacctacagaaaatcatcaaggagagggagctggagctgcagaaggaacagcggcggcaggaggagaacgacaagctgcgccaggagtttgcccagcacgccaacgccttccaccagtggatccaagagaccaggacatacctcctcgatgggtcctgtatggtggaagagtcggggaccctcgaatcccagcttgaagctaccaaacgcaagcaccaggaaatccgagccatgagaagtcagctcaaaaagatcgaggacctgggggccgccatggaggaggccctcatcctggacaacaagtacacggagcacagcaccgtgggcctcgcccagcagtgggaccagctggaccagctgggcatgcgcatgcagcacaacctggagcagcagatccaggccaggaacacaacaggtgtgactgaggaggccctcaaagaattcagcatgatgtttaaacactttgacaaggacaagtctggcaggctgaaccatcaggatggcaaatcttgcctgcgctccctgggctatgacctgcccatggtggaggaaggggaacctgaccctgagttcgaggcaatcctggacacggtggatccgaacagagatggccatgtctccttgcaagaatacatggctttcatgatcagccgcgaaactgagaacgtcaagtccagcgaggagattgagagcgccttccgggccctcagctcagagggaaagccttacgtgaccaaggaggagctctaccagaacctgacccgggaacaagccgactactgcgtctcccacatgaagcccatcgtggacggcaagggccgcgagctccccaccgcgttcgactacgtggagttcacccgctcgcttttcgtgaactgagccactccctgggtcacccacccctcgctgcttgccctgcgtcgccttgctgcatgtccgctcctctgtgtgctctcactttccactgtaaccttaagcctgcttagcttggaataagacttaggagaaaatggtgcttcactaacccgcttccggtccagtcacaatcatcatgtcactgtgggacccagatctgtgtcttgaagcagctgccctcattccgacttcagaaaatcgaagcagctggcgcctccccttcggaattc

SEQ ID NO: 1971 - DNA, 6853 bp, Homo sapiens
atacatagacttccgttaaaaccagaatgaggaaaatacttttctctagcatcgtaggaggaagaaaacaaacacatcagatattttcagcactaaaagagatggttttccccacatatatgtaaaagaaatttgcaagactactggattttgatctcatggttgcagtgggtgaataggtggccttttgtgatctcctacatcaccctggaagtgagacttcttcggtttcttctagagtcagtttggtatcagaatggcaaagcaacttaaccttccagaaaatacagatgattggacaaaagaggatgtaaatcagtggttagaaagtcataagattgaccaaaaacacagggaaattttgactgaacaagacgtgaatggagcagtcttgaagtggttaaaaaaagaacatcttgttgatatgggcatcacacatggaccagctattcaaatagaagaactattcaaagaattgcggaaaacagccattgaagattcgattcagacatctaagatgggaaagcccagtaaaaatgctcctaaagaccaaactgtgtctcaaaaggaacgtagagaaacttcaaagcaaaaacaaaagggtaaagagaacccagatatggctaatccgtctgcaatgagtacaactgctaaaggttctaagtcactaaaagttgagctcatagaagataaaatagattatacaaaggaaaggcaaccatccatagacctgacatgtgtatcatatccatttgatgaattcagtaatccatatcgttacaagttggattttagtctacagcctgaaacaggaccaggcaatctcattgatccgatacatgaattcaaagccttcacaaatacagcaacagccacagaagaggatgtcaagatgaaatttagcaatgaggttttccgatttgcttcagcttgtatgaattcacgtaccaatggcactattcattttggagtcaaagacaaaccccatgggaaaattgttggcatcaaagtcaccaatgataccaaggaagccctcattaaccatttcaatctgatgataaacaagtattttgaagaccatcaagtccaacaagcaaagaagtgcattcgagagccaagatttgtggaagttttactgccaaatagtactctatctgacagatttgttattgaagtggacattattccacagttctctgaatgccaatatgattatttccagattaaaatgcaaaattacaacaacaaaatatgggaacaaagtaaaaaattctcactatttgtgcgagatgggaccagctctaaggacattacgaaaaataaagttgatttcagagcatttaaagcagattttaaaacactggcagagtccagaaaagcagcagaagaaaaattcagagcaaaaacaaataaaaaagaaagagagggaccaaagttggttaaattattgacaggaaatcaagatttgttagataattcatactatgaacagtacattcttgtaacaaataaatgccacccagatcaaacaaaacacttagatttcctgaaggaaattaaatggtttgctgtattggagtttgatcctgagtctaacatcaatggagtggtcaaagcttacaaagaaagccgagtagcaaaccttcactttccaagtgtatatgtagaacagaaaaccacaccaaatgagacgatttctactctaaatctttaccatcaacccagctggattttctgcaatggcaggttagaccttgacagtgaaaaatataaaccctttgatccaagttcctggcaaagagaaagagcttctgatgtcaggaaactgatttcatttcttacacatgaagacataatgccaagagggaagtttttggtggtatttctattactgtcctctgtggatgacccaagagatcccctcattgagactttctgtgctttctaccaggatctcaaaggaatggaaaatatactgtgtatttgtgtgcacccacacatatttcagggatggaaagatctacttgaagcaagattaataaaacaccaagatgaaatttcaagccaatgtatttctgctttaagccttgaagagatcaatggcactattcttaaactaaaatctgtgactcaatcttcaaaaaggcttttgccatctattggtttatcgactgtccttctgaaaaaggaagaagatatcatgactgctctggaaattatctgtgaaaatgaatgtgagggtacactgttagagaaggacaaaaataaattccttgaattcaaggcatcaaaagaggaagacttctatcgaggtggcaaagtgtcatggtggaacttctacttctcttctgaaagttattcttcaccttttgtcaaaagggataaatatgaaagacttgaagcaatgattcaaaactgtgcagattcttctaaaccaacaagtaccaaaattattcatctgtatcatcatccaggctgtgggggaactaccttggctatgcacattctctgggaactaaggaagaaattcagatgtgctgtgctgaaaaacaagacagtggatttttctgaaattggagaacaggtaaccagtttaatcacctatggggcaatgaaccgtcaggaatacgtacctgtactactccttgttgatgattttgaagaacaagataatgtctatcttctgcagtactctattcaaacagctatagctaaaaagtacattcgatatgaaaaacctctggtgattatcctaaattgtatgagatcacaaaatcctgaaaaaagtgcaaggatcccagacagtattgccgtaatacagcaactctctcccaaagaacagagagcttttgagcttaaattgaaagaaatcaaagaacagcataaaaactttgaggatttttattcctttatgatcatgaaaaccaattttaataaagaatacatagaaaatgtggtccggaatatcctgaaagggcagaatattttcaccaaggaagcaaagctcttttcttttctggctcttcttaattcatatgtgcctgataccaccatttcactatcacagtgtgaaaaattcttaggaattggaaacaagaaggctttctgggggacagaaaaatttgaagacaagatgggcacctactctacaattctgataaaaacagaggtcatcgaatgtgggaactactgtggagtacgcatcattcactctttgattgcagagttctcactggaagaattgaagaaaagctatcacctgaataaaagtcaaattatgttggatatgctaactgagaatttgttcttcgatactggtatgggaaaaagtaaatttttgcaagatatgcacacactcctactcacaagacaccgcgatgaacatgaaggtgaaacaggaaattggttttccccatttattgaagcattacataaagatgaaggaaatgaagcagttgaagctgtattgcttgaaagtatccatcggttcaacccaaatgcattcatttgccaagcgttggcaagacatttctacattaaaaagaaggactttggcaatgctctaaactgggcaaaacaagcaaaaatcatagaacctgacaattcttatatctcagatacactgggtcaagtctacaaaagtaaaataagatggtggatagaggaaaacggaggaaacgggaacatttcagttgatgatctaattgctcttttggatttagcagaacatgcctcaagtgcattcaaagaatctcaacagcaaagtgaagatagagagtatgaagtgaaggaaagattgtatccgaagtcaaaaaggcggtatgatacttacaatatagctggttatcaaggagagatagaagttgggctttacacaatccaaattctccagctcattcctttttttgataataaaaatgagctatctaaaagatatatggtcaattttgtatcaggaagtagtgatattccaggggatccaaacaatgaatataaattagccctcaaaaactatattccttatttaactaaattgaaattttctttgaaaaagtcctttgatttttttgatgaatactttgtcctgctaaaacccaggaacaatattaagcaaaatgaagaggccaaaactcggagaaaggtggctggatattttaagaaatatgtagatatattttgtctcttagaagaatcacaaaacaacacaggtcttggatcaaagttcagtgagccacttcaagtagagagatgcaggagaaacctagtagctttaaaagcagacaagttttctgggctcttggaatatcttatcaaaagtcaagaggatgctataagcactatgaaatgtatagtgaacgaatatacttttctcttagaacaatgcactgtcaaaatccagtcaaaagaaaagctaaatttcatcttggccaacattattctctcctgtatccaacctacctccagattagtaaagccagttgaaaaactaaaagatcagcttcgagaagtcttgcaaccaataggactgacttatcagttttcagaaccgtattttctagcttccctcttattctggccagaaaatcaacaactagatcaacattctgaacaaatgaaagagtatgctcaagcactaaaaaattctttcaaggggcaatataaacatatgcatcgtacaaagcaaccaattgcatatttctttcttggaaaaggtaaaagactggaaagacttgttcacaaaggaaaaattgaccagtgctttaagaagacaccagatattaattccttgtggcagagtggagatgtgtggaaggaggaaaaagtccaagaacttttgcttcgtttacaaggtcgagctgaaaacaattgtttatatatagaatatggaatcaatgaaaaaatcacaatacccatcactcccgcttttttaggtcaacttagaagtggcagaagcatagagaaggtgtctttttacctgggattttccattggaggcccacttgcttatgacattgaaattgtttaagagcctgatattcttcctccaagaatttgatctcagtacccatttaatttttttggactcaagatctatgctttaaaccggcaaggttatagatacagcctctagctcttcagatctgtacatgcagtatttaatttcctcttaaacatgttatgagttctacaaagacaatagtgaaaaaggaaggagtgagatatatgaaaagtagcaaatatgttccttggtttggttaacatcattgatgacaaaataataaggagctatgactggagtcaggagaagttagtgtaataagctggctacacagaaccccactacttaccaggcatggattgaagaagattgtctactcaaatggcatttagacattagaatgtctgggaaaatatttctcaaagacagcaaaaacctctcaaactgaggagcaacatttattcttactaagcagatcatcaatgtatcatgtgcttggcactcaaggatcttccaaaacagaggaccaaccagtcttctgaaggtcatgcccacagaagtcatcagaccttaccaaagtaggttggagaattagattgccttttcatgcagtgagattcagttaagcaaaaatgaaatttgtctctatagctaattagcttatcaactcccctccaaacaaacaattaaaaaaaaaacatacagacactcaaattccacaagctaatgaacaaaagggactcttgtgagaagactaatgagtccctcatccagaagatgccaatgtactggcagattaacatacaacctatgttttgaacaaaaacaaccagcgatacgtaatcaaaatgtaattttcccctaataaaattatggatatgggcagtcatcaatggctgccaaaaccattaagtggaaagctgattaaaaaacaaaaatttctaatggatttatcaaactgtcccaaatcctgataaatattaacatcacagaggaagaccagacattatgggcctggaagtactataggagtgcacacatcacccgtgacatggtcttgccaaataattaaacctgaatttgatcaggtctctggatcttatttgcaattcaaaagaaattttaaaaaaatcctactaacaccaccacaaatatgcaatcagcaatatccagaaaggggaaattcacaggacaaaaacctggttttcttttttggtttcttcaaccaaaaaagaaagaaattgcaaaggaccaaaaaaatgttggggaatctatacattataagggacttaacaactaaagggcaacatatagactttagatcctaatttgagcaaaatctaaaatcaattattaggcaatcagaaaaatttgaacacagactagatatttgaggatattaaggtactatattattgaagattccatggttatgttttttaaagagttcatgccttttagagatacatactaaagtatttgtaaataaatgacatgatctagaatcagtaattttgtgtttggggtgtgggggtggtgaaagggaagtagaaccgaaacaagattagtcctgagttaacaatggctgcaagctggatacatggaattcagcacacttttctccctcttactgattatgcttttgaaattttctcttgtaaaacatttagaaaacaaaaacaaaaaaaatgtgatttgtttctgtcttcaaaatctcattagaattttttcactggaggaagattttcccttgcttctgcataaaattttaactccataacttataagctcactctttattgttactttctaattgacaaataaaaattgtatattaaaaaaaaaaaaaaaaaa

SEQ ID NO: 1972 - DNA, 1888 bp, Homo sapiens
cggaattgccggtgccgccgccaccgctgtctgtgcgcccacctctgctgctaccatggggatcttagagaagatctcggagatcgagaaggagatcgctcggacacagaagaacaaggccactgagtatcatctgggcctgctgaaagctaagctcgccaagtatcgggcccagctcctggaaccgtccaaatcggcctcgtccaaaggagagggctttgatgtcatgaagtcgggtgatgcccgtgtggcgctgattggatttccctctgtgggtaagtccacattcttgagtctgatgacctccacggccagcgaggcagcgtcctatgagttcaccactctgacgtgtattcctggggtcattgaatacaaaggtgccaacatccagctcctggaccttcctggaatcattgaaggcgcagcccaaggaaaaggccgtggccggcaggtgatcgctgtggcgcgcacggctgacgtcatcatcatgatgctggatgccaccaagggagaggtgcagaggtctctgctggagaaggagctggagtctgtgggcatccgcctcaacaagcacaagcctaacatctacttcaagcccaagaaaggtggtggcatctcctttaactcgacagtcacgctgacccagtgctcggaaaagctggtgcagctcatcctgcacgaatacaagatcttcaatgcagaagtgcttttccgagaagactgctccccggacgagttcatcgatgtgatcgtgggcaaccgggtgtacatgccctgcctgtatgtttataacaaaatcgaccagatctccatggaagaggtggaccgcctggcccgaaaacccaacagtgtggtcatcagctgcggcatgaagctgaacctggactatctgctggagatgctttgggagtacttggccctgacctgcatctacaccaagaagagaggacagaggccagacttcacagacgccatcattctccggaaaggggcctcagtggagcacgtgtgccaccgcatccaccggtcactcgccagccagttcaagtacgccctggtgtggggcaccagcaccaagtacagtccgcagcgggtgggcctgacccacaccatggagcatgaggacgtcatccagatcgtgaagaagtaacggcgcctgccgggcctcccgcccacctgcctcgtctccctggggaggtggtcccactgggacacacaaacacccaaacagaaaaatacaaatacacgtaccccaggaaggggtccctcaagtctctgctatttacagaagtttcttcagtaggcagacgaagagtgtgttggggcaaaggggctcggttggaggcatttcccataagactgagccctctcatgggggttttgagtttgtagtgctgagcctgcatctgtgcctcccagccccctgcactgagggagcaagttgcccacatgcccgccagccagggcctaaagcagatggcatgctcagtgccaggctggtagctgggcctgtttgggtccctggaggctgtggctgctgtcatggcacctcactccctcagctcttgccagcttctctgacacttgggttgggggcccttccaggaggaaacccccttgggtgccccacacagggctctccatgatgggaaccagtggttagtggcttcaaaggcccagctgacaccctccacagcctaaggggtgtcctaaagtgcctccccctgtattccccctcccagggcagcccctgcccagcacaaaaccccaggaccctggctctgcacgcctggggcagggacttttgagtttaggatctgtattttctaagtccccagttctcctggctctcctttctgaaataaaggattgaaaacggttcctgttc

SEQ ID NO: 1973 - DNA, 2630 bp, Homo sapiens
ttccgccattagagggaggcagagagggatcgttcttcgcttttcctccggtgcctgacgtggtgggctggggcccttcattctcggactttccctcagcccttccaggcctcgcccgaggagggcgtggggacagcgcccgggtcggcggggccggggcggtgggggctgagccggccgtggctgtgaaggcgctgccgcggctgtcgggagggcggcgcgacactcgggctcgggcggccgggaagcgacgggatggctgcggccggcggcggcggcggcggggcggcggcggcgggccgagcctactcgttcaaggtggtgctgctgggggaaggctgcgtggggaagacgtcgctggtgctgcgctactgcgagaacaagtttaacgacaagcacatcaccactctgcaggcatcattcttaacaaagaagttaaatattggtgggaaaagagtaaaccttgccatatgggatacggcaggtcaagagagattccatgcattgggtccaatttactacagagattcaaatggagcgattttagtttatgacataacagatgaagattcttttcagaaggtaaaaaactgggtcaaagaattacggaaaatgttgggaaatgaaatctgtttatgtatagttggtaataaaatagacttggaaaaggagagacatgtttccattcaagaagcagagtcgtatgcagaatctgtgggagcaaaacattatcatacttcagccaaacagaacaaaggaattgaggaactctttcttgacctttgtaaaaggatgatagaaacagcacaagtggatgagagagcaaaaggcaatggctctagtcagccgggaactgcaaggcgaggtgtacagattattgatgatgaacctcaagcccagaccagtggtggagggtgctgttcttctggataactgttcacgcctaagaaattaaaagacagaacaaaactgtggatcattgccctcaacatgaagactgccatattccaagtcacattattttaccaatggaattatagaattaacagtattttaaattacgtttataacactgcagagaccttaagtgctaaacttagtggagtttgtgaccagagaattggcattttctacaaatgtttttttttgttttttttttgtttttttttgtttttttttgagacggagtctcgctctgtcacccaggctggagtgcactggcttgatctcggctcactgcaagctccacctcccaggttcacgccattctcctgcctcagcctcccgagtagctgggactataggcgcccaccacgacgcccggctaattttttgtatttttagtagagacggggtttcaccaggttagccaggatggtctcgatctcctgaccttgtgatccgcccgcctcggcctcccaaagtgctgggattacaggcgtgagccaccgtgcccggcctacaaatgttaacaaagcaattaccaatggcctttttacatattttttctttaatgaggaataatatgcatgtagaaaagacctacttaaagtcttcatttatattctttcaaatcaaatctttatttaataacttatatatgttgttggaatggttacatttttgcagccctttgtattttgtggtagttgaaattgtatcacttctaaacagcaaactgtttttgtttttaattagcagatatctgaagtactatttttgcagggtttgcacaggcccgtaactgtctactactttgatataatctgtatacatcctgtatgctgagctggtaaaatacattgtaaattacatattaaatattttatctgcttttacaagcgcaaggtgcaaaaatatatacaatagtctcattgatgactgtaaagtgaattaacatttggtgattatgcctagcttttttgactaatataaagatcatagctccccttcacttctgtcttaacttgaacatggcgtgtttaaattttcatacatactttacttgaattattgctgttgtcacatatttttgcctctgtgagttcatctgatgattgagcagtagcatttgccttttgggttttttgtttgttattatagaagagatgacttctgctgattttgctttagaatggttaccttagaagaatttgggtggctcatgttgaatttcacttctgcaatagctttcattttctcataggctttataagagatgggttcagtggtatgagcagaggaagagatcccagatagtagccagttaaccaagactcattcatatagcacgtagtttatgttcctgaggcagcacttttagatcctttgtgagcaagttctatttgttcattgcttgccagagatgaacacagaatgttctgtttcattttacaagaactatcctgagtttctgtggatggaaacattacatgtaatgcagatatagtgaacactggaaagatttattaaagaattatatttgtgtatactttataaattagtccctcattagatttttttttcttaagcataagactgaacttaaatgtgttaattttagtagaatcaggcactgctcgcagaaggaacacagattgtagagattaacataaattgttcttgttcta

SEQ ID NO: 1974 - DNA, 696 bp, Homo sapiens
ttccccccccccccccccccccccgcccgagcacaggacacagctgggttctgaagcttctgagttctgcagcctcacctctgagaaaacctcttttccaccaataccatgaagctctgcgtgactgtcctgtctctcctcatgctagtagctgccttctgctctccagcgctctcagcaccaatgggctcagaccctcccaccgcctgctgcttttcttacaccgcgaggaagcttcctcgcaactttgtggtagattactatgagaccagcagcctctgctcccagccagctgtggtattccaaaccaaaagaagcaagcaagtctgtgctgatcccagtgaatcctgggtccaggagtacgtgtatgacctggaactgaactgagctgctcagagacaggaagtcttcagggaaggtcacctgagcccggatgcttctccatgagacacatctcctccatactcaggactcctctccgcagttcctgtcccttctcttaatttaatcttttttatgtgccgtgttattgtattaggtgtcatttccattatttatattagtttagccaaaggataagtgtcctatggggatggtccactgtcactgtttctctgctgttgcaaatacatggataacacatttgattctgtgtgttttccataataaaactttaaaataaaatgcagacagtta

SEQ ID NO: 1975 - DNA, 2220 bp, Homo sapiens
gttaacgcccacgggctcgcgcggcgccgcctcctgggctcagttaccgcggacgccagtgccgggctccaggagacgcagggcgacgccacacgccggggtggccgactgggtcagcgcgggctgcgcctcctcgccatgggccccctctcggcgcggctgctaatgcagcgcgggcgccccaagagcgaccggctggggaagatccggagtctggacctgtcaggattggagctgctttccgagcacctggaccccaaactcctgtgccgcctgacgcagctgcaggagcttgacctgtctaacaaccacctggagacgctgccggacaacctgggcctgtcccacctgcgtgtcctccgctgcgccaacaaccagctgggggatgttactgccttgtgccagttccccaagctcgaggaactcagcctggagggcaaccccttcctgacggtcaatgacaacctgaaagtctcctttctcctgcccacgctccgtaaggtcaatggcaaggatgcgtcctcaacttactctcaggtggagaacctgaatcgggagctgaccagcagggtcacagctcactgggagaagttcatggccacactgggtcctgaagaggaggctgagaaggcccaggcggactttgtgaagtcggctgtcagggatgtccgctacgggcccgagtccctcagcgagttcacccagtggcgggtgcggatgatctctgaggagctggtggccgccagtaggacccaggtgcaaaaggctaacagcccagagaagcccccagaagctggagctgcccacaagcccagggccagactggcggccttgaaacggccagacgacgtcccactcagcctctctcccagcaagcgggcgtgtgcctccccgtcggcccaggtggagggcagccctgtggcaggctccgatggcagccagcctgctgtgaagctggagcccctgcacttcctgcagtgccacagcaagaacaacagcccccaggacctcgagacccagctgtgggcctgtgccttcgagccggcctgggaggagggggccacatcccagaccgtggccacgtgcggcggggaggctgtgtgcgtaattgattgccagacgggcatcgtgctccacaagtacaaggcacccggcgaggagttcttttctgtggcctggaccgctctgatggtggtcacacaggctggccacaagaagcgctggagtgtgctggcggctgcaggcctacggggcctggtccggctgctgcacgtgcgtgccggcttctgctgcggggtcatccgagcccacaagaaggccatcgccaccctgtgcttcagccccgcccacgagacccatctcttcacggcctcctatgacaagcggatcatcctctgggacatcggggtgcccaaccaggactacgaattccaggccagccagctgctcacactggacaccacctctatccccctgcgcctctgccctgtcgcctcctgcccggacgcccgcctgctggccggctgcgagggcggctgctgctgctgggacgtgcggctggaccagccccaaaagaggagggtgtgtgaagtggaattcgtcttctctgagggctccgaggcatctggacggagagtggatgggctggcatttgtgaatgaggacatcgtggcctccaaggggagcggcctgggcaccatctgcctgtggagctggaggcagacgtgggggggccggggcagccagtccacggtggcagtggtggtcctggcgcggctgcaatggtcgtccaccgagttggcctacttctcgctcagcgcctgccctgataaggggattgtgctctgtggggatgaggagggcaacgtgtggctctacgacgtcagcaacatcctgaagcagccacccctgctgccggcagccctgcaggcccccacacagatcctgaagtggccccagccctgggcccttggccaggtggtgaccaagaccatggtgaacacagtggtggccaatgcctccttcacctacctcaccgccctgacggactccaacatcgtagccatctgggggaggatgtagcctcacaccatcgcaaaggaccagggacacagctaactaacttattcagctttgggccgatgggggtgggggggggtctttcagtgaatatttttattaaactctactgtggacaaaaaaaaaaaaaaaaaaaaaaaa

SEQ ID NO: 1976 - DNA, 3143 bp, Homo sapiens
tgtgagtgagtccgggcccgtgtcccctctcccgccgccgccatgggctgcacgttgagcgccgaagacaaggcggcagtggagcgaagcaagatgatcgaccgcaacttacgggaggacggggaaaaagcggccaaagaagtgaagctgctgctactcggtgctggagaatctggtaaaagcaccattgtgaaacagatgaaaatcattcatgaggatggctattcagaggatgaatgtaaacaatataaagtagttgtctacagcaatactatacagtccatcattgcaatcataagagccatgggacggctaaagattgactttggggaagctgccagggcagatgatgcccggcaattatttgttttagctggcagtgctgaagaaggagtcatgactccagaactagcaggagtgattaaacggttatggcgagatggtggggtacaagcttgcttcagcagatccagggaatatcagctcaatgattctgcttcatattatctaaatgatctggatagaatatcccagtctaactacattccaactcagcaagatgttcttcggacgagagtgaagaccacaggcattgtagaaacacatttcaccttcaaagacctatacttcaagatgtttgatgtaggtggccaaagatcagaacgaaaaaagtggattcactgttttgagggagtgacagcaattatcttctgtgtggccctcagtgattatgaccttgttctggctgaggacgaggagatgaaccgaatgcatgaaagcatgaaactgtttgacagcatttgtaataacaaatggtttacagaaacttcaatcattctcttccttaacaagaaagacctttttgaggaaaaaataaagaggagtccgttaactatctgttatccagaatacacaggttccaatacatatgaagaggcagctgcctatattcaatgccagtttgaagatctgaacagaagaaaagataccaaggagatctatactcacttcacctgtgccacagacacgaagaatgtgcagtttgtttttgatgctgttacagatgtcatcattaaaaacaacttaaaggaatgtggactttattgagaagcatggatgttagtgaaagttactacagtgtggagtgttgagaccagacaccttttgctgtctcatggggcagctacaagcatgaacgggaccagggaatggcagcagcatgcagaatcttagcactctttagcacaatattttgtattagggaacttttaattgacatcgagatgctaaagtcagacattggaattggaagaactactaaagtgtgattcgatcgtcaagacatcacttggatttcttaatcttaaatgcttatggaagatgtgaagttgaggtgctgcattctagaacttcaatatgtagcttactctttttttccccccttcttaaaccaccagtggttcatttttaaggttttttcatcaagagaagaataactttactaaattttatttctttatttgcaaaagaatctttattaaaacaaacaatcttaactatgcacatgatgtgaccagatcatcttgaaaatattcctctttagtaggaactctttgtttttaactcttggtatggtcagaatataatacttccataattacttataattctttccggttactggggctataaatacaactttttaaatgaaatttatgttattatcctgctcaaagtaccattatggtttccatatggtaattacattggaaagttctgcaataagattctagttctctcttttctttaagcttatggttgaaggttaaccttgtttgtgcagattaccaaattactgctgatgtagtatgataaagtcagcttcttggatacagacacacccagggcagctgccaatcagaaatgcaaattgctaaattccaaacagaaccagtgactttgctgctacatatttactaaattgaccactttgattcttgcttgtttgtctcagttatagggagttttgtacatggtgcctcttgttttccatcttcatggccttttctgttgagaaacatctaaagtgtattaacagtgcatgcttttactttgtaaatgtggtgccaaatccctgtttgccatcgtttttactgtaccgatgttaactgtagtaatccttagccagtatgttcttttgctgaaactgttgcattttgggacttttttccactttgtcatgtgtacatttttaatctgttatagttggcggcagtattaaaatggtgagtaaagagcccaggtttgctcctgtttgtaactagtcttttctggaaatactgtcttctgtttccttttgcctttgcagaatgtgctttagcctttgtctgagaatgggtttaggtagaagggtttcctgaaagtctagtcttttggtgtaatagtattgttgaaccttaggttttatgttatatctgcatatgagtgatatgtgatcatgattcattttgcagatttacattttgcttgtgtggaaagttacgttcacttcaacctacagacccttttgtataatgtacagcaaatgtcattaaatattgaatgctctattgggggaagacaaatgaagagaatgcattttgagcatttcaaatcagtagtttgggcagtgccttttggggtccaatctttttggattggattctatttcatcttttgatgtgacttttcacctagtttacaaaaaaaaggttggtggtcaacaaaaaaagcaagtcatagcagttcagtgcctttgttggtagtttttaactttttttgtgattctttttggaaaatcatagcttacagatggtataactgtattatataatggaattttctttaggtgtgggaaaaacttgatctgaaagaaaattatcagcttcaattggcgattgattcagtgcccacaatgtaaacagggttggtagttgttactcattttgaatataccttttccttattgtattctgtaatataggatcctggaaatgagacctggtggaatattattttcaactgtagtctttctatactgtggactaatgaaatggtgttgttgataaatctaaaataaccaataatccaaaaaagttcatttt

SEQ ID NO: 1977 - DNA, 5456 bp, Homo sapiens
cgccggggcgagttcctgcagggtggacccggcgatcaggtctccgcggtgccactttgggcgcgggcgggaagccgggacgctccgcacctgcagcgaccttgggctccgcggaccgggcgcgggcacctgtggctgcgtcctatggcgcacgtggaggcggaggctccggggagccgccggggccgcctgtgagccggagagcggaggaggcaccggcgcgcacgatgtcgttccttgaagaggcgagggcagcggggcgcgcggtggtcctggcgttggtgctgctgctgctccccgccgtgcccgtgggcgccagcgttccgccgcggcccctgctcccgctgcagcccggcatgccccacgtgtgtgctgagcaggagctgaccctggtgggccgccgccagccgtgcgtgcaggccttaagccacacggtgccggtgtggaaggccggctgtgggtggcaggcgtggtgcgtgggtcatgagcggagaaccgtctactacatgggctacaggcaggtgtataccacggaggcccggaccgtgctcaggtgctgccgagggtggatgcagcagcccgacgaggagggctgcctctcggctgaatgcagcgccggcctctgttttcacggtggccgttgtgtgccaggctcagcccagccgtgtcactgtccccccggcttccagggaccccgctgtcagtatgatgtggacgaatgccgaacccacaacggtggctgccagcaccggtgcgtgaacaccccaggctcctacctctgtgagtgcaagcccggcttccggctccacactgacagcaggacctgcctggccattaactcctgcgccctgggcaatggcggctgccagcaccactgtgtccagctcacaatcactcggcatcgctgccagtgccggcccgggttccagctccaggaggacggcaggcattgtgtccgtagaagcccgtgtgccaacaggaacggcagctgcatgcacaggtgccaggtggtccggggcctcgcccgctgtgagtgccacgtgggctatcagctagcagcggacggcaaggcctgtgaagatgtggacgaatgtgccgcagggctggcccagtgtgcccatggctgcctcaacacccaggggtccttcaagtgcgtgtgtcacgcgggctatgagctgggcgccgatggccggcagtgctaccggattgagatggaaatcgtgaacagctgtgaggccaacaacggcggctgctcccatggctgcagccacaccagtgctgggcccctgtgcacatgtccccgcggctacgagctggacacagatcagaggacctgcatcgatgtcgacgactgtgcagacagcccgtgctgccagcaggtgtgcaccaacaaccctggcgggtacgagtgcggctgctacgccggctaccggctcagtgccgatggctgcggctgtgaggatgtggatgagtgcgcctccagccgtggcggctgcgagcaccactgcaccaacctggccggctccttccagtgctcctgcgaggccggctaccggctgcacgaggaccgtaggggctgcagccccctggaggagccgatggtggacctggacggcgagctgcctttcgtgcggcccctgccccacattgccgtgctccaggacgagctgccgcaactcttccaggatgacgacgtcggggccgatgaggaagaggcagagttgcggggcgaacacacgctcacagagaagtttgtctgcctggatgactcctttggccatgactgcagcttgacctgtgatgactgcaggaacggagggacctgcctcctgggcctggatggctgtgattgccccgagggctggactgggctcatctgcaatgagacttgtcctccggacacctttgggaagaactgcagcttctcctgcagctgtcagaatggtgggacctgcgactctgtcacgggggcctgccgctgccccccgggtgtcagtggaactaactgtgaggatggctgccccaagggctactatggcaagcactgtcgcaagaaatgcaactgtgccaaccggggccggtgccaccgcctctacggggcctgcctctgcgacccagggctctacggccgcttctgccacctcacctgcccgccgtgggcctttgggccgggctgctcggaggagtgccagtgtgtgcagccccacacgcagtcctgtgacaagagggatggcagctgctcctgcaaggctggcttccggggcgagcgctgtcaggcagagtgtgagctgggctactttgggccggggtgctggcaggcatgcacctgcccagtgggcgtggcctgtgactccgtgagcggcgagtgtgggaagcggtgtcctgctggcttccagggagaggactgtggccaagagtgcccggtggggacgtttggcgtgaactgctcgagctcctgctcctgtgggggggccccctgccacggggtcacggggcagtgccggtgtccaccggggaggactggggaagactgtgaggcagattgtcccgagggccgctgggggctgggctgccaggagatctgcccagcatgccagcacgctgcccgctgcgaccctgagaccggagcctgcctgtgcctccctggcttcgtcggcagccgctgccaggacgtgtgcccagcaggctggtatggtcccagctgccagacaaggtgctcttgtgccaatgatgggcactgccacccagccaccggacactgcagctgtgcccccgggtggaccggctttagctgccagagagcctgtgatactgggcactggggacctgactgcagccacccctgcaactgcagcgctggccacgggagctgtgatgccatcagcggcctgtgtctgtgtgaggctggctacgtgggcccgcggtgcgagcagcagtgtccccagggccactttgggcccggctgtgagcagctgtgccagtgtcagcatggagcagcctgtgaccacgtcagcggggcctgcacctgcccggccggctggaggggcaccttctgcgagcatgcctgcccggccggcttctttggattggactgtcgcagtgcctgcaactgcaccgccggagctgcctgtgatgccgtgaatggctcctgcctctgccccgctggccgccggggcccccgctgtgccgagacctgcccagcccacacctacgggcacaattgcagccaggcctgtgcctgctttaacggggcctcctgtgaccctgtccacgggcagtgccactgtgcccctggctggatggggccctcctgcctgcaggcctgccctgccggcctgtacggcgacaactgtcggcattcctgcctctgccagaacggagggacctgtgaccctgtctcaggccactgtgcgtgcccagagggctgggccggcctggcctgtgagaaggagtgcctcccccgggacgtcagagctggctgccggcacagcggcggttgcctcaacgggggcctgtgtgacccgcacacgggccgctgcctctgcccagccggctggactggggacaagtgtcagagcccctgcctgcggggctggtttggagaggcctgtgcccagcgctgcagctgcccgcctgccgctgcctgccaccacgtcactggggcctgccgctgtccccctggcttcactggctccggctgcgagcaggcctgcccacccggcagctttggggaggactgtgcgcagatgtgccagtgtcccggtgagaacccggcctgccaccctgccaccgggacctgctcatgtgctgctggctaccacggccccagctgccagcaacgatgtccgcccgggcggtatgggccaggctgtgaacagctgtgtgggtgtctcaacgggggctcctgtgatgcggccacgggggcctgccgctgccccactgggttcctcgggacggactgcaacctcacctgtccgcagggccgcttcggccccaactgcacccacgtgtgtgggtgtgggcagggggcggcctgcgaccctgtgaccggcacctgcctctgccccccggggagagccggcgtccgctgtgagcgaggctgcccccagaaccggtttggcgtgggctgcgagcacacctgctcctgcagaaatgggggcctgtgccacgccagcaacggcagctgctcctgtggcctgggctggacggggcggcactgcgagctggcctgtccccctgggcgctacggagccgcctgccatctggagtgctcctgccacaacaacagcacgtgtgagcctgccacgggcacctgccgctgcggccccggcttctatggccaggcctgcgagcacccctgtccccctggcttccacggggctggctgccaggggttgtgctggtgtcaacatggagccccctgcgaccccatcagtggccgatgcctctgccctgccggcttccacggccacttctgtgagagggggtgtgagccaggttcatttggagagggctgccaccagcgctgtgactgtgacgggggggcaccctgtgaccctgtcaccggtctctgcctttgcccaccagggcgctcaggagccacctgtaacctggattgcagaaggggccagtttgggcccagctgcaccctgcactgtgactgcgggggtggggctgactgcgaccctgtcagtgggcagtgtcactgtgtggatggctacatggggcccacgtgccgggaaggtgggcccctccggctccccgagaacccgtccttagcccaggggctcagcgggcacactgcccgcctccagcagacccacatcccggagcggtggaccagcgaggcactagtagaggcagtcccgtggagcccgcctctccagtcccagccagaggggaccctggcctttggtgaccactgagaaggacacttcacgggcccagagctcctggtactgcccttcctttgagggccgtggagggctgtggacagcccagcaacctgtcgctcttggaggctggtgtggccttgaggagggaagcctcgcatggccgctggaagagaggcgcctcctggcctggctctgcagaacccaggggcacgctctgggcctgggctgaggaagtcccgctctccccgcggctctgagttggactgaggacaggtgtgggcgccagtgtgggtgcaggcgcaggtgcaggcacagggccactgtcctccaggcaggctttttggtgctaggccctgggactggaagtcgcccagcccgtatttatgtaaaggtatttatgggccactgcacatgcccgctgcagccctgggatcagctggaagctgcctgtcatctcctgcccaatccccagaaaccctgattcaggtctgcaggctcctgcgggctcaccaggctgctggctccggtaccatgtaaacctaggaaggtaaaggagcaggc

SEQ ID NO: 1978 - DNA, 1227 bp, Homo sapiens
aacccttgccgctgccgctgacatcgctaccatggtctccggcagcagcggcctcgccgccgcccgtctcctgtcgcgcagcttcctcctgccgcagaatggaattcggcattgttcctacacagcttctcggcaacatctctatgttgataaaaatacaaagattatttgccagggtttcactggcaaacagggcacctttcacagccagcaggcattggaatatggcaccaaactcgttggaggaacactcccagggaaaggaggccagacacatctgggcttacctgtctttaatactgtgaaggaggccaaagaacagacaggagcaacggcttctgtcatttatgttcctccgccttttgctgctgctgccattaatgaagctattgaggcagaaattcccttggttgtgtgtatcactgaaggaattccccagcaggacatggtacgagtcaagcacaaactgctgcgccaggaaaagacaaggctaattgggcccaactgccctggagtcatcaatcctggagaatgtaaaattgggatcatgcctggccatattcacaaaaaaggaaggattggcattgtgtccagatctggcaccctgacttatgaagcagttcaccaaacaacgcaagttggattggggcagtctttgtgcgttggcattggaggtgatccttttaatggaacagattttattgactgcctcgaaatctttttgaacgattctgccacagaaggcatcatattgattggtgaaattggtggtaatgcagaagagaatgctgcagaatttttgaagcaacataattcaggtccaaattccaagcctgtagtgtccttcattgctggtttaactgctcctcctgggagaagaatgggtcatgccggggcaattattgctggaggaaaaggtggagctaaagagaagatctctgcccttcagagtgcaggagttgtggtcagtatgtctcctgcacagctgggaaccacgatctacaaggaatttgaaaagaggaagatgctatgaaagaaaaaaaaaattcctaaaactgtggaatggatcacgtagacatgtaacccagcagcagtttgcttctgttgtccactgattaatcagcctatgtgcctgacactggtcttgcagtacaactggaagccaaaacaaggtggaagatgtcctgaattaagacgttttcaccacattgtattacagagacagcc

SEQ ID NO: 1979 - DNA, 1549 bp, Homo sapiens
aggcgcgcggcgggcaggcctgggagggggcgggtccgcgcgggcttcggaggagcccgccctgccagaggagagggaggtcacggcgtaaaggtgcagctgccgccaccgccgcttctgcaaggtctcagggacgggctgcagccatgtcctattgccggcaggaaggctttgcccaggatggttccttctggaatgtctattcccctccttccctccctgaagctctttgtcagggacaaaggtaggatccctccccttccgtcttctccactggatgcctgtgtcgtattcatctgtgaccaccaggtactaccacagagctggagctgaggaagggaaggatcgaatcatatttgtaaccaaagaagatcatgaaactccaagcagtgcagaattggtggctgatgaccccaacgatccatacgaggagcatggattgatactgccaaatggaaacattaactggaactgcccatgccttgggggaatggccagcggtccctgtggagaacagtttaagtcagccttttcctgcttccactatagcacggaggagatcaaggggtcagactgtgtagaccagttccgggccatgcaggaatgcatgcagaaatacccagacctctatccccaagaggatgaggatgaggaagaggaaagagagaagaagccagcagaacaagcagaagaaacagctcccattgaggccactgcaaccaaagaagaggagggatcaagttaatgaaggccacaaggcactgggcaccagtccttttggagtggaccttttgcaaaaggccttgtcatcaccttccaagaaagtttccttctgttgtcctgtgcattataatatacaaaataacttattttgatgatcagaggtcttgaggtcttgacatcttgacatatacactgaaaaaaatgggggttgtatgtatgtgtgtcctacccaaacctgtggccgccacttttgaattctcagattgccctgaattttgccacttttaaataatgtgctgaataagctcagcaactaaaaaccattacccaagaacgtttcttgtgagtgagctgatttattctgattcattatattccttttggtagattttataccccttggggaaataatacaacaaaaacatctcttaaaaatgctgggatggggccatatctactagcagaggccagatggtcagatatgatttctgcaaacccatcttgaccttgagtatgtgaaggggtactgtactttattcctgatacattttggtttccatgtaggtgttgagctcctggttttctgtgtttggatgatgaagatttggacccttccattcataatccctttctaagtgaagggagaggctggcttggctgttccttgttattccgaaagccctggtttggggcccatgttcacactggctctcagtctagtcaggtgcaatgttcttgagaggtggggacctaattattaccagagtagcagcaagagaggaaacgttgtgaattaagtattcaattaaaaggaaacatgatttct

SEQ ID NO: 1980 - DNA, 2496 bp, Homo sapiens
aaaggcccctcggtctaaggcttccctatttcctggttcgccggcggccattttgggtggaagcgatagctgagtggcggcggctgctgattgtgttctaggggacggagtaggggaagacgtttgctctcccggaacagcctatctcattcctttctttcgattacccgtggcgcggagagtcagggcggcggctgcggcagcaagggcggcggtggcggcggcggcagctgcagtgacatgtccagcatgaatcccgaatatgattatttattcaagttacttctgattggcgactcaggggttggaaagtcttgccttcttcttaggtttgcagatgatacatatacagaaagctacatcagcacaattggtgtggatttcaaaataagaactatagagttagacgggaaaacaatcaagcttcaaatatgggacacagcaggccaggaaagatttcgaacaatcacctccagttattacagaggagcccatggcatcatagttgtgtatgatgtgacagatcaggagtccttcaataatgttaaacagtggctgcaggaaatagatcgttatgccagtgaaaatgtcaacaaattgttggtagggaacaaatgtgatctgaccacaaagaaagtagtagactacacaacagcgaaggaatttgctgattcccttggaattccgtttttggaaaccagtgctaagaatgcaacgaatgtagaacagtctttcatgacgatggcagctgagattaaaaagcgaatgggtcccggagcaacagctggtggtgctgagaagtccaatgttaaaattcagagcactccagtcaagcagtcaggtggaggttgctgctaaaatttgcctccatccttttctcacagcaatgaatttgcaatctgaacccaagtgaaaaaacaaaattgcctgaattgtactgtatgtagctgcactacaacagattcttaccgtctccacaaaggtcagagattgtaaatggtcaatactgactttttttttattcccttgactcaagacagctaacttcattttcagaactgttttaaacctttgtgtgctggtttataaaataatgtgtgtaatccttgttgctttcctgataccagactgtttcccgtggttggttagaatatattttgttttgatgtttatattggcatgtttagatgtcaggtttagtcttctgaagatgaagttcagccattttgtatcaaacagcacaagcagtgtctgtcactttccatgcataaagtttagtgagatgttatatgtaagatctgatttgctagttcttccttgtagagttataaatggaaagattacactatctgattaatagtttcttcatactctgcatataatttgtggctgcagaatattgtaatttgttgcacactatgtaacaaaacaactgaagatatgtttaataaatattgtacttattggaagtaatatcaaactgtatggtgataagtattgttttgattcttatggttaaagggaaatagagccttgcattatattcaacacagccatttgtgtgtgcacaatgcaaactaaggtattctagacctatcttagagcagcatccagtatttgctttctagataatatgcccaataacatgacctagaggggcttctgtgctgtgtagggatttaaccaacttcagtggttcagggagctcaaactatatgtaaaacaagtttagaatgtatgctatctagcccgttatctctgatccttctctaaaaccatttgaaatagcttcattgatcaacatttcataaatgcatctgtggtagaggtagaaagcagcacctttcctaattggcaaatgatcagactaatgtgtgctaatgtttttcttccatgctttcagtcagattcaactattttatcctccacagttgcttaacttggtgttggaggagggtttaaacattaagataggaagcaggaaatttgattgctctaaatttagaaattatatccctaaaaattaaaacatgaatactgggtggtaatgataattgaggcaaatgtatttattttggtgacattttgcatatatgaagattttctgaaataggaccttcaagatcctagggggttttgtttggtttttaattgtgaggaataaaaaatcttctgcccacactggcattttaaggtgactgaggtcaaacgttgtttccttaggttgaaatagcagccaaaacattcttcacgcaggggcttgggatatggctgctggcaacacattttgttgtgggctccttaatttaatgataaaatttaagctaaacacaagccaaaaatgaataggtttttttaatttttatttttcactaaacaggcaattgaaatacatggtacaaaaataagtggtaagataattgtaaaatgaaatggacagaatattcaattttccatctatgaaaatttcacaataaaaatcatagtttactttgt

SEQ ID NO: 1981 - DNA, 1704 bp, Homo sapiens
gaggcgggggaggggccgtgagtgccgcagtcggccagccatggagcggagcttgctggcggcgaggccgcggcgacaaggtagccacccccgcagcatgcctcgaccgcggtccgcagctgcaccgcctctccccgccccccagggtgcgctggtcccggtcgcgcgctcagacctccgcatcccgggcgtggtcggttaagtccccggccgtgacccaggcccggggagctagtctccgcccttcgctcttacggatcccctcggagtacgccgcaccatgcagctcaggctcttccggcgcctccttctcgccgctttgctgctggtgatcgtctggaccctcttcgggccttcggggttgggggaggagctgctgagcctctcactagcctccctgctcccagcccccgcctcaccggggccgcccctggccctgccccgcctcttgatccccaaccaggaagcttgcagtggtcccggggcccctcccttcctgctcatcctggtgtgcacggctccggagaacctgaaccagagaaacgccattcgggcttcgtggggcgggctgcgcgaggcccgggggctcagggtacagacgctattcttgctgggagagccgaacgcacagcaccccgtgtggggttcccaggggagtgacctggcctcggagtcagcagcccagggggatatcttgcaggccgccttccaggactcctaccgcaacctcaccctaaagaccctcagcgggctgaactgggctgagaaacactgccccatggcccgatacgtcctcaagacggacgatgatgtgtatgtcaacgtccctgaactggtatcagagctggtcttgcgagggggccgttgggggcaatgggagagaagcacggaaccccagagagaggctgagcaggaaggaggccaggttttgcacagcgaggaagtgcctcttctgtacttgggccgggtgcactggcgcgtgaacccctctcggacaccggggggcaggcaccgcgtatcagaggagcagtggcctcacacctggggcccctttccaccctatgcctcaggcacggggtatgtgctgtcagcgtctgctgtgcagctcattctcaaggtggccagccgggcaccccttctcccattagaggatgtctttgtgggggtaagtgcccgacgaggaggcctcgccccaacacagtgtgtcaagctggctggtgccacccactacccgctagaccggtgctgctatgggaaattcctgctgacgtcccacaggctggacccctggaagatgcaggaagcctggaagctggtgggtggctctgacggggaaaggactgcgcccttttgctcctggttccagggagtcctgggcatcctgcggtgtcgagcaatagcctggcttcagagctgagagtgcctggggccacaggaaaggcaggaacaggaccttctctctcccaggcccaacgcaggggccctcactggctgcagctgatctgtttccttataccagatcctcagtctcactaaagacagcgatatgggagacacccaggggcctggcccgccagcccaaaagatggtcatcgggaagagaaaaagaaaaaaatgctgcagttgttctctcaagctagggcagaagaggggtgtcaagctcctcaataaacttgtctccacttcaaaaaaaaaaaaaaaaaa

SEQ ID NO: 1982 - DNA, 2840 bp, Homo sapiens
gagtacgctacacccggaagtgtcttcagggagaggaagccggcggcctcactgctatgggccgcaacaagaagaagaagcgagatggtgacgaccggcggccgaggctcgttcttagcttcgacgaggagaagaggcgggagtacctgacaggcttccacaagcggaaggtcgagcgaaagaaggcagccattgaggagattaagcagcggctgaaagaggagcagaggaagcttcgggaggagcgccaccaggaatacttgaagatgctggcagagagagaagaggctctggaggaggcagatgagctggaccggttggtgacagcaaagacggagtcggtgcagtatgaccaccccaaccacacagtcaccgtgaccaccatcagtgacctggacctctcgggggcccggctgctcgggctgaccccacctgagggaggggctggagacaggtctgaggaggaggcgtcatccacggagaaaccaaccaaagccttgcccaggaagtccagagaccccctgctctctcagcggatctcctccctcacagcatcactacatgcacacagccgcaaaaaggtcaagaggaaacatccccgacgggcccaggactccaaaaagcccccaagggcccctcgtaccagcaaggcccagcgccgccgtctcacaggcaaagcacggcacagcggggagtgagaccgagaacgaagcggtgccccagtctaggctgcggggacctgtccttgctcagcttggctgtccctgtagcccagcctgcacctaggtaatgactgcacagctcaaggttgggaagccaggacctctctggcctggggccagctgcctttgcctggggtcagctgcctttgcctggggtttgaattcccgaaggagcaggcagctgagagcaggcctcccccaggaagagccttcagagccacgtgggggcatcttcccaaatgtgcaccccacctggcactcatcagatttgtgcgcttgtgatttgtttgtccttgataccacgcacaagggcaggtttttggggtggtggaaatggccagggcccatgggtctgtctccagcagttagccctgtggctgcaataaagtacagttctccctgtgttaagatcctaaccagggttaaggatcagtgtgtccgttgctagaatccagagcccacctgctgctctgaaaagcaggctcctgaggccagtgggggagcagtgccccccatgcccttcaccgaggagcctctgtgcctgtcccttgtcctcggccccaggagtctcctcaactgacactgaagtggtggaagcagttgagtgccaggtcatcccccatcaccacactggggcagcgtccccaggcttccagcagctcccaggtgggtcccaacgtggaaggattaattaattctttctaaagcagttgcagccgggcttggtggctcacgcctgtaatcccagcactttgggaggcccaggcgggcagatcacttaaggtcgggagctcgagaccagcctggccaacatggtgaaaccctgtctctactaaaaatgcaaaaattagccaggtgtggtggcacacgcgtgtaatcccagctacttgggaggctgaggtggaagaatcacttgaaccctggaggcggaggctgcagtgagccgagatcacgccattgcactccagcctgggcaacgttgtgaccttgtctcaaaaaaaaactaaaaaataaagcagttgcatcttgactcgtacaaaagtagcccccaccagagtagaccctgcgggtgccagctagaactccacaaggggccatgtcttcacactccttccagatggatgagttgatggaaaccctgtcccttccttgtcccagcttgtcagtcctgggcaggagagaatttcaggttgtgccttggttagaggagctgtgttgggtcctaaacactaggaccacaaaggggagtgaactgtgttcccagggcttgctgacgcccgtggactatggagtcaggatgacaggacagtgcggtgaggggcatctgcgacaggactgcgggctctacccgccctgatgtgggagctcctggagtgggggtgagcagtgagccagggtctgcagggctgtcctctctccacagccaacagccaggccttacagtggggcaggcttagtgactgtgcctcagttatgctgtacctgggagtgggcaggccctctcccatgtcaccatcaaaacccactgatgaaggctggtgggagtctgagggctgcacccgggtatggtgagttcccctcagggattgtgctgagcgccttggcctggcttcttggctccgcccacctgctctccctgccaccaagttgtcttccccgggtggcatgtgccacttggctgcctcgtgcctgggcacagtggtgcctattatgggccctccaggtggctctggtgctcagcctgctgtgagcaggaacagctgagtcccaggggttcttgcacacagcagggctcgggtttgaatccaggctctgctgcttggtcgctgcatgagcttctgctgtgctgacctctctggtttgtctcgtcatgtgtaaggtgacaccagatacctacctcttagggctgccccgagactaaaataagaccatgtgcatgaaccacttaccaaagtgcctgttgctctccaggtgtgcctaccgcatgttgccgctgctgtttctgctgggacgtctgactccagttccttctcccctctccagtgacaaggtcatttacaacttacatttacaatttatagtgtttaccagtattaaattctcagccactcctttcca

SEQ ID NO: 1983 - DNA, 2266 bp, Homo sapiens
atccggcctcgcacttccggtggggagattccggcctggagctcccagggccgagcagaccttgggacctgtgagcgctgcatccaattaaccatgggaagggtcagcaccagccaccagccccttaggtgaggactctgcctggggctctgctgatggttccgaatcatggagctgcagagagctcctccagcctggagacgttcttggtgaaagctgtggtctaactccaccggctcttcctgcacattgtattcaagaggggtgcctgcccccgctgactcaggagctccggtgctgcagccgccacgaatggggaggtgggccctcgatgtggcctttttgtggaaggcggtgttgaccctggggctggtgcttctctactactgcttctccatcggcatcaccttctacaacaagtggctgacaaagagcttccatttccccctcttcatgacgatgctgcacctggccgtgatcttcctcttctccgccctgtccagggcgctggttcagtgctccagccacagggcccgtgtggtgctgagctgggccgactacctcagaagagtggctcccacagctctggcgacggcgcttgacgtgggcttgtccaactggagcttcctgtatgtcaccgtctcgctgtacacaatgaccaaatcctcagctgtcctcttcatcttgatcttctctctgatcttcaagctggaggagctgcgcgcggcactggtcctggtggtcctcctcatcgccgggggtctcttcatgttcacctacaagtccacacagttcaacgtggagggcttcgccttggtgctgggggcctcgttcatcggtggcattcgctggaccctcacccagatgctcctgcagaaggctgaactcggcctccagaatcccatcgacaccatgttccacctgcagccactcatgttcctggggctcttccctctctttgctgtatttgaaggtctccatttgtccacatctgagaaaatcttccgtttccaggacacagggctgctcctgcgggtacttgggagcctcttccttggcgggattctcgcctttggtttgggcttctctgagttcctcctggtctccagaacctccagcctcactctctccattgccggcatttttaaggaagtctgcactttgctgttggcagctcatctgctgggcgatcagatcagcctcctgaactggctgggcttcgccctctgcctctcgggaatatccctccacgttgccctcaaagccctgcattccagaggtgatggtggccccaaggccttgaaggggctgggctccagccccgacctggagctgctgctccggagcagccagcgggaggaaggtgacaatgaggaggaggagtactttgtggcccaggggcagcagtgaccagccagggcaaatggcttagaagcaggccactccccagcctgctgccagcactcactgtgctcaagccgccagggctcatcatggtagctgggagctgtggacgggagtcaccaggtggtggggccaagccagggactcatgacttttgcccctcccttcagagcctggtcacacaaggggcgagcaccaggccagcctgggactggccagagctgggcccaagctgcgctggaatcgcagcaggagaggggagtgggctggttcttcccaccacttcccaggctctgacagccgagactcatttccaaggcacagcagctttctaaagggactgagtttggactgggttttggacctccaggggctggagcttcatcacctgggcagtgtcttttctcagagagcaggtttctttatagtttggaaataaatggttcacggtccactggccgccttgtgttgctggagacgtgggggcagggaggggacagtgtgggcctggcctctcctttcctttccctgcctggagccttcttcaaatgtctggtcttaagccaggcctccttcattttctcgctcctgttagaacaccagtcccctccccagtggggccccactgcacctgctggcaggaaataaatgaatgtttactgagtactgcattctggagaccttacatgttttcacagcctagtttgaatactggctttgtcactagctgtgtgaccctaagcaaatgacctaacctgtctgtgccgtagttttttaatctgtgaaatggggataatgtctatctcagagtccttttgaagattgagtcattattagtaacagattaaatgttatataagca

SEQ ID NO: 1984 - DNA, 2203 bp, Homo sapiens
atccggcctcgcacttccggtggggagattccggcctggagctcccagggccgagcagaccttgggacctgtgagcgctgcatccaattaaccatgggaagggtcagcaccagccaccagccccttaggtgaggactctgcctggggctctgctgatggttccgaatcatggagctgcagagagctcctccagcctggagacgttcttggtgaaagctgtggtctaactccaccggctcttcctgcacattgtattcaagaggggtgcctgcccccgctgactcaggagctccggtgctgcagccgccacgaatggggaggtgggccctcgatgtggcctttttgtggaaggcggtgttgaccctggggctggtgcttctctactactgcttctccatcggcatcaccttctacaacaagtggctgacaaagagcttccatttccccctcttcatgacgatgctgcacctggccgtgatcttcctcttctccgccctgtccagggcgctggttcagtgctccagccacagggcccgtgtggtgctgagctgggccgactacctcagaagagtggctcccacagctctggcgacggcgcttgacgtgggcttgtccaactggagcttcctgtatgtcaccgtctcgctgtacacaatgaccaaatcctcagctgtcctcttcatcttgatcttctctctgatcttcaagctggaggagctgtccacacagttcaacgtggagggcttcgccttggtgctgggggcctcgttcatcggtggcattcgctggaccctcacccagatgctcctgcagaaggctgaactcggcctccagaatcccatcgacaccatgttccacctgcagccactcatgttcctggggctcttccctctctttgctgtatttgaaggtctccatttgtccacatctgagaaaatcttccgtttccaggacacagggctgctcctgcgggtacttgggagcctcttccttggcgggattctcgcctttggtttgggcttctctgagttcctcctggtctccagaacctccagcctcactctctccattgccggcatttttaaggaagtctgcactttgctgttggcagctcatctgctgggcgatcagatcagcctcctgaactggctgggcttcgccctctgcctctcgggaatatccctccacgttgccctcaaagccctgcattccagaggtgatggtggccccaaggccttgaaggggctgggctccagccccgacctggagctgctgctccggagcagccagcgggaggaaggtgacaatgaggaggaggagtactttgtggcccaggggcagcagtgaccagccagggcaaatggcttagaagcaggccactccccagcctgctgccagcactcactgtgctcaagccgccagggctcatcatggtagctgggagctgtggacgggagtcaccaggtggtggggccaagccagggactcatgacttttgcccctcccttcagagcctggtcacacaaggggcgagcaccaggccagcctgggactggccagagctgggcccaagctgcgctggaatcgcagcaggagaggggagtgggctggttcttcccaccacttcccaggctctgacagccgagactcatttccaaggcacagcagctttctaaagggactgagtttggactgggttttggacctccaggggctggagcttcatcacctgggcagtgtcttttctcagagagcaggtttctttatagtttggaaataaatggttcacggtccactggccgccttgtgttgctggagacgtgggggcagggaggggacagtgtgggcctggcctctcctttcctttccctgcctggagccttcttcaaatgtctggtcttaagccaggcctccttcattttctcgctcctgttagaacaccagtcccctccccagtggggccccactgcacctgctggcaggaaataaatgaatgtttactgagtactgcattctggagaccttacatgttttcacagcctagtttgaatactggctttgtcactagctgtgtgaccctaagcaaatgacctaacctgtctgtgccgtagttttttaatctgtgaaatggggataatgtctatctcagagtccttttgaagattgagtcattattagtaacagattaaatgttatataagca

SEQ ID NO: 1985 - DNA, 2461 bp, Homo sapiens
atccggcctcgcacttccggtggggagattccggcctggagctcccagggccgaggtcactttggtggcagttcatggagaatagcttgaggtgacaagacagcagacacgacgtgggtctctgggactgcctgtgccgttgtgggcagcccctccagagccctgagtcacgcagccttcagaggcacccatggctacgagaagcacagtctctgcctgaggctccagagcggccctttttccccagcagcagaccttgggacctgtgagcgctgcatccaattaaccatgggaagggtcagcaccagccaccagccccttaggtgaggactctgcctggggctctgctgatggttccgaatcatggagctgcagagagctcctccagcctggagacgttcttggtgaaagctgtggtctaactccaccggctcttcctgcacattgtattcaagaggggtgcctgcccccgctgactcaggagctccggtgctgcagccgccacgaatggggaggtgggccctcgatgtggcctttttgtggaaggcggtgttgaccctggggctggtgcttctctactactgcttctccatcggcatcaccttctacaacaagtggctgacaaagagcttccatttccccctcttcatgacgatgctgcacctggccgtgatcttcctcttctccgccctgtccagggcgctggttcagtgctccagccacagggcccgtgtggtgctgagctgggccgactacctcagaagagtggctcccacagctctggcgacggcgcttgacgtgggcttgtccaactggagcttcctgtatgtcaccgtctcgctgtacacaatgaccaaatcctcagctgtcctcttcatcttgatcttctctctgatcttcaagctggaggagctgcgcgcggcactggtcctggtggtcctcctcatcgccgggggtctcttcatgttcacctacaagtccacacagttcaacgtggagggcttcgccttggtgctgggggcctcgttcatcggtggcattcgctggaccctcacccagatgctcctgcagaaggctgaactcggcctccagaatcccatcgacaccatgttccacctgcagccactcatgttcctggggctcttccctctctttgctgtatttgaaggtctccatttgtccacatctgagaaaatcttccgtttccaggacacagggctgctcctgcgggtacttgggagcctcttccttggcgggattctcgcctttggtttgggcttctctgagttcctcctggtctccagaacctccagcctcactctctccattgccggcatttttaaggaagtctgcactttgctgttggcagctcatctgctgggcgatcagatcagcctcctgaactggctgggcttcgccctctgcctctcgggaatatccctccacgttgccctcaaagccctgcattccagaggtgatggtggccccaaggccttgaaggggctgggctccagccccgacctggagctgctgctccggagcagccagcgggaggaaggtgacaatgaggaggaggagtactttgtggcccaggggcagcagtgaccagccagggcaaatggcttagaagcaggccactccccagcctgctgccagcactcactgtgctcaagccgccagggctcatcatggtagctgggagctgtggacgggagtcaccaggtggtggggccaagccagggactcatgacttttgcccctcccttcagagcctggtcacacaaggggcgagcaccaggccagcctgggactggccagagctgggcccaagctgcgctggaatcgcagcaggagaggggagtgggctggttcttcccaccacttcccaggctctgacagccgagactcatttccaaggcacagcagctttctaaagggactgagtttggactgggttttggacctccaggggctggagcttcatcacctgggcagtgtcttttctcagagagcaggtttctttatagtttggaaataaatggttcacggtccactggccgccttgtgttgctggagacgtgggggcagggaggggacagtgtgggcctggcctctcctttcctttccctgcctggagccttcttcaaatgtctggtcttaagccaggcctccttcattttctcgctcctgttagaacaccagtcccctccccagtggggccccactgcacctgctggcaggaaataaatgaatgtttactgagtactgcattctggagaccttacatgttttcacagcctagtttgaatactggctttgtcactagctgtgtgaccctaagcaaatgacctaacctgtctgtgccgtagttttttaatctgtgaaatggggataatgtctatctcagagtccttttgaagattgagtcattattagtaacagattaaatgttatataagca

SEQ ID NO: 1986 - DNA, 963 bp, Homo sapiens
ctcagcttgcgccgccgccgccgccgccgccgccgcgcacgccatgggagccgtgactgacgacgaagttatacggaagcgtctcctcattgatggagatggtgctggaggtgatcggagaattaatctgctagtgaagagtttcattaaatggtgcaactctgggtcccaggaggagggatatagccagtaccaacgtatgctgagcacgctgtctcaatgtgaattttcaatgggcaaaactttactagtatatgatatgaatctcagagaaatggaaaattatgaaaaaatttacaaggaaatagaatgtagcatagctggagcacatgaaaaaattgctgagtgcaaaaagcaaattcttcaagcaaaacgaatacgaaaaaatcgccaagaatatgatgctttggcaaaagtgattcagcaccatccagacaggcatgagacattaaaggaactagaggctctgggaaaagaattagagcatctttcacacattaaagaaagtgttgaagataagctggaattgagacggaaacagtttcatgttcttcttagtaccatccatgaacttcagcaaacattggaaaatgatgaaaaactctcagaggtagaagaagctcaggaagcaagcatggaatcagatcctaagccatagacaggctaattgcccaccactcccaggaatattgaaatagctacatgaccataatgtgtttaaaatgtggtatgctcttgagatatttaaagttttggcagtaaaatactctgtttttaagtatgaatgtatttcattcatatttcctctcacaaaggaaaatgacttcagtatagatttgtttttattaaaatgcattttttattcttaagtggtaggaagcaacatccaaaaatgcttaataaaatgcttttaagctgcaaaaaaaaaaaaaaaaaaaaaaaaaaaaaaaaaaaaaaaaaaaa

SEQ ID NO: 1987 - DNA, 1047 bp, Homo sapiens
atggcctccttggaagtcagtcgtagtcctcgcaggtctcggcgggagctggaagtgcgcagtccacgacagaacaaatattcggtgcttttacctacctacaacgagcgcgagaacctgccgctcatcgtgtggctgctggtgaaaagcttctccgagagtggaatcaactatgaaattataatcatagatgatggaagcccagatggaacaagggatgttgctgaacagttggagaagatctatgggtcagacagaattcttctaagaccacgagagaaaaagttgggactaggaactgcatatattcatggaatgaaacatgccacaggaaactacatcattattatggatgctgatctctcacaccatccaaaatttattcctgaatttattaggaagcaaaaggagggtaattttgatattgtctctggaactcgctacaaaggaaatggaggtgtatatggctgggatttgaaaagaaaaataatcagccgtggggccaattttttaactcagatcttgctgagaccaggagcatctgatttaacaggaagtttcagattataccgaaaagaagttctagagaaattaatagaaaaatgtgtttctaaaggctacgtcttccagatggagatgattgttcgggcaagacagttgaattatactattggcgaggttccaatatcatttgtggatcgtgtttatggtgaatccaagttgggaggaaatgaaatagtatctttcttgaaaggattattgactctttttgctactacataaaagaaagatactcatttatagttacgttcatttcaggttaaacatgaaagaagcctggttactgatttgtataaaatgtactcttaaagtataaaatataaggtaaggtaaatttcatgcatctttttatgaagaccacctattttatatttcaaattaaataattttaaagttgctggcctaatgagcaatgttctcaattttcgttttcattttgctgtattgagacctataaataaatgtatatttttttttgcataaagt

SEQ ID NO: 1988 - DNA, 4442 bp, Homo sapiens
aagggcgctccgcgagcccgtctctcctcgaatgaaaggaaacaacctccggcgacagagccccgctctcaggcactgctggagaaccgagaccgacttctttctctttaccctcattggcgcttctctcctgcagtccgcctctgggccctgccgcatttcttgagacttaaagtggcattctaaaggcaatttaaaaatcatgtcaagctcagttgaacagaaaaaagggcctacaagacagcgcaaatgtggcttttgtaagtcaaatagagacaaggaatgtggacagttactaatatctgaaaaccagaaggtggcagcgcaccataagtgcatgctcttttcatctgctttggtatcatcacactctgataatgaaagtcttggtggattttctattgaagatgtccaaaaggaaattaaaagaggcacgaagctgatgtgttctttgtgccattgtcctggagcaacaattggttgtgatgtgaaaacatgtcacaggacataccactaccactgtgcattgcatgataaagctcaaatacgagagaaaccttcacaaggaatttacatggtctattgccgaaaacacaagaaaactgcacataactccgaagctgatttagaagaaagttttaatgaacatgaactggagccctcatcacctaaaagtaaaaagaaaagtcgcaaaggaaggccaagaaaaactaattttaaagggctgtcagaagataccaggtccacatcctcccatggaacagatgaaatggaaagtagttcctatagagataggtctccacacagaagcagccctagtgacaccaggcctaaatgtggattttgccatgtaggggaggaagaaaatgaagcacgaggaaaactgcatatatttaatgccaagaaggcagctgcccattataagtgcatgttgttttcttctggcacagtccagctcacaacaacatcaagagcagaatttggagactttgatattaaaactgtacttcaggagattaaacgaggaaaaagaatgaaatgtacactttgcagtcagcctggtgctactattggatgtgaaataaaagcctgtgttaagacttaccattaccactgtggagtacaagacaaagctaaatacattgaaaatatgtcacgaggaatttacaaactatactgtaaaaatcatagtggaaatgatgagagagatgaagaagatgaggaacgagagagtaaaagccgaggaaaagtagaaattgatcagcaacaactaactcagcagcaacttaatggaaactaggttcatgggacagagttagaaaactgggaatgaataagacatccataactactattcttttttcactgttttctaaaatcaaaaagggtttgtaactttttactgcccaactcttagatccttcattgaactgcctaaaaatgtcttgtttgttttatgagccctcactagaaggctgagtttgacatgttgatattacgtagctatagtttgcagtttctgggaagcaattgaaacactattaaccctgtgtatagtgtcaacagttaaagcagacgaaacgaagtaagctatatttctggactgaacaaagctctgctgtttagagcatttaagtttgtttagtggatccatactcaaaggaaagcataagcaaattttcctttacaatgcaaacatgccactggtggcagcacatggtaatttgtggatttttttttcatactcaagtaatggaggctagaaatgaagagaaccttctttttctcttgactttgacagcacatgctaaaaatctcttccaagaagtatgctaaagcttttcatttggttcctgttaaagttgttctcactgaccagcatggactcaggcaactggtaatgataagctatgagctccagtgcttttgccaaaattctcttgacagcacacctcctctctttccatgttatacaaaggacttctggcaaaatgattgagtccttcaagtttaaactaacatttggcaacagcaaattaaacgtttttaagatgtaaagaaagggttaccgcttgctaaggacttcagacaccatgtccgaaacctgttcctctcaagtgccctgttgtgtggaacacttcacatattggcgcacagtacgtaaggaggtctcatgtgctgtaggagtaaaaaagtctttgcataaaacagtatttatttttacttttgtgaccactattttagaaactttatttaatattttaatgttttcagtcattgctttggttatctataaaataggcttttgtgccctacttttcttcttgtagggcttggtggtgttttatcgattgtcagaattgtttttgaaagcctaagaacccagctttttagaaaggattttcacactggcatttctaggtagtgatattttcttccacttacctgctgaagcacatttatgcatttctttatggcaaaaccaaataactttagttgtggtctgcctgatactaccatagcacctcagtaccaaggggagggattttgactagttgaattattaagccaccacaataaagcagatttttaaataagaaataataatgttaacttgactgtacattgagatattctgcagctgatagagcagcattttaaaaatgtaacaggtggaaaattacactgtgcttaatgactgatttttttttaaactgcgagtcccttaagatcacgtttgtcaagtgtgtattcacacatttacttaaatcaagggactcaatgcttgcttttattttaaccatcttttactatttttagaaggaaactagctttagtagtgggttgccctgtatgttttctctttttgctcttaatatgccattgggtttttgtgtgtatgtgattttcaaaattcatgacttgaagtgcaaggacagatctagatgtttgtttaccaagctatgtgacttctcccaaaggatctgtactttctttccttacaacagcttgaaaatcattattttaaaatccttaaatcactgtgtctagatcattttttacattgtgtgccatagacttacccatgggacaacagagctccttcatttttggacaactactgtaatcattttttttttaggaaaaatggaaggtgccgggggtaatcatggccagtcaataattatataaaggagttcaaatactatagctgtcagttgatgaatttgttatgtagtaaaatgtatgactttgtatgggtttcttcagccctttttctgccactagcaaccagaatagcactttaccttttggttggctagataagtggctgactacctgtttttctcactgtggtgtgattggctaaacaatctcgcattaaaaattcaaatgtaaattgaattcacatgaaaaatcatgtttggttgtaaacctccaatgttttgattctctaatcatgttttcgtcacatgctgagtaaaagtgccttacaatgtaaaaattgtacagtacttatgttcccaagtagcatcatcatcttctgggtagtaattacattgtggtattaatatttagaaaaatggacctcagcagtgtatttactgtacatctcttaagtccttaactgtagttttaataagcatgacattatttgataagtatataacatttacatcatttcaaaaaatactgccgttactgtcttttatgcatattttagcctgaaattttgaagcgtcttttttctttcttttttctttttttgttttgttttttgttattgatattaaacagtgtaatctttgcaagcgtatattgaagattattctggagcatttattgccttaccagaaatgttagtaggaaatgttctttagagtagaaagatagacttgagtttctatacttttaagaagagctctttgttcctgggggaggggggcagggggtgaattttactttcatctcaagttattaaaaacccacaactgaagtaaattttatttcaagaatcagcagttttagaatttcagatagtacttgctcagaagtacatgctactcaagatattaagagataacaagatctgtagatctgctattgaatcagaatctgtgtacttgaacaaatgtgtgaatctcaaatatctcaaagcaaaagaaaaagtgttctagagtgttgttgcttttttaaaaaaagcgctgaagttagaccaaggtatacagttttgttctaacagacatttaggttaattgtaaagataaggaatgcattatgggtcaaaaatcaaacattcctctcatgttatgtatattttgttcctgttatattggctttattttcaaaattgtagtttgtagtattagtttccttttattggtattcttgcatatactattcattcaataaatgacttatgactttcataaaaaaaaaaa

SEQ ID NO: 1989 - DNA, 1236 bp, Homo sapiens
aagggcgctccgcgagcccgtctctcctcgaatgaaaggaaacaacctccggcgacagagccccgctctcaggcactgctggagaaccgagaccgacttctttctctttaccctcattggcgcttctctcctgcagtccgcctctgggccctgccgcatttcttgagacttaaagtggcattctaaaggcaatttaaaaatcatgtcaagctcagttgaacagaaaaaagggcctacaagacagcgcaaatgtggcttttgtaagtcaaatagagacaaggaatgtggacagttactaatatctgaaaaccagaaggtggcagcgcaccataagtgcatgctcttttcatctgctttggtatcatcacactctgataatgaaagtcttggtggattttctattgaagatgtccaaaaggaaattaaaagaggcacgaagctgatgtgttctttgtgccattgtcctggagcaacaattggttgtgatgtgaaaacatgtcacaggacataccactaccactgtgcattgcatgataaagctcaaatacgagagaaaccttcacaaggaatttacatggtctattgccgaaaacacaagaaaactgcacataactccgaagcagctgatttagaagaaagttttaatgaacatgaactggagccctcatcacctaaaagtaaaaagaaaagtcgcaaaggaaggccaagaaaaactaattttaaagggctgtcagaagataccaggtccacatcctcccatggaacagatgaaatggaaagtagttcctatagagataggtctccacacagaagcagccctagtgacaccaggcctaaatgtggattttgccatgtaggggaggaagaaaatgaagcacgaggaaaactgcatatatttaatgccaagaaggcagctgcccattataagtgcatgttgttttcttctggcacagtccagctcacaacaacatcaagagcagaatttggagactttgatattaaaactgtacttcaggagattaaacgaggaaaaagaatggtctgtagtttttatatttgttatgcaacattacacttgatttgctgctttaaatttagagtacatcccaaatttatccagtcatcagaaaatttaaagtagttcgtatgttaaagcaaagtatatatttgacttatttgtaatataataaaggatgctgatgttacggaaaaaaaaaaaaaaaaaaaaaaaaaaaa

SEQ ID NO: 1990 - DNA, 4772 bp, Homo sapiens
aagggcgctccgcgagcccgtctctcctcgaatgaaaggaaacaacctccggcgacagagccccgctctcaggcactgctggagaaccgagaccgacttctttctctttaccctcattggcgcttctctcctgcagtccgcctctgggccctgccgcatttcttgagacttaaagtggcattctaaaggcaatttaaaaatcatgtcaagctcagttgaacagaaaaaagggcctacaagacagcgcaaatgtggcttttgtaagtcaaatagagacaaggaatgtggacagttactaatatctgaaaaccagaaggtggcagcgcaccataagtgcatgctcttttcatctgctttggtatcatcacactctgataatgaaagtcttggtggattttctattgaagatgtccaaaaggaaattaaaagaggcacgaagctgatgtgttctttgtgccattgtcctggagcaacaattggttgtgatgtgaaaacatgtcacaggacataccactaccactgtgcattgcatgataaagctcaaatacgagagaaaccttcacaaggaatttacatggtctattgccgaaaacacaagaaaactgcacataactccgaagctgatttagaagaaagttttaatgaacatgaactggagccctcatcacctaaaagtaaaaagaaaagtcgcaaaggaaggccaagaaaaactaattttaaagggctgtcagaagataccaggtccacatcctcccatggaacagatgaaatggaaagtagttcctatagagataggtctccacacagaagcagccctagtgacaccaggcctaaatgtggattttgccatgtaggggaggaagaaaatgaagcacgaggaaaactgcatatatttaatgccaagaaggcagctgcccattataagtgcatgttgttttcttctggcacagtccagctcacaacaacatcaagagcagaatttggagactttgatattaaaactgtacttcaggagattaaacgaggaaaaagaatgaaatgtacactttgcagtcagcctggtgctactattggatgtgaaataaaagcctgtgttaagacttaccattaccactgtggagtacaagacaaagctaaatacattgaaaatatgtcacgaggaatttacaaactatactgtaaaaatcatagtggaaatgatgagagagatgaagaagatgaggaacgagagagtaaaagccgaggaaaagtagaaattgatcagcaacaactaactcagcagcaacttaatggaaactaggtatgaaagttaattatatgggatctgttgtcaggatacaatacacactgatatatacatgttgaagtaatggtatgcagtaagattttttttaatcctattatgtttagttaagagcatgttactaaaatgctgaggattttgtaggcttgcatagtagttgttttttaactagctgattttgtaaccataaaaacaagctatctgctttatcaataagtgtagttgtaatgtcaaatcaataagatattcacactcctcaataacattatattgattgtgttcccctcaagcatcatattttacatttttttatcatcttttaaacaggttcatgggacagagttagaaaactgggaatgaataagacatccataactactattcttttttcactgttttctaaaatcaaaaagggtttgtaactttttactgcccaactcttagatccttcattgaactgcctaaaaatgtcttgtttgttttatgagccctcactagaaggctgagtttgacatgttgatattacgtagctatagtttgcagtttctgggaagcaattgaaacactattaaccctgtgtatagtgtcaacagttaaagcagacgaaacgaagtaagctatatttctggactgaacaaagctctgctgtttagagcatttaagtttgtttagtggatccatactcaaaggaaagcataagcaaattttcctttacaatgcaaacatgccactggtggcagcacatggtaatttgtggatttttttttcatactcaagtaatggaggctagaaatgaagagaaccttctttttctcttgactttgacagcacatgctaaaaatctcttccaagaagtatgctaaagcttttcatttggttcctgttaaagttgttctcactgaccagcatggactcaggcaactggtaatgataagctatgagctccagtgcttttgccaaaattctcttgacagcacacctcctctctttccatgttatacaaaggacttctggcaaaatgattgagtccttcaagtttaaactaacatttggcaacagcaaattaaacgtttttaagatgtaaagaaagggttaccgcttgctaaggacttcagacaccatgtccgaaacctgttcctctcaagtgccctgttgtgtggaacacttcacatattggcgcacagtacgtaaggaggtctcatgtgctgtaggagtaaaaaagtctttgcataaaacagtatttatttttacttttgtgaccactattttagaaactttatttaatattttaatgttttcagtcattgctttggttatctataaaataggcttttgtgccctacttttcttcttgtagggcttggtggtgttttatcgattgtcagaattgtttttgaaagcctaagaacccagctttttagaaaggattttcacactggcatttctaggtagtgatattttcttccacttacctgctgaagcacatttatgcatttctttatggcaaaaccaaataactttagttgtggtctgcctgatactaccatagcacctcagtaccaaggggagggattttgactagttgaattattaagccaccacaataaagcagatttttaaataagaaataataatgttaacttgactgtacattgagatattctgcagctgatagagcagcattttaaaaatgtaacaggtggaaaattacactgtgcttaatgactgatttttttttaaactgcgagtcccttaagatcacgtttgtcaagtgtgtattcacacatttacttaaatcaagggactcaatgcttgcttttattttaaccatcttttactatttttagaaggaaactagctttagtagtgggttgccctgtatgttttctctttttgctcttaatatgccattgggtttttgtgtgtatgtgattttcaaaattcatgacttgaagtgcaaggacagatctagatgtttgtttaccaagctatgtgacttctcccaaaggatctgtactttctttccttacaacagcttgaaaatcattattttaaaatccttaaatcactgtgtctagatcattttttacattgtgtgccatagacttacccatgggacaacagagctccttcatttttggacaactactgtaatcattttttttttaggaaaaatggaaggtgccgggggtaatcatggccagtcaataattatataaaggagttcaaatactatagctgtcagttgatgaatttgttatgtagtaaaatgtatgactttgtatgggtttcttcagccctttttctgccactagcaaccagaatagcactttaccttttggttggctagataagtggctgactacctgtttttctcactgtggtgtgattggctaaacaatctcgcattaaaaattcaaatgtaaattgaattcacatgaaaaatcatgtttggttgtaaacctccaatgttttgattctctaatcatgttttcgtcacatgctgagtaaaagtgccttacaatgtaaaaattgtacagtacttatgttcccaagtagcatcatcatcttctgggtagtaattacattgtggtattaatatttagaaaaatggacctcagcagtgtatttactgtacatctcttaagtccttaactgtagttttaataagcatgacattatttgataagtatataacatttacatcatttcaaaaaatactgccgttactgtcttttatgcatattttagcctgaaattttgaagcgtcttttttctttcttttttctttttttgttttgttttttgttattgatattaaacagtgtaatctttgcaagcgtatattgaagattattctggagcatttattgccttaccagaaatgttagtaggaaatgttctttagagtagaaagatagacttgagtttctatacttttaagaagagctctttgttcctgggggaggggggcagggggtgaattttactttcatctcaagttattaaaaacccacaactgaagtaaattttatttcaagaatcagcagttttagaatttcagatagtacttgctcagaagtacatgctactcaagatattaagagataacaagatctgtagatctgctattgaatcagaatctgtgtacttgaacaaatgtgtgaatctcaaatatctcaaagcaaaagaaaaagtgttctagagtgttgttgcttttttaaaaaaagcgctgaagttagaccaaggtatacagttttgttctaacagacatttaggttaattgtaaagataaggaatgcattatgggtcaaaaatcaaacattcctctcatgttatgtatattttgttcctgttatattggctttattttcaaaattgtagtttgtagtattagtttccttttattggtattcttgcatatactattcattcaataaatgacttatgactttcataaaaaaaaaaa

SEQ ID NO: 1991 - DNA, 875 bp, Homo sapiens
ggcgcggcgggtgcggttcagtcggtcggcggcggcagcggaggaggaggaggaggaggaggatgaggaggatgaggaggatgtgggccacgcaggggctggcggtggcgctggctctgagcgtgctgccgggcagccgggcgctgcggccgggcgactgcgaagtttgtatttcttatctgggaagattttaccaggacctcaaagacagagatgtcacattctcaccagccactattgaaaacgaacttataaagttctgccgggaagcaagaggcaaagagaatcggttgtgctactatatcggggccacagatgatgcagccaccaaaatcatcaatgaggtatcaaagcctctggcccaccacatccctgtggagaagatctgtgagaagcttaagaagaaggacagccagatatgtgagcttaagtatgacaagcagatcgacctgagcacagtggacctgaagaagctccgagttaaagagctgaagaagattctggatgactggggggagacatgcaaaggctgtgcagaaaagtctgactacatccggaagataaatgaactgatgcctaaatatgcccccaaggcagccagtgcacggaccgatttgtagtctgctcaatctctgttgcacctgagggggaaaaaacagttcaactgcttactcccaaaacagcctttttgtaatttattttttaagtgggctcctgacaatactgtatcagatgtgaagcctggagctttcctgatgatgctggccctacagtacccccatgaggggattcccttccttctgttgctggtgtactctaggacttcaaagtgtgtctgggatttttttattaaagaaaaaaaatttctagctgtc

SEQ ID NO: 1992 - DNA, 1061 bp, Homo sapiens
gagacggactcttgctatgttgcccaggctggtcttgaactcctggcctcaagcaatcctcctgcctcagcctcccaaagcacggggattacaaaccctgctgagggatgcccaagaagttccagggtgagaacaccaagtcggcagcggcccgggcacggagggcagaggccaaggcggccgctgatgccaagaagcagaaggagctggaggatgcctactggaaggacgacgacaaacacgtcatgaggaaggagcagcgcaaggaggagaaggagaagcggcgcctcgaccagctggaacgtaagaaggagacgcagcgcctactggaggaggaggactccaagctcaagggcggcaaggcgccgcgggtggccacgtccagcaaggtcacccgggcccagatcgaggacacgctgcgccgagaccatcagctcagggaggccccggacacagccgagaaagccaagagccatctggaggtgccgctggaggagaacgtgaaccgccgcgtgctggaggagggcagcgtggaggcgcgcaccatcgaggacgccattgcagtgctcagcgtggcggaggaggcggccgaccggcacccagaaagacgcatgcgggcagccttcacagcctttgaggaagcccagctgccgcggctcaaacaagagaaccccaacatgcggctgtcgcagctgaaacagctgctcaagaaggagtggctccgctctcctgacaaccccatgaaccagcgggccgtgcccttcaatgcccccaagtgagcccagaacttggggagccagttcacccacggggtggtccaggtcacgactctgcacgcccttaggccaggtcagctgcgagggtcacagagcgttccgggggccaaggcgccgggccccggggccatgctcttatcaccagccacccgtcctcccgccagagggtccctgccccgagtgacaccccatcccctcccatcccccggcgcgtgtgtgtagagcctcagggctgagtgcccaataaaggtggcggcaaggctaaaaaaaaaaaaaaaaaaaaaa

SEQ ID NO: 1993 - DNA, 3760 bp, Homo sapiens
cacccaagtctgagttgctaaaaaatggagctgtcactgggccttgctctgccaggacctgcagagccggggacctctctgtggcaagcccagcaagatgactgctctgaggcgccctagggctgagggaggggccgtgacaccagccccgccccccagccacctgggaaaaggaagcacaaaaaggagaagcagcaacggctgctctgcttccttcccatctcgctcttgggtcatgcctggccagcagaaagcagctccataggggaggagagccacgcaggatctcacagctgcagtctaatagtaacacagaggattcagcagtggccaccatgggttctgtgaattccagaggtcacaaggcggaagcccaggtggtgatgatgggcctggactcggcgggcaagaccacgctcctttacaagctgaagggccaccagctggtggagaccctgcccactgttggtttcaacgtggagcctctgaaagctcctgggcacgtgtcactgactctctgggacgttggggggcaggccccgctcagagccagctggaaggactatctggaaggcacagatatcctcgtgtacgtgctggacagcacagatgaagcccgcttacccgagtcggcggctgagctcacagaagtcctgaacgaccccaacatggctggcgtccccttcttggtgctggccaacaagcaggaggcacctgatgcacttccgctgcttaagatcagaaacaggctgagtctagagagattccaggaccactgctgggagctccggggctgcagtgccctcactggggaggggctgcccgaggccctgcagagcctgtggagcctcctgaaatctcgcagctgcatgtgtctgcaggcgagagcccatggggctgagcgcggagacagcaagagatcttgatccagacagagcagcatatctttgctcatacaaactagaagaaccagctgatccttgagaaatttacgcttagtctatcaaacaagaaatgctggcttggcccggtggctcatgcctgtaatcccagcactgtgggagaccacggtgggggaatcccttgagcccaggagttggagagcaacatcacaacaccccatttctactaataatcaaaaaattggccgggcatggtggcatgtgcctgtagtcccagctacttgggaggctgaggcaggagaatcgcttgagcccaagaggtagaggttgcagtgagccaagatcgcgccactgcactccagtctgggcaacagagtgagaccctgtctcaataataataataataataatgatgatactctaagaaaaaaatctcaacatacttcatttaatagctcgttaccaagtgtgaatgaagcaatatgtcataatagagtagccactggttgcataataatagagacctaaattctcaaatagggaaagaggttttaaaatcaaatttgaggccaggtgcagtggctcatgggcggaggagggcagattacttgaggctaggagttcaagaccagcctggccaacatggtgaaaccccatctctactgaaaatacaaaaattaggcatagtggtgcacgcctgcagtcccagctactcaggaggttgaggcagaagaatcgcttgaacccaggaagtggaggttgcagtgagccgagattgtgctgctgcactccagcctgggtgaaaaagacaggctgtgtctccaaaaagaaaaaaaaaagtcaaattcaaatatcatctggacatgtcacaatggatcgcggatccttatgagtgattttccccagtggcccctggggatgtgccactgtcactcagaagggcaagctaggcagggcccatccaacagcaggggtctgcaggttagacgttccctgccctgggacgctcacccctgggcaagaggctggaagttcacaccatccaaaatttatccttgttttttttctgatgctaattagcctctcccgattttatgacatcttgtgttgatctttttcaaaaactcattttcttttttttccttctcttttctccttcttgtagcacatatctttcgttaaagatcagatcaataaaatattttatttattcattaatttaacaaaaaaaacagagcatttagtttgtggcaaaaacactgagctttcgaatatgaatcatgtgctttaggtgggagttgtgaattctgaagatacagatgacagtgacgaatgccttctgtctcatgattgacagggaaaaggaaggttgaccatagcatcctagaaggctcatcaggtgatcattacctagcatccatgaagcacctgaaattatttgcaaaatgttacgctttggaccatttttccggggaaggagatccagaactttttaccagattttcaaagacatctgtgactcccaaaagttaacaatcactgatgtggttgttgtatccctcatccaaccccagaacactttctgtaatctgagttttttaatggcaagtggcctatatttagcacctgttctcatgttaaacagctctgaatgttagatattctttcttatcctggactggttctctctatctctggagtaatgcagtataaattggccatcagtaccctcctaaaatctgagatctgccaggcccctcttctaacaccaggttaggcatgcttggttatttccagtacttgtgagtcaacatgtttcaagacgctgtgttagacactagggatgcaaagatgaatgagataaggcctcaggcctcatggaaggtgagacagtaaagacattactcccataaaaatgtgaggagagagactcagttcagcaactgtttattctgtttattgagcacttacttggaccaagcactgtggtcttggtgttttacatagactgtctctaattctcacaactctgcaaaatatatatattcccattttataaaactacaaactgaggctcagagaaggtgtgacctcttgttgcttgaggcacagagttataaagtaacatatctggaatttgaaatgagatctgtttagggctaatgctgcatttttctacaacatcatgcctctagaaggtttaagctaggtaggctttcagccagcagacatgatggggagagccttctaataagagggaagagactgcttggaagcatgaagggaggtgtaagaaagataagtaagtcagtgtacttgcaacagaggcttgggatgaagggtgggtgaagttgacatcacgatagaaaacaaaactggaatgggagtttaggtccaatttgggcaaggttgtttgaatttcaataatcaggggtttgggtcaaggaagaaaaatcatgggacttgccatttaggaggataattttgtggtagtgtggaggtgaaataaagagaaaagggaaccttggagctgggaaggcaggaaaccggctagatgaccatcacacagcaaaggagggagtggaagagagatgagaaaattgagagctattattaagaaaaacagttgagagaggaagaatttgaagagggctcaagattttgagtccacatgacagaaggactggaatgccatgaactggagaaggtgagcgctgaagaaccaggatgggacggggctggaacagctgggttcagcttttgcagggtgggtacgtgtttggttatagctgctttcagattgttccattatctgtactcccaacaaccctgccggatatatttgttggctttcactc

SEQ ID NO: 1994 - DNA, 3561 bp, Homo sapiens
ccggctgtcggtctccgtgtcgccgccgccgcccggcatcgtggagctggggcccccttttgcctgggagttttgtagtcgcctagggtcagcggtgacatcccaaagggcaggcccggcagccgccatggtggccaaggattaccccttctacctcacggtcaagagagcgaactgcagcctggagctacctccggccagcggtccggccaaggacgctgaggagcctagtaataaacgggtcaaacccctttcccgagtcacgtcgctagcaaacctcatcccgcccgtgaaggccacgccattaaagcgcttcagtcaaaccctgcagcgctccattagcttccgcagtgagagccgccctgacatcctcgccccccgaccctggtccagaaatgccgccccctcgagcacgaaacggagagatagcaagctgtggagtgagaccttcgatgtgtgcgtcaatcagatgcttacatccaaggaaatcaaacgtcaggaggcgatctttgagctttcccaaggagaagaagacttgatagaagacttgaaattagcaaaaaaggcctatcatgaccccatgctgaaactctccataatgacagaacaagagttgaatcaaatttttggaacactggactctctaattcctctacatgaagagctccttagtcagcttcgagatgttaggaagcctgatggctcgactgaacatgttggtcccatcctcgtgggctggctcccttgcctcagctcctatgatagctactgcagcaatcaagtagccgccaaagctctgctggaccacaaaaagcaagatcaccgagtccaggatttcctacagcgatgtttagaatccccctttagccgcaaactagatctctggaatttcctcgatattccaagaagccgcctggtaaaataccctctgcttctccgagaaatcttgaggcacacaccaaatgataatccagatcagcagcacttggaagaagctataaatatcattcagggaattgtggcagaaatcaacaccaagactggtgaatctgaatgccgctattataaagagcggcttctttacttggaagaaggccagaaagactccctgatcgacagctctcgagtcttgtgttgtcatggtgaactgaagaacaatcggggcgtgaaactgcatgttttcctgttccaagaagtgcttgtgatcactcgagccgtcacccacaatgagcagctttgctaccagctgtaccgtcagccaatccccgtgaaagacctcctgctggaagacctccaggatggagaagtgaggctgggtggctccctgcgaggggcattcagcaacaatgagagaattaaaaacttcttcagagtcagtttcaaaaatggatcccaaagtcagacccactcgctacaagccaatgacactttcaacaaacagcagtggcttaactgtattcgtcaagccaaagaaacagttttgtgtgctgccgggcaagctggggtgcttgactccgagggatcgttcctaaatcccaccaccgggagcagagagctacagggagaaacaaaacttgagcagatggaccaatcggacagtgagtcagactgtagtatggacacgagtgaggtcagcctcgactgtgagcgcatggaacagacagactcttcctgtggaaacagcaggcacggtgaaagtaacgtctgacagaagcatgtgcacttcgggaagcaggcctgcatcttacctgtacagtatttgcattccacagatggaacggtttggagaagcactttttcatacttttgtgaaagtatacatgttggcccagtctctcgtatctgtacctttgtccctagtactgtaactgccaatctgtctgtgtaagctggaatctgtggcaactattaccctgtgttgtatttcccaagtgtctggatggatggagaggtactcaaacaagttactttcagttgtcctgctggattttaaaaaaatagaaaaagaatctcaaaactactgttttacatagattgtttgaagagtccttcctcttgtgcttctgtaccactttcccagctcttagatgtggtagctaaaggcacggaatttagacggccttgtaaatagggcatgaggaactcatctgtgtattgggatggtattagagagagaatcaggaaagaccaactcatgaagtgaacttggtttgatcttactcaactagaaagcttgaaaacatccctggggattctgaaggcttaattttgcaaaggaggatgcattgtctgaactttgcaacttcatccagtgcaagtttgatgcaagaatgtattaggacataaaatagaggctgaccttaaaagggccaggacagaagcggctgccagctctgaatctttaactgaaatgcacatggcaccaggaggtgtctctcatagttggttgctagcctaaaacatcagaatagaacccaaagggcttaggaaggcctgccaggataacaagaaggccctgtattcattgtgtttcatctgcctaggcctactcattattttagagaatgaatgaagcaacaaggaagagagaacatgactctatcgatgacactgtttatagaaacacaggagaggaagaatttggaatgaaaagcacttcgtcagaaccttctgtgggagccattgagagaaaagcatggtccagtgccttctgagaaaggccagagctttgggctttcctgctctgcttttgggtcgtcaatttgccatctctggttctgtgctataatcagaattgtaattatgttctccagaggccaatttcattaactctgattaattagaatcagctagccagattagtaacctctttgtccagccttgatttacagtgcagggtaaagtgcagaccttaaaaacagctaagtacctagaagagctccctgcaagtgtaaatattaaggatgacctgtgcaaaattatacccacaccagcactagtggtaattattctaaattattgccaaaaagttttttttaatctgtctttcaagtttacagaaaagaaagcagtaaatgcattgatgtcattttattatgtacatatatcatgtgcattcaagctgtgtgacaagatatatcaatataaaaacaaggtatatactttattattttttgaaaacaaggatattgtgatcaattttaccctgtaaaacatatttctgtatttataggtcttaaacatgatgaattttttctattacaagtttatttaaaactgctttctcaagtcgttattgatacagcaagtgaacctgctgcagacagaagcagaggaaagccaagaacagcctttattggtgaagaaaagaatgaatgattctttgtaggcgccatcagccacttttagaagccatcagccagtgtgttgggaaaagaggtttgtcaagtgttggcctatgggaaggtggtcaatgaatgttttgatgaaatgaatgtttttgtataatggccttaaacttttctggaagtatttcaaataaattacattattaagtcatca

SEQ ID NO: 1995 - DNA, 3032 bp, Homo sapiens
gcgcagaaagctggcgggggggtggggggaggaacatggcgcaagctctgtctgaggaggagtttcagcggatgcaggctcagctcctggaactccggacaaacaactaccagctttcagatgaactacgcaagaatggtgttgaactcaccagtcttcgacagaaggtcgcctacttggataaggagttcagcaaagctcagaaggcactgagcaagagcaagaaagctcaggaagtcgaggtattgctgagtgaaaatgagatgctgcaggcaaagctgcacagccaggaggaggacttccgtttgcagaacagcacactaatggccgagttcagcaagctctgcagccagatggaacagctggagcaagagaaccagcaactgaaggagggggctgcaggagcaggggttgcccaagctgggcccctcgtggatggggagctgctgaggctacaggctgaaaacacagccttgcagaagaacgtggcagccctgcaggaacgctatgggaaagaagccgggaagttctcagctgtcagtgagggccagggggatcccccagggggcccggcccccaccgtcctggcccccatgccgttggcagaggtggagctgaaatgggaaatggagaaagaggagaagagattgctctgggaacagctgcaaggcttagagagctcaaagcaggccgaaacatccaggctgcaggaggaacttgctaagctctccgagaaactgaaaaagaaacaagaaagtttttgccgtctgcagacagaaaaggagactctgtttaatgacagcaggaacaagattgaggaattacaacaacggaaggaagctgatcacaaagcccagttggctcgaacccagaagctgcagcaggaacttgaggctgccaatcagagcttggcagagctgagagatcagcggcagggggagcgcctggaacatgcagcagctttgcgggccctacaagatcaggtatccatccagagtgcagatgcacaggaacaagtggaagggcttttggctgagaacaatgccttgaggactagcctggctgccctggagcagatccaaacagcaaagacccaagaactgaatatgctccgggaacagaccactgggctggcagctgagttgcagcagcagcaggctgagtacgaggaccttatgggacagaaagatgacctcaactcccagctccaggagtcattacgggccaatagtcgactgctggaacaacttcaagaaatagggcaggagaaggagcagttgacccaggaattacaggaggctcggaagagtgcggagaagcggaaggccatgctggatgagctagcaatggaaacgctgcaagagaagtcccagcacaaggaagagctgggagcagttcgtctacggcatgagaaggaggtgctgggggtgcgtgcccgctatgagcgtgagctccgagagctgcatgaagacaagaagcgtcaggaggaggagctccgtgggcagatccgggaggagaaggcccggacacgggagctggagactctccagcagacagtggaagaacttcaagctcaggtacattccatggatggagccaagggctggtttgaacggcgcttgaaggaagccgaggaatccctgcagcagcagcagcaggaacaagaggaagccctcaagcagtgtcgggagcagcacgctgccgagctgaagggcaaggaggaggagctacaggatgtacgggatcagctcgagcaggcccaggaggagcgggactgccacctgaagaccattagcagcctgaagcaggaggtgaaggacacagtggatgggcagaggatcctggagaagaagggcagtgctgcgctcaaggacctcaagcggcagctgcatttggagcggaaacgggcagataagctgcaggagcgactgcaggacatcctcactaacagcaagagccgctcaggccttgaggagctggttctctcagagatgaactcaccaagccggacccagacaggggacagcagtagcatctcctccttcagctaccgggagatcttgcgggaaaaggagagctcggctgttccagccaggtccttatccagcagccctcaagcccagccccctcggccagcagagctgtcagatgaggaagtggctgagctctttcagcggctggcagagacacagcaggagaaatggatgctggaggagaaggtgaagcacctggaagtgagcagtgcttccatggcagaggacctctgccggaagagcgccatcattgagacctacgtcatggacagccggatcgatgtgtctgtggcagcaggccacacagaccgcagcgggctgggcagcgtcctgagagacctagtgaagccaggcgacgagaaccttcgggagatgaacaagaagctgcagaacatgctggaggagcagctcaccaagaatatgcacttgcacaaggatatggaagttctgtcccaggaaattgtgcggctcagcaaggagtgcgtggggcctcctgacccagacctagagccaggagaaaccagctaaagacctgcaggctgcacccacctcctccccttcctaccccctaggatgctattcccttgggctgtggtggaaaaatgagggctggagccaaaatcaaatagcttgggagactggacattaaaggggctagaggcctgatggttagtgttaatgatcctgtcttagggcagaggccaccagggagtggggatcctgagggaaggggcagggatttctccttcttcttggtcctggctcccaagggcttctgtcttcatctctgcatgagctctccttcccagagaccaactcttttttattttattttattttattttttaatttatgtctggagcctggctactctgcatttgggattggggatgctgggtgggtgtgtggtccatgttcagcgttctagcaacacgtgtgtgtgtgtgtgtgtaaaggctatgcagccaaaataccatctggccagacgggcccacccac

SEQ ID NO: 1996 - DNA, 3260 bp, Homo sapiens
gcgcagaaagctggcgggggggtggggggaggaacatggcgcaagctctgtctgaggaggagtttcagcggatgcaggctcagctcctggaactccggacaaacaactaccagctttcagatgaactacgcaagaatggtgttgaactcaccagtcttcgacagaaggtcgcctacttggataaggagttcagcaaagctcagaaggcactgagcaagagcaagaaagctcaggaagtcgaggtattgctgagtgaaaatgagatgctgcaggcaaagctgcacagccaggaggaggacttccgtttgcagaacagcacactaatggccgagttcagcaaggaacgctatgggaaagaagccgggaagttctcagctgtcagtgagggccagggggatcccccagggggcccggcccccaccgtcctggcccccatgccgttggcagaggtggagctgaaatgggaaatggagaaagaggagaagagattgctctgggaacagctgcaaggcttagagagctcaaagcaggccgaaacatccaggctgcaggaggaacttgctaagctctccgagaaactgaaaaagaaacaagaaagtttttgccgtctgcagacagaaaaggagactctgtttaatgacagcaggaacaagattgaggaattacaacaacggaaggaagctgatcacaaagcccagttggctcgaacccagaagctgcagcaggaacttgaggctgccaatcagagcttggcagagctgagagatcagcggcagggggagcgcctggaacatgcagcagctttgcgggccctacaagatcaggtatccatccagagtgcagatgcacaggaacaagtggaagggcttttggctgagaacaatgccttgaggactagcctggctgccctggagcagatccaaacagcaaagacccaagaactgaatatgctccgggaacagaccactgggctggcagctgagttgcagcagcagcaggctgagtacgaggaccttatgggacagaaagatgacctcaactcccagctccaggagtcattacgggccaatagtcgactgctggaacaacttcaagaaatagggcaggagaaggagcagttgacccaggaattacaggaggctcggaagagtgcggagaagcggaaggccatgctggatgagctagcaatggaaacgctgcaagagaagtcccagcacaaggaagagctgggagcagttcgtctacggcatgagaaggaggtgctgggggtgcgtgcccgctatgagcgtgagctccgagagctgcatgaagacaagaagcgtcaggaggaggagctccgtgggcagatccgggaggagaaggcccggacacgggagctggagactctccagcagacagtggaagaacttcaagctcaggtacattccatggatggagccaagggctggtttgaacggcgcttgaaggaagccgagggcaaggaggaggagctacaggatgtacgggatcagctcgagcaggcccaggaggagcgggactgccacctgaagaccattagcagcctgaagcaggaggtgaaggacacagtggatgggcagaggatcctggagaagaagggcagtgctgcgctcaaggacctcaagcggcagctgcatttggagcggaaacgggcagataagctgcaggagcgactgcaggacatcctcactaacagcaagagccgctcaggccttgaggagctggttctctcagagatgaactcaccaagccggacccagacaggggacagcagtagcatctcctccttcagctaccgggagatcttgcgggaaaaggagagctcggctgttccagccagggtaaggggaaaggaagaacctacagctccagcttctctcaacccaaaaatctgagaacccctccccttttctcctcacctaaacccatctcctactttgggcgcagcacacatattttcttgtcaacttttccccaagcccaccaacttggattcagattgcgacatgcaggacaggccagtcattctctctctctgactttctgtttaatcatctgtgggctaattcccccttctctggtgccataaattatgtggctcatagtaggtgcaccatccaaggagaaggtccctttttccaacttgtaatgatcactaattattattgccggctgtcatgtcagcctccttaccagccactttcctttggaaataacttttttattgttccacaaatagtatgtgctcattgtagtacattttttaaaaaccacaaatgagcaaagatttttttaaaaccttaaatgtctggccgggtgtggtggctcatccctataatcctacactttgggaggccaaggtgggcggatcacttgagctcaggagtttaagaccagcctgggaaatgtggtaaaactccgactctatttaaaaaaaaaacaaaaacaaaaaaaccttaaatgtcaaaaaaaaataatattttcaccatccagacgtcaccattataaattcttagttcagggctgggcgcggtggctcatgcctgtaaccctagcactttgggaggctgaggcgggcagatcacttgaggttaggagtttgagaactggcctggccaacatagcaaaacctcatctctactaaaatacaaaaattagccgggcgtggtggtgcgtgcctgtagtcccagctactcgaaaggttgaggcaagagaatcgcttgaacctgggaggtggaggttgcaatgagccgagatcacaccactgcactccagcctgggcaacagtgaaactccatctcaaaaaataaataaataaaataaattcttagttcatacccttccagaattctctctctttttaaaacctagatgagattaacctgttttttattcaactgttgtctctaccttcccaatttgatcaattttcatgtcattggctgggtgcggtggctcctgcctataatcccagtactttgggaggccgaggcgggcagatcacttgaggtcaggagttcaagaccagcctggccaacatggtgaaaccccatctctactaaaaatacaaaaattagctgggcgtagtggcgcgtgcctgtaattccatctactcgggaggctgaggcaggagaatcgcttgatcctgggagttggaggttgcagtgagccaagatcttgccattgcactccagcctgggcaacaagagtgaaattctgtctcaaaaaaaaaaaaaaaaaaa

SEQ ID NO: 1997 - DNA, 3806 bp, Homo sapiens
gcgcccggcttgcgggactgcggggcgcgagagcgcggccgggtagcgtcgcgcgcgtggatctgccgccgggttgctgtgcgactattctccgggagccgtccgtgtcaccgccggaacctggcgcaggttaattatagaaaatgccaagtaggaaatttgccgatggtgaagtggtaagaggtcgatggcctgggagttcactttattatgaagtagaaattctgagccacgacagcacctcccagctttacactgtgaagtataaagatggaacagagcttgaattgaaagagaatgatattaagcctttaacttcctttaggcaaaggaaaggtggctcaacttccagttccccttccagacgccgagggagtcgatcaaggtcacgctcccgatcccctggtcgaccacctaaaagtgcccgccgatctgcttctgcttcccaccaggccgacattaaggaagcaaggagggaagtggaagttaaattgactccgctgattctgaagccatttggaaatagcatcagcagatataatggggagcctgagcatattgagagaaatgacgcacctcataaaaatacacaggaaaaattcagtttgtcacaagaaagcagttacatagcaacacagtatagccttcgtccaagaagagaagaagtcaaattaaaagaaatagattctaaggaagaaaaatacgttgcaaaagaactggcagtgagaacctttgaagtgacccccatccgggcaaaggacttggagtttggaggagtacctggtgtgtttctcatcatgtttggcctgcctgtgttcctcttcctgttgctgttgatgtgtaaacagaaagatcccagtcttctgaatttccctcctcctttgccagctttgtatgagttatgggaaaccagagtatttggggtctacctcctgtggtttttgattcaagtcctgttctacctactgccaattggaaaggttgtagaaggaacgcctcttattgatggaagaagactcaagtatagattaaatggattctatgcttttatcctgacatctgcagtcatcggaacatctctcttccagggcgtagagtttcattacgtgtacagtcattttcttcagtttgcacttgcggccactgttttttgtgtggtcttgagtgtgtatctctacatgcgctctttgaaagcgccccggaatgacctgtcgcctgccagctctggaaatgctgtctatgatttcttcattggccgtgaattaaaccctcgaattggtacttttgatctcaaatacttttgtgaattgcgccccggattgattggatgggtggttattaacttggtgatgcttttggctgaaatgaaaatacaggaccgcgctgttccatccttggccatgattttagttaatagtttccagcttctctatgtggtggatgctctctggaatgaggaagcgttgttgacgaccatggacatcatccacgatggatttggattcatgctggcttttggagacttggtgtgggttccctttatttacagcttccaagccttttatttagtcagtcatccaaatgaagtgtcttggccaatggcttctctaattattgttctgaaactttgtggttatgtaatcttccgaggtgcaaattctcagaaaaatgcattccggaaaaatcccagtgatccaaagcttgcacatttaaaaaccattcatacttcaacgggaaaaaatcttctagtttctggatggtggggctttgttcgccaccccaattacttgggtgatctcatcatggccttggcgtggtccctcccatgtggttttaaccacattctgccttatttctacataatttatttcaccatgttgcttgtccaccgagaagctcgtgacgagtaccactgtaagaagaaatacggcgtggcttgggaaaagtactgtcagcgtgtgccctaccgtatatttccatacatctactaatgctcttctggcttttctacaaaatactcctgcaattccagctgccatttgcaaaaacaaggaaaaaaatccgaaactttcttttgttgcactgacagggtctgtacttttttttttctttttgagtcaggactatggagccgagtagttgatcttttaatatagccgtgtttacttgtattaacttacagttaacataggaaaaatacaagtaaggatgtgagaatttgcattttaatgggaaattttcaacccttaatctgaaaacagaagacagtcttaatataaatgtactgtgaagaatgctattgatgtttatggtttctgattacttttcaaattttgatgtttttttgccagttggcttttcttaaatgaaaacactgttccatttaaagtacatttatgttttattcagtaagagaatagaattttcatttgtttttctttaaatcctttactaattatataatttgaaagcaaaaagaagggcctatattaaatgctgaaagtgaaaagtgatgacattattagcagacactgcttaaaggagaccatttgtagcagttggcttaacctcaacttctaaaactacattgaaaatgtaaatacatagcttagttttttgtaatatatggtgacttcagatttttttgtacagtattttgaatgtgagatgattgtcaggactaactgtctttttaacaaaacattttcagtattttaaataaaattttgtaaagtaatgtgaattaaaaattttggaacaattagaattcattcactattgtatagaagatgctgttaaaacataggaagggtatttttcttgatccaaagtttgtgaatttggctttgctacctcaattgcaggtgtttgtttgcctttataaactgttgcaaatagaaaaaaaatagaataagtatatatttttggagtaacatcaatatttaaacatttttacacagatcggtgtttgaaaatttgccatttcaggctaatatttttatatatttttgactttttaaaagttcatcagtgtttttgctactgttaagcttatgcagtttatactgtattttttatgtatcctttatatttaccaaacctgactccctgtaaaggagtgctgtcttaaaaacaactgaaggggttaaagtcgtttcttttagtttaatagatgtgcataaggtagctttagcaattaaattctagtgaagttgatatagtctcatttttaattgtcctgtaatggaacagtagcaaattcactaaacttttgtgttcagagttaaattgttctcagtactttcaatgtaggggaatgtaataaacatagtgtgtatgtttgggttttaattacacattttatatatgagccatttagatatgcagtgttaattctatactgcatttgaagtgtatgtaacttagcttatgttaatgcagtcatgaagttggtttgctccagcatccggtagtctttaaacattcttttagtgaaattgtcattgttttatcagtgctaatgtgtgcaagcagtttttttattttgcttttctcctggcatcagaaagtggtggcgttttctgtactggattgcaccaaggaagcttttggggaggaaggaaggacattaaattctttccctggtaatgaaaagagccctttatcaatacagtgctgcaatttctggatatcagctacactttgtttttaagtttgtttttgacatgtttatttggcaaattttataatgaagttttaagttgaaaataaaatgtagcaacattttgatcaaaaaaaaaaaaaaa

SEQ ID NO: 1998 - DNA, 3789 bp, Homo sapiens
tgtgtttcggtgtgtaacgcataaaacttcttgttccacgctccgcggtgttggggattttctactgcatctcgacagcatctcgggtaacaaccgagcccctcctcgcagcgttaattatagaaaatgccaagtaggaaatttgccgatggtgaagtggtaagaggtcgatggcctgggagttcactttattatgaagtagaaattctgagccacgacagcacctcccagctttacactgtgaagtataaagatggaacagagcttgaattgaaagagaatgatattaagcctttaacttcctttaggcaaaggaaaggtggctcaacttccagttccccttccagacgccgagggagtcgatcaaggtcacgctcccgatcccctggtcgaccacctaaaagtgcccgccgatctgcttctgcttcccaccaggccgacattaaggaagcaaggagggaagtggaagttaaattgactccgctgattctgaagccatttggaaatagcatcagcagatataatggggagcctgagcatattgagagaaatgacgcacctcataaaaatacacaggaaaaattcagtttgtcacaagaaagcagttacatagcaacacagtatagccttcgtccaagaagagaagaagtcaaattaaaagaaatagattctaaggaagaaaaatacgttgcaaaagaactggcagtgagaacctttgaagtgacccccatccgggcaaaggacttggagtttggaggagtacctggtgtgtttctcatcatgtttggcctgcctgtgttcctcttcctgttgctgttgatgtgtaaacagaaagatcccagtcttctgaatttccctcctcctttgccagctttgtatgagttatgggaaaccagagtatttggggtctacctcctgtggtttttgattcaagtcctgttctacctactgccaattggaaaggttgtagaaggaacgcctcttattgatggaagaagactcaagtatagattaaatggattctatgcttttatcctgacatctgcagtcatcggaacatctctcttccagggcgtagagtttcattacgtgtacagtcattttcttcagtttgcacttgcggccactgttttttgtgtggtcttgagtgtgtatctctacatgcgctctttgaaagcgccccggaatgacctgtcgcctgccagctctggaaatgctgtctatgatttcttcattggccgtgaattaaaccctcgaattggtacttttgatctcaaatacttttgtgaattgcgccccggattgattggatgggtggttattaacttggtgatgcttttggctgaaatgaaaatacaggaccgcgctgttccatccttggccatgattttagttaatagtttccagcttctctatgtggtggatgctctctggaatgaggaagcgttgttgacgaccatggacatcatccacgatggatttggattcatgctggcttttggagacttggtgtgggttccctttatttacagcttccaagccttttatttagtcagtcatccaaatgaagtgtcttggccaatggcttctctaattattgttctgaaactttgtggttatgtaatcttccgaggtgcaaattctcagaaaaatgcattccggaaaaatcccagtgatccaaagcttgcacatttaaaaaccattcatacttcaacgggaaaaaatcttctagtttctggatggtggggctttgttcgccaccccaattacttgggtgatctcatcatggccttggcgtggtccctcccatgtggttttaaccacattctgccttatttctacataatttatttcaccatgttgcttgtccaccgagaagctcgtgacgagtaccactgtaagaagaaatacggcgtggcttgggaaaagtactgtcagcgtgtgccctaccgtatatttccatacatctactaatgctcttctggcttttctacaaaatactcctgcaattccagctgccatttgcaaaaacaaggaaaaaaatccgaaactttcttttgttgcactgacagggtctgtacttttttttttctttttgagtcaggactatggagccgagtagttgatcttttaatatagccgtgtttacttgtattaacttacagttaacataggaaaaatacaagtaaggatgtgagaatttgcattttaatgggaaattttcaacccttaatctgaaaacagaagacagtcttaatataaatgtactgtgaagaatgctattgatgtttatggtttctgattacttttcaaattttgatgtttttttgccagttggcttttcttaaatgaaaacactgttccatttaaagtacatttatgttttattcagtaagagaatagaattttcatttgtttttctttaaatcctttactaattatataatttgaaagcaaaaagaagggcctatattaaatgctgaaagtgaaaagtgatgacattattagcagacactgcttaaaggagaccatttgtagcagttggcttaacctcaacttctaaaactacattgaaaatgtaaatacatagcttagttttttgtaatatatggtgacttcagatttttttgtacagtattttgaatgtgagatgattgtcaggactaactgtctttttaacaaaacattttcagtattttaaataaaattttgtaaagtaatgtgaattaaaaattttggaacaattagaattcattcactattgtatagaagatgctgttaaaacataggaagggtatttttcttgatccaaagtttgtgaatttggctttgctacctcaattgcaggtgtttgtttgcctttataaactgttgcaaatagaaaaaaaatagaataagtatatatttttggagtaacatcaatatttaaacatttttacacagatcggtgtttgaaaatttgccatttcaggctaatatttttatatatttttgactttttaaaagttcatcagtgtttttgctactgttaagcttatgcagtttatactgtattttttatgtatcctttatatttaccaaacctgactccctgtaaaggagtgctgtcttaaaaacaactgaaggggttaaagtcgtttcttttagtttaatagatgtgcataaggtagctttagcaattaaattctagtgaagttgatatagtctcatttttaattgtcctgtaatggaacagtagcaaattcactaaacttttgtgttcagagttaaattgttctcagtactttcaatgtaggggaatgtaataaacatagtgtgtatgtttgggttttaattacacattttatatatgagccatttagatatgcagtgttaattctatactgcatttgaagtgtatgtaacttagcttatgttaatgcagtcatgaagttggtttgctccagcatccggtagtctttaaacattcttttagtgaaattgtcattgttttatcagtgctaatgtgtgcaagcagtttttttattttgcttttctcctggcatcagaaagtggtggcgttttctgtactggattgcaccaaggaagcttttggggaggaaggaaggacattaaattctttccctggtaatgaaaagagccctttatcaatacagtgctgcaatttctggatatcagctacactttgtttttaagtttgtttttgacatgtttatttggcaaattttataatgaagttttaagttgaaaataaaatgtagcaacattttgatcaaaaaaaaaaaaaaa

SEQ ID NO: 1999 - DNA, 5103 bp, Homo sapiens
agaaggcggagcctacctctcatcaggaccagtctgactgcacctgcatccttagctcagagcatccccggagcatcttaagagctgagcgcagctgacaactaggggccggaccgtcgcaggaggcgtccgctggataccttcccccttccctgacctagagctctacagctgctgcctcggtactgaccgagggttcccagagctgtctcaccattgcaaaaacgttatagcaacagcctctgattacgacatggctgagatcaccaatatccgacctagctttgatgtgtcaccggtggtggccggcctcatcggggcctctgtgctggtggtgtgtgtctcggtgaccgtctttgtctggtcatgctgccaccagcaggcagagaagaagcacaagaacccaccatacaagtttattcacatgctcaaaggcatcagcatatacccagagaccctcagcaacaagaagaaaatcatcaaagtgcggagagacaaagatggtcctgggagggaaggtggacgtaggaacctgttggtggacgcagcagaggctggcctgctaagccgagacaaagatcccagggggcctagctctggatcttgtatagaccaattacccatcaaaatggactatggggaagaactaaggagccctattacaagcctgacccctggggagagcaaaaccacctctccatcatctccagaggaggatgtcatgctaggatccctcaccttctcagtggactataacttcccgaaaaaagccctggtggtgacaatccaggaggcccacgggctgccagtgatggatgaccagacccagggatctgacccctacatcaaaatgaccatccttcctgacaaacggcatcgggtgaagaccagagtgctgcggaagaccctggaccctgtgtttgacgagaccttcaccttctatgtcatcccctacagccagctgcaggacctggtgctgcacttccttgtcctcagctttgaccgcttctctcgggatgatgtcattggcgaggtcatggtgccactggcaggggtggaccccagcacaggcaaggtacaactgaccagggacatcatcaaaaggaatatccagaagtgcatcagcagaggggagctccaggtgtctctgtcatatcagcctgtggcacagagaatgacagtggtggtcctcaaagccagacacttgccgaagatggatatcaccggtctctcaggtaatccttatgtcaaggtgaacgtctactacggcagaaagcgcattgccaagaagaaaacccatgtgaagaagtgcactttgaaccccatcttcaatgaatctttcatctacgacatccccactgacctcctgcctgatatcagcatcgagttcctcgttatcgacttcgatcgcaccaccaagaatgaggtggtggggaggctgatcctgggggcacacagtgtcacagccagtggtgctgaacactggagagaggtctgcgagagcccccgcaagcctgtggccaagtggcacagtctgagcgagtactaatcctgttcttctctcctctaatccccgggggccaagctggggagggatgtggaggggaaaaagatgacagagaagtggactccaaacctcattttagttgtagaagaaaatttcttacaaaacaaattccacaaagaacaccctatatgaccacagctgcagatcagttcttagcaatgatgtttttttttctgctttgcaaggcgctagaatcttttattttactttattttttttgaggtggagtttcgctcttgttgcccgggctggagtgcaatggtgagatctcaactcactgcaacctctgcccttcaggttcaagtgattctcctccctcagcctcccaagtagctgggattacaggcacccacgagcatgcccggctaattttttgtattttcagtagagatgggtttcaccatgttggccaggctggtctcgaattccagacctcaggtgatccacccgcctcggcctcccaaagtgctgggattacaggtgcgagccaccgtgcccggcctctggttttgttttgttttttttttttaatgggggacaaaagagagggaaagacccctataaatctatatataacaatgtaaccatatacttgcatgtctaatacaaactgaagaaattagcctaactgccaatatcaagttgcagattttaatccatggaaattgtgttttgtgctgaattgtatttgctgattacctgaaattggcttctttttattgggcttctctggagaatttctcccactccccacctctgcagaagaaaattttgctcttataaaacctcatgttttcatcattcctatcttttctttttattgcctcttatatctctgctctttgacctcaaggtctagaggtctgcagtaagccaagaaacaaaggtggggtggatgaggcaaggtttgcaggagaaagaggaattgagaaatggggtatttttgctatcagctcttctgctatgaagtagtaaaaggcagtctataattaactgacagacctaactgaagcacagagaatacatcagacttatgcatccaagacatcagaacttggattttatcaaacttgatgacttctctaaaaggagctttggaaacttcaaattcagctataggatagtaccaatgaacacatccagctgatcccaaaagctgttttcaggtataaggacaaggagaggagacaagtgacgacagccattcccctttgcagctatctactgtagtgacagccatttcttggttgatgggttggaagtcatcagaggtttgaagaattacactggcctttgtttttctggaaatgccgaccatggagatgctttagagtcttctaaaatagcttagatgttgtaatgaggttagctttgcttcataaaacaggggccctcagaagttctccttaaatttttcaataaaaatttagctcttaaaaaaataacagtgtgactgagtgaatgaagataagttggattctttcagagcattcttttcctcaaaacgagctgcataattcttggaatttatgtcttaccacatggtggagggatgggggaactacaggatgcaattcttcttctaccaatgggcaatagaggttgagagagattcagcatctttctgggattagaattcaagtctctttactcctacagcagctgcgtctccaacgttgagactttgcagatggcacagactccatggataataggtaaacttggggccgggcgcagtggctcacgcctgtaatcccggtattttgggaggccgaggtggaaagatcgcttgagcccaggagttcaagaccagcctgggctacatgacgaaactccatctctatcaaaaatacaaaaaattaactaggtgtggtgctgcacgcctgtggtcccagctattcaggaggctgaggtgggaggatcatttgagcccagaggtagaggctgcagtgagccatgatcatgccactgcactctgggctgggtaacagagtgagatcctgtctcaaaaattaattaattaattaattaaaataaactaggtaaacttggataggcagtagatatttttgcccacctgaggaggatctcagtcaagctgttgcttaacagcttgatccagggcgtgaaaggttagttgagactgaagtgttcacttccatagaagaacatcacttttaaccttgctttggcgaagggagtcggaaagctgagtctctatggacgggggggtgatcttgctttcagtgttccctcagcttttgtggatttaaaaccattctgctccccctaaaccttttgtttgatttcagcccatgttcttgacaatgcagagcaattctgagcagtcacaaagcctactctctgttcttgtccctgccaacccccaccccccataatctgactcacaacttcaccatcagttggggtcataccactagtctctgtcctataccccatgaaatgtaaatactgtatcataagtagaagaaaataatttttgttttctaaaaatgcattttgagatagtttaatgtaaatctgacaggagcattctgaagccccattaggaaaaaatttaaatggttcctcttcatcgccttaatgtctaaagatcagaaatcgctgagcaaacccgcttttgtttccttcccagaaacaatgcaaaacaacaggtggagatagtctggtctttgccctgctgtgtgtgcctctgtagctcctcctgacaaacgtctgggaaaacagcctcaccccactctcctctctcttccccatttccttgtagctttattccttgcatctttgggtctactgagcagtgggtgctgaggtgacaggggaggaaccagttgttctgtagcctaggaactgcctcagtgtctttgccagaaaaaggcaaagaggcggacagtgcagggctcctccctcctacctcaggcctgatccatcgtgcccttgactttgccgtctcaaagtttcttagctgactttggctttcacatttgttctttccagagctaactgataagagtggaggaggaatgccttctcctaagagtcagttgaaagaaagacaagagagtcacatcttagcttttgcacaaggcattcgtggtcaggaataggttagggaatggtcacttctgattttccaacagttgctccttctctgaagagatcttgattcctttgggaagacaagaatttttcttaataacaaaggtcactttatgagttattccttctttcagttcatctcactggagcacagccaagatggacatgtttatggacagtgctctagatgtgaaaacagatagaactggtttgtgggacaggggcagcttgctcaggagagggaataacgcaggtcccttttcttggaaggcttgtactatggccatgacagtgacattgccctcaccatgatccctctccaaagtggttgtctttctttaccttgtgtcttctcttgtaaaaatgaaactcaaaaataaaataaatgtgtcaaatttcgaaaaaaaaaaaaaaaa

SEQ ID NO: 2000 - DNA, 1662 bp, Homo sapiens
gctgcgggctccgcgcgcgcgggccatgtccgctttctgcctgggcttggtcggccgcgcttcagcacccgccgagccggacagcgcctgctgcatggagctgcccgccgcggccggggacgcagtccggagtcccgccgccgccgccgccctcatcttccccgggggctccggggagctagaactggcgttagaggaggagctggcgctgctggcggccggggagcggccgtccgaccccggggaacaccctcaggccgagctgctgtcggtgatccgacagaaggagaaggatctggtgttggcggcccggctgggtaaggcgctgctcgagaggaaccaggacatgagccggcagtacgagcagatgcataaggagctgacagacaagctcgagcacttagagcaagagaaacatgaattgagaagacgatttgagaaccgagaaggggagtgggaaggccgagtgtcagagctggagagtgatgtgaagcagctacaggatgagttggagaggcagcagattcatctgcgggaagcagatcgagaaaaatcacgggctgtccaggaactgtcggaacagaaccaaaggctattggatcagctcagcagggcatcagaagttgagagacaactctccatgcaggtccacgccctcagagaagactttcgggagaaaaactcatcaaccaaccagcacattatccggctggagagccttcaggccgagatcaagatgctgtcagatcggaaacgggagctggagcatcgtctcagcgctactttagaggaaaatgacctgctccaagggaccgtggaggagctacaggaccgggtgctaatcctggagaggcagggccatgacaaggacctacagctgcaccaaagccagctggagcttcaggaggtgcgtctctcctgccgacagctgcaggtgaaggtggaagaactcactgaggagaggagtctgcagagctctgccgccaccagcacatccctcctgtcagagatcgagcagagcatggaggctgaggagctggagcaggagcgagagcagctgagactgcagctctgggaagcctactgccaggttcgctatctgtgctcacaccttcgaggcaatgacagtgctgactcagccgtctccacggactcctccatggacgagtcttcagaaacctcgtccgccaaggatgtgccagccggcagcttgcgcactgccctcaatgagctcaagagactgatacagagcattgtggatggcatggagcccacgggctcccggagacttgatgatgactccttagaagaacagataaggcagaccagtgaggactcgagagccctaagggagctcatggagggagagagggggaggctgccggaagcctccagatgctgcctgcctgcctgctcacaaccgattcagtctccctccctccctcacgtggggaaagcacagcagggatgcgcggcaagaatgtacctgtagatgtgtacataccacagtgctgtaattttgtatgtagcaatcatgtaaatacatgtatggattttataatatacatatataaaaatctataaaggcatatttttagaaaaacagcacaccactgcttcttttgaaaatagtctgaataagaataaaatgaatttctacag

SEQ ID NO: 2001 - DNA, 3611 bp, Homo sapiens
cgtactatctgaatgcccaggatggggctgggggcgaggaagagaaggccgagggcggggatggggaggagcacgacctgtttgctgggctgatgccactggaacaggagagtcgcatggaggtactgtctgcctgtgctgaggccctgcatgcgcatggctatagcagtgaggcctcccgtctcactgtggagcttgcccaggatctgctagccaacccacccgacctcaaggtagagccgccccctgccaagggcaagaagaacaaggtatccacgagccgtcagacctgggtggctaccaacaccctgagcaaggcggccttcctgttgacagtgctaagtgagcgtccagagcaccacaacctggccttccgagttggcatgtttgccttggagctacagaggcctccggcttctaccaaggccttggaggtgaagctggcataccaggagtctgaggtggctgccctgctcaagaagatccctctgggtccaagtgagatgagtaccatgcggtgccgggcagaggaacttcgggaggggacactctgtgactatcggcctgtgttgcctctcatgctggccagtttcatctttgacgttctctgtgctccagtggtttctcccacaggttcccggcccccaagtcgcaactggaacagcgagacacctggggatgaggagcttggatttgaagcagcagttgctgccttgggcatgaagacaacagtgagcgaggcagaacatcccctcttatgtgaaggcacacgtcgggagaagggtgacctggcattagcactaatgatcacttacaaggacgaccaggccaagcttaagaagatcttagacaaactcttggaccgagagagccagacacataagccacagacgctgagttctttctactcatctagccgcccaaccacagccagccagaggtctccttcaaagcacgggggcccatctgccccagggaccctgcaaccactgacctcaggctctgcagggcctgctcaaccagggagtgtggcaggggctgggccaggccccactgagggcttcacagagaagaatgtgcctgagagttccccacattccccctgtgagggtcttccatctgaggcagctttgaccccaaggccagaagggaaggttcctagccgcttggcacttggcagtcgtggaggctataatggacggggatgggggtccccaggacggcctaagatgaagcacacaggcatggccagcattgacagcagtgcccctgaaacaacatcggatagttcccccaccttaagccggagaccacttcaagggggctgggcccccacctcctggggtcgaggtcaggacagtgacagcattagcaactcttcttcggactccctgggctcctcatcctccagtggaagtcgccgggccagtgccagtggaggagcccgggcgaagactgttgaagttggcaggtacaagggccgccgccccgagagtcatgcccctcatgtacccaatcagccatcagaggcagctgcacacttctacttcgagctggcgaagacagtgctgatcaagacagggggcaacagcagcacttccattttcacacatccatcttcctcagggggccaccagggtcctcaccgcaacctgcacctttgcgccttcgagattgggctttatgcccttggcctgcacaactttgtttctcccaactggctctcacgtacttattcttcccacgtttcctggattacaggccaggccatggagataggcagcgcagccctgactatactggtagaatgctgggatgggcacctgacaccccctgaggttgcatccctggctgacagggcatcacgggcaagagactccaatatggtgagggcggcagcagagctggccctgagctgcctgcctcacgcccatgcattgaaccctaatgagatccagcgggccctggtgcagtgcaaggaacaggacaacctgatgttggagaaggcctgcatggcagtggaagtggcagctaagggtgggggcgtgtaccctgaagtgttgtttgaggttgctcaccagtggttctggctatatgagcaaactgcaggtggctcatccacagcccgtgaaggggctacaagctgtagtgccagtgggatcagggcaggtggggaagctgggcggggtatgcctgagggtagagggggcccagggactgagccggttacagtggcagcggcagcagtgacagcagcagccacagtggtgcccgtcatatcggtggggtctagtttatacccgggtccaggactggggcatggccactcccctggcctgcacccctacactgctctacagccccacctgccctgtagccctcagtatctcactcacccagctcaccctgcccaccccatgcctcacatgccccggcctgccgtcttccctgtgcccagctctgcatacccacagggtgtgcatcctgcattcctaggggctcagtacccttattcagtgactcctccctcacttgctgccactgctgtgtctttccccgttccttccatggcacccatcacagtacatccctaccacacagagccagggcttccactgcccaccagtgtggcctgtgagttgtggggccagggaacagtgagcagtgtccatccagcatccacgtttccagccatccaaggtgcctcactgcctgccctgaccacacagcccagccctctggtgagcggaggttttccaccgcccgaggaggagacacacagtcagccagtcaatccccacagcctgcaccacctgcatgctgcctaccgtgtcggaatgctggcactggagatgctgggtcgccgggcacacaacgatcaccccaacaacttctcccgctcccccccctacactgatgatgtcaaatggttgctggggctggcagcaaagctgggagtgaactacgtgcaccagttctgtgtgggggcagccaagggggtgctgagcccgtttgtgctgcaggagatcgtcatggagacgctgcagcggctgagtcccgctcatgcccacaaccacctgcgtgccccggccttccaccaactggtgcagcgctgccagcaggcatacatgcagtacatccaccacagcttgattcacctgactcctgcggactacgacgactttgtgaatgcgatccggagtgcccgcagcgccttctgcctgacgcccatgggcatgatgcagttcaacgacatcctacagaacctcaagcgcagcaaacagaccaaggagctgtggcagcgggtctcactcgagatggccaccttctccccctgagtctttcacccttagggtcctatacagggacccaggcctgtggctatgggggcccctcactcagggggagtgaaacttggctggacagatcatcctcactcagttccctggtagcacagactgacagctgctcttgggctatagcttggggccaagatgtctcacaccctagaagcctagggctgggggagacagccctgtctgggagggggcgttgggtggcctctggtatttatttggcatttataaatatataaactccttttttactct

SEQ ID NO: 2002 - DNA, 591 bp, Homo sapiens
cagaacggccgatctccagcccaagatgattccagcagtggtcttgctcttactccttttggttgaacaagcagcggccctgggagagcctcagctctgctatatcctggatgccatcctgtttctgtatggaattgtcctcaccctcctctactgtcgactgaagatccaagtgcgaaaggcagctataaccagctatgagaaatcagatggtgtttacacgggcctgagcaccaggaaccaggagacttacgagactctgaagcatgagaaaccaccacagtagctttagaatagatgcggtcatattcttctttggcttctggttcttccagccctcatggttggcatcacatatgcctgcatgccattaacaccagctggccctacccctataatgatcctgtgtcctaaattaatatacaccagtggttcctcctccctgttaaagactaatgctcagatgctgtttacggatatttatattctagtctcactctcttgtcccacccttcttctcttccccattcccaactccagctaaaatatgggaagggagaacccccaataaaactgccatggactggactc

SEQ ID NO: 2003 - DNA, 4022 bp, Homo sapiens
aaggcgcatcatggcggctggccgggcccaggtcccttcctccgaacaagcctggcttgaggatgctcaggtcttcatccaaaagaccctgtgtccagctgtcaaggagcctaatgtccagttgactccattggtaattgattgtgtgaagactgtctggttgtcccagggaaggaaccaaggttctacactgcccctcagctatagcttcgtctcagtacaggacctcaagactcaccagcgtctcccatgctgcagccacctgtcgtggagcagtagtgcataccaggcctgggcccaagaggctggaccaaatgggaaccccctgccccgagagcagctgttacttttagggacactaacagacctatcggcagacttggaacaagagtgcaggaacggaagcctctatgtgagagataacactggcgtcctgagctgtgagctcatagacctggacctttcttggttgggccatctttttctgttcccccgttggagttacctccctcctgccaggtggaattcctcaggggaagggcacttggagctgtgggatgcccctgtgccagtgtttcctttgaccatcagtcctggccccgtcacgcctatccctgtcctctacccagagagtgcttcctgcctgctcaggctcagaaacaagctcagaggtgtgcagcgaaacctggctgggagtctagttcgattgagtgctctggtgaaaagtaaacagaaagcttacttcatcctgtctcttggtagatcacacccagctgtcacccacgtgtccatcatcgtgcaggtccctgcccagctggtgtggcacagagcccttcggcctggtacagcctatgtgctgacagaactgcgagtgtccaagatccgtggtcagcgccagcatgtttggatgaccagtcagtcctcccgtctgttgctgctgaaaccagaatgtgtgcaggagctggaactggagctggaaggacccctcttagaggctgatcccaagccactccccatgcccagcaactcggaggacaagaaggatccagaaagtcttgtccggtattctagactcctatcctattcgggagcagtcactggcgtgttgaatgagcccgctggcctctatgagctggatgggcagctggggctttgccttgcctaccagcagttccgtggccttaggcgggtgatgcgacctggagtgtgtctgcagctccaggatgttcacctgctccagtcagtgggaggggggacaagaaggccagtgctcgccccctgcctccgtggcgccgttctgcttcaaagcttctctcgtcagaagcctggggctcactcatcccgtcaagcctacggggcctccctgtacgagcagctggtgtgggaacgtcagttaggacttcccctctacctgtgggctaccaaggccctggaggagctggcctgcaagctgtgtccccatgtgctgagacaccaccagttcctgcaacattcctctcctgggagccccagcctgggactgcaactcctggctcctaccctggatcttctagctccgccaggcagccctgttcggaatgcacacaatgagatccttgaagagccacatcactgtcccctccagaaatacactcggctgcagactccctcctccttccccactctggccaccctgaaagaagaaggacagcgtaaggcctgggcctcctttgaccctaaggcccttctgcccctcccggaggcctcctacctgcccagctgccaactcaatcgccgcctggcttggtcctggctctgtctgctgccctctgccttctgcccagcccaggttttacttggggttctggtggcttcatctcataaaggttgtctgcaacttcgggaccaaagtggttccctgccctgcctgctcctggccaagcactctcaacccctcagtgacccacggctgataggctgcctggtgcgggcagagaggtttcagttgatcgtagagagggacgtgagaagcatcttcccttcctggaaggagctgagcatgccaggcttcatccagaagcagcaggccagagtctatgtccagttctttctggctgatgccctgatcctgcctgtgcccagaccctgccttcattcagcaacaccctcaacacctcagacagatcccaccggcccagagggaccccacctaggacagagccggctcttcttgctctgccacaaggaggccctcatgaagcgtaatttttgtgtccccccaggagcaagtccagaggtgcccaagcccgccctcagtttctatgtgttggggagctggcttgggggcacccagaggaaggagggtactggatgggggctgcccgagccccagggaaatgacgacaatgatcagaaggttcacctcattttctttggctcttcagtccgctggtttgagttcttgcacccgggacaggtgtaccgactcgtagctcctggccccgctacaccaatgttgtttgaaaaggatggttcatcctgcatatctcggcgtcctctggagttggctggctgtgcatcctgcctcactgtccaggacaactggactctggagcttgaaagctcccaggatatccaagatgtgctggatgcaaacaagtcattgcctgaatcctcactgaccgacctgctcagtgacaatttcacagattccttggtgtctttctccgctgagattttgtcacggacactatgtgaaccccttgtggcgtctctctggatgaaactggggaacacgggggccatgagaaggtgtgtgaagctaacagtcgctcttgagactgctgaatgtgaattcccccctcacctggatgtatatatagaagacccacacttgcctccctcactaggactacttccaggagcccgggtccacttcagccagttggagaaaagggtttccagatctcacaatgtttattgttgtttccggtcatccacttatgtgcaggtcctgagttttccccctgagaccaccatcagcgttcccctgccccacatctacctggctgaacttctgcagggtggtcagtccccattccaggccactgcctcttgccatatcgtctctgtcttcagccttcagctcttctgggtgtgtgcttattgtaccagcatctgccggcagggaaagtgcactcgcctgggctccacttgccctacgcagacagctataagccaggccatcatcaggctcctggtggaggatgggactgccgaagccgtggtgacctgtaggaatcaccatgtggcagcagcactagggctgtgtcctagagagtgggcctccctcctagatttcgtccaagtgccaggcagagtggtcttgcagtttgcagggcctggagcccaacttgagtcttcagccagggttgacgagcccatgaccatgttcctctggacactttgtactagcccctctgtcctccgtcctattgtgctttcttttgagctggaaaggaaaccgtcgaagatcgtcccattagaacctcctcggctacagcgattccagtgtggagagctccctttcctgactcacgtgaaccccaggctccgattgtcctgcctttctatccgagagtcagagtactccagctctctggggatccttgcttcctcctgttaactgaactgcaaggatggcctgagagtccttccttgctgaaaacctgaaggcctaggtcctggctcctctccctacttgttctgtgattgaaccaaggactccagattcacaaactgctactccactataatttcccttctttggtgttctggtgccagcctgccttggcaaaattgtggcaacaggaaatcatggccctattaatatgtcctctgattgggacaaggcacctgcattcacaggcggccctgagcacctgggttctgactttgtcacaggagctgagggaacaaaagacttgctcgctgtggggtgatggtgacaggcctattgacctgcaatgaagccctctggtgtc

SEQ ID NO: 2004 - DNA, 2788 bp, Homo sapiens
ggcggcggtagcagccaggcttggcccccggcgtggagcagacgcggacccctccttcctggcggcggcggcgcgggctcagagcccggcaacgggcgggcgggcagaatgagtctgcaggtcttaaacgacaaaaatgtcagcaatgaaaaaaatacagaaaattgcgacttcctgttttcgccaccagaagttaccggaagatcgtctgttcttcgtgtgtcacagaaagaaaatgtgccacccaagaacctggccaaagctatgaaggtgacttttcagacacctctgcgggatccacagacgcacaggattctaagtcctagcatggccagcaaacttgaggctcctttcactcaggatgacacccttggactggaaaactcacacccggtctggacacagaaagagaaccaacagctcatcaaggaagtggatgccaaaactactcatggaattctacagaaaccagtggaggctgacaccgacctcctgggggatgcaagcccagcctttgggagtggcagctccagcgagtctggcccaggtgccctggctgacctggactgctcaagctcttcccagagcccaggaagttctgagaaccaaatggtgtctccaggaaaagtgtctggcagccctgagcaagccgtggaggaaaaccttagttcctattccttagacagaagagtgacacccgcctctgagaccctagaagacccttgcaggacagagtcccagcacaaagcggagactccgcacggagccgaggaagaatgcaaagcggagactccgcacggagccgaggaggaatgccggcacggtggggtctgtgctcccgcagcagtggccacttcgcctcctggtgcaatccctaaggaagcctgcggaggagcacccctgcagggtctgcctggcgaagccctgggctgccctgcgggtgtgggcacccccgtgccagcagatggcactcagacccttacctgtgcacacacctctgctcctgagagcacagccccaaccaaccacctggtggctggcagggccatgaccctgagtcctcaggaagaagtggctgcaggccaaatggccagctcctcgaggagcggacctgtaaaactagaatttgatgtatctgatggcgccaccagcaaaagggcacccccaccaaggagactgggagagaggtccggcctcaagcctcccttgaggaaagcagcagtgaggcagcaaaaggccccgcaggaggtggaggaggacgacggtaggagcggagcaggagaggacccccccatgccagcttctcggggctcttaccacctcgactgggacaaaatggatgacccaaacttcatcccgttcggaggtgacaccaagtctggttgcagtgaggcccagcccccagaaagccctgagaccaggctgggccagccagcggctgaacagttgcatgctgggcctgccacggaggagccaggtccctgtctgagccagcagctgcattcagcctcagcggaggacacgcctgtggtgcagttggcagccgagaccccaacagcagagagcaaggagagagccttgaactctgccagcacctcgcttcccacaagctgtccaggcagtgagccagtgcccacccatcagcaggggcagcctgccttggagctgaaagaggagagcttcagagaccccgctgaggttctaggcacgggcgcggaggtggattacctggagcagtttggaacttcctcgtttaaggagtcggccttgaggaagcagtccttatacctcaagttcgaccccctcctgagggacagtcctggtagaccagtgcccgtggccaccgagaccagcagcatgcacggtgcaaatgagactccctcaggacgtccgcgggaagccaagcttgtggagttcgatttcttgggagcactggacattcctgtgccaggcccacccccaggtgttcccgcgcctgggggcccacccctgtccaccggacctatagtggacctgctccagtacagccagaaggacctggatgcagtggtaaaggcgacacaggaggagaaccgggagctgaggagcaggtgtgaggagctccacgggaagaacctggaactggggaagatcatggacaggttcgaagaggttgtgtaccaggccatggaggaagttcagaagcagaaggaactttccaaagctgaaatccagaaagttctaaaagaaaaagaccaacttaccacagatctgaactccatggagaagtccttctccgacctcttcaagcgttttgagaaacagaaagaggtgatcgagggctaccgcaagaacgaagagtcactgaagaagtgcgtggaggattacctggcaaggatcacccaggagggccagaggtaccaagccctgaaggcccacgcggaggagaagctgcagctggcaaacgaggagatcgcccaggtccggagcaaggcccaggcggaagcgttggccctccaggccagcctgaggaaggagcagatgcgcatccagtcgctggagaagacagtggagcagaagactaaagagaacgaggagctgaccaggatctgcgacgacctcatctccaagatggagaagatctgacctccacggagccgctgtccccgcccccctgctcccgtctgtctgtcctgtctgattctcttaggtgtcatgttcttttttctgtcttgtcttcaactttttttaaaactagattgctttgaaaacatgactcaataaaagtttcctttcaatttaaaaaaaa

SEQ ID NO: 2005 - DNA, 3269 bp, Homo sapiens
tcgcctctcagccaagtccaatagcactcacttaggtgtgcatctgtggctttctctctgtctggtcagtgctcctttatatgtccataccccctgccagagggcagcattgacggtgtacagagcccagtgtgactctcctgcagctggggacatagaagagctctgtgacgatggcagatgtggttctccagcctcttgcctggctgccagtgggagtagcctgtctgttctggcacagggggctgttccatatggagggtcagaaactggccttcacagccacccaggcgttccttccacttctgcacgtcttcctttccccatgaagatttgggtgtaccctggttgtggtctctgaagactgggcaggcctgtactttgtgaagctttcagctgtctctggtaggcctgatgaagcctatctgcagaggttggcctgaagccataatgagcagttctgttctttttagcccttgtctagtttatggctctgttgcagacatgcctttctgtgtcttggttaaaagtactggtgtgtctttgcatttaggtgtggtctgtgagtctgggaaggcttctagaggagagccctccagggttgctctttggggtgggagtagtgggagcggaaatggaacgctgactgccctcttaaagccagaagggtacttcattcagggcaggcagttggcatgtgtaggcactcaggagtcttccttcagtttcagcggccggtgttcatcatcaggagtggcagggttggatatgggagtgagaatgtgcctctgagattgaccagtggccatagactccagcaagatgtgcatcttggtctgagaggcacccactgtaccagaaaccagacttgtatcgaccaatggcttattagccccaggaggcttattactgccacaaatgtccctgatggtgagcagcacttggccactactgtctgatgttaaccagagttatgggggtggtttctgcaaatacacaatactgtggaggggttatgtggcttacccagaggtgcccagatagcaaatgaaggtgtaagattggaatccctgtctttctggttgacccttggcttggctaatcattcattcattcattccacacacattgatgaatgccgactctgtactgggttctgttctaggaactagacagacacatcacctatgctgctcttgtggggcttctgttccgctgggggagacagtcagtagtaagccttcaagcaaaggcatggctgctggtgtgatgagtgccatgaagacccataaggctgcgttaaaggagatgggtggtccaggaaggcctctctgaggaggtggcatttgagcactcaagtgccttacactggacttctgaccccatgagctggaacttaggatatctgatctagaagtacctctagaagtcctcttcccaataaacaagctaaggcccagtgagcttaaggtgtgaattcatgggatgattcatgggaaagatgaaattaaacccaagaaggacaagtataatagccggccactgctctgctcacaccagccttgggctccagccctctgccttttcatcccagaatgtgttttattatcttcaagactcagccctttgaaagatttagacttccaaattgcatttattaacaataatacatttattttctcatggctgggtgtggggagggggtagaaattttaaacacatttgtgacggttgatcagccctccaggtaaggcaacggctgactgcctggagctggtgtttttcctgcctaggcggagacaccgcccaattttgtaccaccagctgccgtcactgtcagagtggaatttccattggtgtttctgaaatagcagtgtttcctggaggacccccatttgtactttctggattccatctggacctggtttagggggttagatgcttttgaatgggggctggagagaccctactgatgcctctgaccagagatggtgaggcaggactcacagggcccccagggtttattttagggagagagaagcccacagttaaatcagaggtcacaaatacagcagcagaccccacctctcccaaggaccagactgagctataattggccaataatttcatctaaaagcaggaatcctacatcaatttgaaaggagcttctggctgaagtaagactttattaattagcctgttaggaaaatagtttcccagtattatgagggctggataatttcatgcccactgtttttcttgaagcttctcaaaggcagacacagccgcgtgcagcggctcacgcctacaatctcagcacgttgggaggtcgaggcaggtggatcacgaggccaggagatcgagaccatcctggccaacatggtgaaaccccatctctacaaaaatacaaaaattaattgggcgtggtggtgggcgcctgtaatcccagctactcaggaggctgaggcaggagaatcagaggttgcagtgaaccgagattgtgccactacactccagcctggccacagagcgagactcagaaaacaagggaagacactagattttcatttttgtactaaatagaaaaagtaatatctttttaaaaatgtgttttgtttgtttttaactgtttgttcatgccaatgtgccaggcaccatatttattctttaatctatacagaaatgctgctggatgaatggaattatgctcactctgccaatgagggaaccaaggctcagaaaggttaagtaaccaacctaaggtcaggtagtactgaggagctgtgcttggatacaaaaccaggtcatccaacctggaatcttagctttgacccccaaccttctcccggcaactttgatgataatatggaaataccttagactcttgacttgactttactttctcttctctgttataaaatctgctacatttcttttcctgggaaagcgaaatagattatgccaaaagttctgatttttaaaaatgttttattgtgggccgggcgcagtggctcatgcctgtaatcccaggactttgggaggccgaggtgggtggatcatgaagtcaggagatcaagaccatcctggccaacacagtgaaaccccatgtctactaaaaatacaaaaattaactgggcttggtggtgcacgcctgtaatcccagctactcaggaggctgaggcaggagaatcccttgaacctgggaggcggaggttgtagtgagccgagattgtgccactgcactccagcctggcaacagagcaagactc

SEQ ID NO: 2006 - DNA, 3269 bp, Homo sapiens
tcgcctctcagccaagtccaatagcactcacttaggtgtgcatctgtggctttctctctgtctggtcagtgctcctttatatgtccataccccctgccagagggcagcattgagggtgtacagagcccagtgtgactctcctgcagctggggacatagaagagctctgtgacgatggcagatgtggttctccagcctcttgcctggctgccagtgggagtagcctgtctgttctggcacagggggctgttccatatggagggtcagaaactggccttcacagccacccaggcgttccttccacttctgcacgtcttcctttccccatgaagatttgggtgtaccctggttgtggtctctgaagactgggcaggcctgtactttgtgaagctttcagctgtctctggtaggcctgatgaagcctatctgcagaggttggcctgaagccataatgagcagttctgttctttttagcccttgtctagtttatggctctgttgcagacatgcctttctgtgtcttggttaaaagtactggtgtgtctttgcatttaggtgtggtctgtgagtctgggaaagcttctagaggagagccctccagggttgctctttggggtgggagtagtgggagcggaaatggaacgctgactgccctcttaaagccagaagggtacttcattcagggcaggcagttggcatgtgtaggcactcaggagtcttccttcagtttcagcggccggtgttcatcatcaggagtggcagggttggatatgggagtgagaatgtgcctctgagattgaccagtggccatagactccagcaagatgtgcatcttggtctgagaggcacccactgtaccagaaaccagacttgtatcgaccaatggcttattagccccaggaggcttattactgccacaaatgtccctgatggtgagcagcacttggccactactgtctgatgttaaccagagttatgggggtggtttctgcaaatacacaatactgtggaggggttatgtggcttacccagaggtgcccagatagcaaatgaaggtgtaagattggaatccctgtctttctggttgacccttggcttggctaatcattcattcattcattccacacacattgatgaatgccgactctgtactgggttctgttctaggaactagacagacacatcacctatgctgctcttgtggggcttctgttccgctgggggagacagtcagtagtaagccttcaagcaaaggcatggctgctggtgtgatgagtgccatgaagacccataaggctgcgttaaaggagatgggtggtccaggaaggcctctctgaggaggtggcatttgagcactcaagtgccttacactggacttctgaccccatgagctggaacttaggatatctgatctagaagtacctctagaagtcctcttcccaataaacaagctaaggcccagtgagcttaaggtgtgaattcatggggtgattcatgggaaagatgaaattaaacccaagaaggacaagtataatagccggccactgctctgctcacaccagccttgggctccagccctctgccttttcatcccagaatgtgttttattatcttcaagactcagccctttgaaagatttagactgccaaattgcatttattaacaataatacatttattttctcatggctgggtgtggggagggggtagaaattttaaacacatttgtgacggttgatcagccctccaggtaaggcaacggctgactgcctggagctggtgtttttcctgcctaggcggagacaccgcccaattttgtaccaccagctgccgtcactgtcagagtggaatttccattggtgtttctgaaatagcagtgtttcctggaggacccccatttgtactttctggattccatctggacctggtttagggggttagatgcttttgaatgggggctggagagaccctactgatgcctctgaccagagatggtgaggcaggactcacagggcccccagggtttattttagggagagagaagcccacagttaaatcagaggtcacaaatacagcagcagaccccacctctcccaaggaccagactgagctataattggccaataatttcatctaaaagcaggaatcctacatcaatttgaaaggagcttctggctgaagtaagactttattaattagcctgttaggaaaatagtttcccagtattatgagggctggataatttcatgcccactgtttttcttgaagcttctcaaaggcagacacagccgcgtgcagcggctcacgcctacaatctcagcacgttgggaggtcgaggcaggtggatcacgaggccaggagatcgagaccatcctggccaacatggtgaaaccccatctctacaaaaatacaaaaattaattgggcgtggtggtgggcgcctgtaatcccagctactcaggaggctgaggcaggagaatcagaggttgcagtgaaccgagattgtgccactacactccagcctggccacagagcgagactcagaaaacaagggaagacactagattttcatttttgtactaaatagaaaaagtaatatctttttaaaaatgtgttttgtttgtttttaactgtttgttcatgccaatgtgccaggcaccatatttattctttaatctatacagaaatgctgctggatgaatggaattatgctcactctgccaatgagggaaccaaggctcagaaaggttaagtaaccaacctaaggtcaggtagtactgaggagctgtgcttggatacaaaaccaggtcatccaacctggaatcttagctttgacccccaaccttctcccggcaactttgatgataatatggaaataccttagactcttgacttgactttactttctcttctctgttataaaatctgctacatttcttttcctgggaaagcgaaatagattatgccaaaagttctgatttttaaaaatgttttattgtgggccgggcgcagtggctcatgcctgtaatcccaggactttgggaggccgaggtgggtggatcatgaagtcaggagatcaagaccatcctggccaacacagtgaaaccccatgtctactaaaaatacaaaaattaactgggcttggtggtgcacgcctgtaatcccagctactcaggaggctgaggcaggagaatcccttgaacctgggaggcggaggttgtagtgagccgagattgtgccactgcactccagcctggcaacagagcaagactc

SEQ ID NO: 2007 - DNA, 3046 bp, Homo sapiens
gttggaaacggcactgctgagtgaggttgaggggtgtctcggtatgtgcgccttggatctggtgtaggcgaggtcacgcctctcttcagacagcccgagccttcccggcctggcgcgtttagttcggaactgcgggacgccggtgggctagggcaaggtgtgtgccctcttcctgattctggagaaaaatgccggtccggaagcaagatacccagagagcattgcaccttttggaggaatatcgttcaaaactaagccaaactgaagacagacagctcagaagttccatagaacgggttattaacatatttcagagcaacctctttcaggctttaatagatattcaagaattttatgaagtgaccttactggataatccaaaatgtatagatcgttcaaagccgtctgaaccaattcaacctgtgaatacttgggagatttccagccttccaagctctactgtgacttcagagacactgccaagcagccttagccctagtgtagagaaatacaggtatcaggatgaagatacacctcctcaagagcatatttccccacaaatcacaaatgaagtgataggtccagaattggttcatgtctcagagaagaacttatcagagattgagaatgtccatggatttgtttctcattctcatatttcaccaataaagccaacagaagctgttcttccctctcctcccactgtccctgtgatccctgtcctgccagtccctgctgagaatactgtcatcctacccaccataccacaggcaaatcctcccccagtactggtcaacacagatagcttggaaacaccaacttacgttaatggcacagatgcagattatgaatatgaagaaatcacacttgaaaggggaaattcagggcttggtttcagcattgcaggaggtacggacaacccacacattggagatgactcaagtattttcattaccaaaattatcacagggggagcagccgcccaagatggaagattgcgggtcaatgactgtatattacaagtaaatgaagtagatgttcgtgatgtaacacatagcaaagcagttgaagcgttgaaagaagcagggtctattgtacgcttgtatgtaaaaagaaggaaaccagtgtcagaaaaaataatggaaataaagctcattaaaggtcctaaaggtcttgggtttagcattgctggaggtgttggaaatcagcatattcctggggataatagcatctatgtaaccaaaataattgaaggaggtgcagcacataaggatggcaaacttcagattggagataaacttttagcagtgaataacgtatgtttagaagaagttactcatgaagaagcagtaactgccttaaagaacacatctgattttgtttatttgaaagtggcaaaacccacaagtatgtatatgaatgatggctatgcaccacctgatatcaccaactcttcttctcagcctgttgataaccatgttagcccatcttccttcttgggccagacaccagcatctccagccagatactccccagtttctaaagcagtacttggagatgatgaaattacaagggaacctagaaaagttgttcttcatcgtggctcaacgggccttggtttcaacattgtaggaggagaagatggagaaggaatatttatttcctttatcttagccggaggacctgctgatctaagtggagagctcagaaaaggagatcgtattatatcggtaaacagtgttgacctcagagctgctagtcatgagcaggcagcagctgcattgaaaaatgctggccaggctgtcacaattgttgcacaatatcgacctgaagaatacagtcgttttgaagctaaaatacatgatttacgggagcagatgatgaatagtagtattagttcagggtcaggttctcttcgaactagccagaagcgatccctctatgtcagagccctttttgattatgacaagactaaagacagtgggcttcccagtcagggactgaacttcaaatttggagatatcctccatgttattaatgcttctgatgatgaatggtggcaagccaggcaggttacaccagatggtgagagcgatgaggtcggagtgattcccagtaaacgcagagttgagaagaaagaacgagcccgattaaaaacagtgaaattcaattctaaaacgagagataaagggcagtcattcaatgacaagcgtaaaaagaacctcttttcccgaaaattccccttctacaagaacaaggaccagagtgagcaggaaacaagtgatgctgaccagcatgtaacttctaatgccagcgatagtgaaagtagttaccgtggtcaagaagaatacgtcttatcttatgaaccagtgaatcaacaagaagttaattatactcgaccagtgatcatattgggacctatgaaagacaggataaatgatgacttgatctcagaatttcctgacaaatttggatcctgtgttcctcatacaactagaccaaaacgagattatgaggtagatggaagagattatcattttgtgacttcaagagagcagatggaaaaagatatccaggaacataaattcattgaagctggccagtataacaatcatctatatggaacaagtgttcagtctgtacgagaagtagcaggaaagggcaaacactgtatccttgatgtgtctggaaatgccataaagagattacagattgcacagctttaccctatctccatttttattaaacccaaatccatggaaaatatcatggaaatgaataagcgtctaacagaagaacaagccagaaaaacatttgagagagccatgaaactggaacaggagtttactgaacatttcacagctattgtacagggggatacgctggaagacatttacaaccaagtgaaacagatcatagaagaacaatctggttcttacatctgggttccggcaaaagaaaagctatgaaaactcatgtttctctgtttctcttttccacaattccattttctttggcatctctttgccctttcctctggaaaaaa

SEQ ID NO: 2008 - DNA, 2089 bp, Homo sapiens
cgcactcaaaacaaaggaagaccgtcctcgactgcagaggaagcaggaagctgtcggcccagctctgagcccagctgctggagccccgagcagcggcatggagtccgtggccctgtacagctttcaggctacagagagcgacgagctggccttcaacaagggagacacactcaagatcctgaacatggaggatgaccagaactggtacaaggccgagctccggggtgtcgagggatttattcccaagaactacatccgcgtcaagccccatccgtggtactcgggcaggatttcccggcagctggccgaagagattctgatgaagcggaaccatctgggagccttcctgatccgggagagtgagagctccccaggggagttctctgtgtctgtgaactatggagaccaggtgcagcacttcaaggtgctgcgtgaggcctcggggaagtacttcctgtgggaggagaagttcaactccctcaacgagctggtcgacttctaccgcaccaccaccatcgccaagaagcggcagatcttcctgcgcgacgaggagcccttgctcaagtcacctggggcctgctttgcccaggcccagtttgacttctcagcccaggacccctcgcagctcagcttccgccgtggcgacatcattgaggtcctggagcgcccagacccccactggtggcggggccggtcctgcgggcgcgttggcttcttcccacggagttacgtgcagcccgtgcacctgtgagcagcccggcggccgatctggccaacgggcctttttacaggaactgaggtccagagaggacatggacacccccagctctgtcagagtcacacggggctcagtggacggccttggactgaacgtgggctcctaactgcctccggccgctctgcacaaactgggatggcccaggtcccccagcaagggtacccagcaagggtagctccggggcttcctggctggttgctttccattggctgccagctgtgtgacaccacagggcggagtctgtggaggccccgcccacctcctcttgtcaatggccccatctgccaggaaggttgaggactcccaggtttcacccactggaggctcaacctaaggaaccctggccatggtgggtgggttcaccttgggctgaccacccactgggcctgcctgcccctccctcaaaaggcccctggagttgttcaggctgttgggaggtggctcagcctcgaaggacagactgcacacctgttgacctaaactcactggacagactccaggtggacaccaactcctcaacagccccatgacttcagctccacctggggcacccagcaccccaccacagggctagaggccctaagaccctgaaaaaggggcgggcagtagggaaggtggaggcacactcctcttctgttggacaggtgagctctgagggcaagccctgggcccagccacgcagagaccctggctgccctggctcttgtttgtttaggcccaggttctgcccagaccggggcccagcagagctctcaggaggctgagaaacctccagggcagacagaaagttggggccagagctaggttttagagatcctacaggatcccacatgggacggctacctaggtggggcacggcccctacccgagaacaggagggtcctccagagaatgtgccatgatcagggatatgagcagggcctgcccagagcctgggcacctttgggagagggaaaagtgaggtgggacttggaaaggctttgaacgccaggctgatggttgagggatggtgggcagggagggagggcgaagaggctccctctggcatttgggagccggtgggtggagggaggagcccttggaggtggctgcagtcccttaatggggggccttgctctgggcatgtggggctcttcctccatccagagctggcccaagacccttagaaccctgagtgctggcaaatctcactgctcctgacccagcctgtgtattcaaaacgaaaacagtaaaaccaacatcaggatgtccgtcaaaaaaaaaaaaaaaaaaaaaaaaaaaaaaaaaaaaaaaaaaaaaaaaaaaaaaaaa

SEQ ID NO: 2009 - DNA, 3782 bp, Homo sapiens
ggcgagttcttagagaaaaaggctgcttagctgctgcttatcatgtaacctcaaaaggaaactgatcgtctttctcatgctgtcacgtacttgggttattatcgctgattacagctggaaacaattgatttgctcttacgtatttgtgtgacttgactcttcaaacacaaaggttaacaggaagatctcgagggccctggctgaacttcaccttttggctttcttggcctgatgctgaactctcgaggttgagccccatatgggggttggcaggcagcagagaggcccctttcaaggtgttcgggtaaagaactcagtgaaggaactcctgttgcacatccgaagtcataaacagaaggcttctggccaagctgtggatgattttaagacacaaggtgtgaacatagaacagttcagagaattgaagaacacagtatcatacagtgggaaaaggaaagggcccgattcgttgtctgatggacctgcttgcaaaaggccagctctgttgcattcccaatttttgacaccacctcaaacaccaacgcccggggagagcatggaagatgttcatctcaatgaacccaaacaggagagcagtgctgatctgcttcagaacattatcaacattaagaatgaatgcagccccgtttccctgaacacagttcaagttagctggctgaaccccgtggtggtccctcagagctcccccgcagagcagtgtcaggacttccatggagggcaggtcttttctccacctcagaaatgccaaccattccaagtcaggggctcccaacaaatgatagaccaggcttccctgtaccagtattctccacagaaccagcatgtagagcagcagccacactacacccacaaaccaactctggaatacagtccttttcccatacctccccagtcccccgcttatgaaccaaacctctttgatggtccagaatcacagttttgcccaaaccaaagcttagtttcccttcttggtgatcaaagggaatctgagaatattgctaatcccatgcagacttcctccagtgttcagcagcaaaatgatgctcacttgcacagcttcagcatgatgcccagcagcgcctgtgaggccatggtggggcacgagatggcctctgactcttcaaacacttcactgccattctcaaacatgggaaatccaatgaacaccacacagttagggaaatcactttttcagtggcaggtggagcaggaagaaagcaaattggcaaatatttcccaagaccagtttctttcaaaggatgcagatggtgacacgttccttcatattgctgttgcccaagggagaagggcactttcctatgttcttgcaagaaagatgaatgcacttcacatgctggatattaaagagcacaatggacagagtgcctttcaggtggcagtggctgccaatcagcatctcattgtgcaggatctggtgaacatcggggcacaggtgaacaccacagactgctggggaagaacacctctgcatgtgtgtgctgagaagggccactcccaggtgcttcaggcgattcagaagggagcagtgggaagtaatcagtttgtggatcttgaggcaactaactatgatggcctgactccccttcactgtgcagtcatagcccacaatgctgtggtccatgaactccagagaaatcaacagcctcattcacctgaagttcaggagcttttactgaagaataagagtctggttgataccattaagtgcctaattcaaatgggagcagcggtggaagcgaaggatcgcaaaagtggccgcacagccctgcatttggcagctgaagaagcaaatctggaactcattcgcctctttttggagctgcccagttgcctgtcttttgtgaatgcaaaggcttacaatggcaacactgccctccatgttgctgccagcttgcagtatcggttgacacaattagatgctgtccgcctgttgatgaggaagggagcagacccaagtactcggaacttggagaacgaacagccagtgcatttggttcccgatggccctgtgggagaacagatccgacgtatcctgaagggaaagtccattcagcagagagctccaccgtattagctccattagcttggagcctggctagcaacactcactgtcagttaggcagtcctgatgtatctgtacatagaccatttgccttatattggcaaatgtaagttgtttctatgaaacaaacatatttagttcactattatatagtgggttatattaaaagaaaagaagaaaaatatctaatttctcttggcagatttgcatatttcatacccaggtatctgggatctagacatctgaatttgatctcaatggtaacattgccttcaattaacagtagcttttgagtaggaaaggactttgatttgtggcacaaaacattattaatatagctattgacagtttcaaagcaggtaaattgtaaatgtttctttaagaaaaagcatgtgaaaggaaaaaggtaaatacagcattgaggcttcatttggccttagtccctgggagttactggcgttggacaggcttcagtcattggactagatgaaaggtgtccatggttagaatttgatctttgcaaactgtatataattgttatttttgtccttaaaaatattgtacatacttggttgttaacatggtcatatttgaaatgtataagtccataaaatagaaaagaacaagtgaattgttgctatttaaaaaaattttacaattcttactaaggagtttttattgtgtaatcactaagtctttgtagataaagcagatggggagttacggagttgttcctttactggctgaaagatatattcgaattgtaaagatgctttttctcatgcattgaaattatacattatttgtagggaattgcatgcttttttttttttttctcccgagacagggtcttgctctggcgcccaggctggagtacagtggcatgatcttggctcacttcagccttgacttgggctcaagtgatcctcctacctgagccttctgagtaactggaactacaggtgtgcactcctcgcctggctaattttttattttttgtacaggcaggatcttgccaccttgcccaggctggtcttgaactcctgagctcatgccatctgcctgccttagtctcccaaaatgctgggattacaggagtgagccaccatgcccggctggcagttgcatggaagagaacacctctttatggcttaccctctagaatttctaatttatgtgttctgttgaaatttttgtttttttacctttattgaaacaacaaaaagtcagtattgaaacatatcttcctgttttctgttgtcaaatgatgataatgtgccatgatgttttatatatatcattcagaaaaagttttattttttaataacattctattaacattattttgcttgccgctggcatgcctgaggaatgtatttggctttgattacacactaagtttttgtaataaatttgactcattaaaaaccttttttttttaaaaaaaaaaaaaaagaaaatctcattagtgaacttatctttgcagctgagtacttaaattctttttaaaaagataccctttggattgatcacattgtttgacccagtatgtcttgtagacacgttagttataatcaccttgtatctctaaatatggtgtgatatgaaccagtccattcacattggaaaaactgatggttttaaataaactaattcactaataaaaaaaaaaaaaaaa

SEQ ID NO: 2010 - DNA, 3938 bp, Homo sapiens
gtactggcccgcgccgtccgcccgccgacagctccctgagccagcccgggaggcagccgcgcgcagcgagccggtggcgcaggtgtcggggtcctcgagcgcccagcctgggagcatgattgtggacaagctgctggacgacagccgcggcggagaggggctgcgggacgcggcgggcggctgcggcctcatgaccagcccgctcaacctgagctacttctacggcgcgtcgccgcccgccgccgccccgggcgcctgcgacgccagctgctcggtcttgggcccctcggcgcccggctcgcccggctccgactcctccgacttctcctctgcctcgtcggtgtcctcctgcggcgccgtggagtcccggtcgagaggcggcgcccgcgccgagcgccagccagttgagccccatatgggggttggcaggcagcagagaggcccctttcaaggtgttcgggtaaagaactcagtgaaggaactcctgttgcacatccgaagtcataaacagaaggcttctggccaagctgtggatgattttaagacacaaggtgtgaacatagaacagttcagagaattgaagaacacagtatcatacagtgggaaaaggaaagggcccgattcgttgtctgatggacctgcttgcaaaaggccagctctgttgcattcccaatttttgacaccacctcaaacaccaacgcccggggagagcatggaagatgttcatctcaatgaacccaaacaggagagcagtgctgatctgcttcagaacattatcaacattaagaatgaatgcagccccgtttccctgaacacagttcaagttagctggctgaaccccgtggtggtccctcagagctcccccgcagagcagtgtcaggacttccatggagggcaggtcttttctccacctcagaaatgccaaccattccaagtcaggggctcccaacaaatgatagaccaggcttccctgtaccagtattctccacagaaccagcatgtagagcagcagccacactacacccacaaaccaactctggaatacagtccttttcccatacctccccagtcccccgcttatgaaccaaacctctttgatggtccagaatcacagttttgcccaaaccaaagcttagtttcccttcttggtgatcaaagggaatctgagaatattgctaatcccatgcagacttcctccagtgttcagcagcaaaatgatgctcacttgcacagcttcagcatgatgcccagcagcgcctgtgaggccatggtggggcacgagatggcctctgactcttcaaacacttcactgccattctcaaacatgggaaatccaatgaacaccacacagttagggaaatcactttttcagtggcaggtggagcaggaagaaagcaaattggcaaatatttcccaagaccagtttctttcaaaggatgcagatggtgacacgttccttcatattgctgttgcccaagggagaagggcactttcctatgttcttgcaagaaagatgaatgcacttcacatgctggatattaaagagcacaatggacagagtgcctttcaggtggcagtggctgccaatcagcatctcattgtgcaggatctggtgaacatcggggcacaggtgaacaccacagactgctggggaagaacacctctgcatgtgtgtgctgagaagggccactcccaggtgcttcaggcgattcagaagggagcagtgggaagtaatcagtttgtggatcttgaggcaactaactatgatggcctgactccccttcactgtgcagtcatagcccacaatgctgtggtccatgaactccagagaaatcaacagcctcattcacctgaagttcaggagcttttactgaagaataagagtctggttgataccattaagtgcctaattcaaatgggagcagcggtggaagcgaaggatcgcaaaagtggccgcacagccctgcatttggcagctgaagaagcaaatctggaactcattcgcctctttttggagctgcccagttgcctgtcttttgtgaatgcaaaggcttacaatggcaacactgccctccatgttgctgccagcttgcagtatcggttgacacaattagatgctgtccgcctgttgatgaggaagggagcagacccaagtactcggaacttggagaacgaacagccagtgcatttggttcccgatggccctgtgggagaacagatccgacgtatcctgaagggaaagtccattcagcagagagctccaccgtattagctccattagcttggagcctggctagcaacactcactgtcagttaggcagtcctgatgtatctgtacatagaccatttgccttatattggcaaatgtaagttgtttctatgaaacaaacatatttagttcactattatatagtgggttatattaaaagaaaagaagaaaaatatctaatttctcttggcagatttgcatatttcatacccaggtatctgggatctagacatctgaatttgatctcaatggtaacattgccttcaattaacagtagcttttgagtaggaaaggactttgatttgtggcacaaaacattattaatatagctattgacagtttcaaagcaggtaaattgtaaatgtttctttaagaaaaagcatgtgaaaggaaaaaggtaaatacagcattgaggcttcatttggccttagtccctgggagttactggcgttggacaggcttcagtcattggactagatgaaaggtgtccatggttagaatttgatctttgcaaactgtatataattgttatttttgtccttaaaaatattgtacatacttggttgttaacatggtcatatttgaaatgtataagtccataaaatagaaaagaacaagtgaattgttgctatttaaaaaaattttacaattcttactaaggagtttttattgtgtaatcactaagtctttgtagataaagcagatggggagttacggagttgttcctttactggctgaaagatatattcgaattgtaaagatgctttttctcatgcattgaaattatacattatttgtagggaattgcatgcttttttttttttttctcccgagacagggtcttgctctggcgcccaggctggagtacagtggcatgatcttggctcacttcagccttgacttgggctcaagtgatcctcctacctgagccttctgagtaactggaactacaggtgtgcactcctcgcctggctaattttttattttttgtacaggcaggatcttgccaccttgcccaggctggtcttgaactcctgagctcatgccatctgcctgccttagtctcccaaaatgctgggattacaggagtgagccaccatgcccggctggcagttgcatggaagagaacacctctttatggcttaccctctagaatttctaatttatgtgttctgttgaaatttttgtttttttacctttattgaaacaacaaaaagtcagtattgaaacatatcttcctgttttctgttgtcaaatgatgataatgtgccatgatgttttatatatatcattcagaaaaagttttattttttaataacattctattaacattattttgcttgccgctggcatgcctgaggaatgtatttggctttgattacacactaagtttttgtaataaatttgactcattaaaaaccttttttttttaaaaaaaaaaaaaaagaaaatctcattagtgaacttatctttgcagctgagtacttaaattctttttaaaaagataccctttggattgatcacattgtttgacccagtatgtcttgtagacacgttagttataatcaccttgtatctctaaatatggtgtgatatgaaccagtccattcacattggaaaaactgatggttttaaataaactaattcactaataaaaaaaaaaaaaaaa

SEQ ID NO: 2011 - DNA, 1430 bp, Homo sapiens
gctgcagatggcggaaatggatccggtagccgagttcccccagcctcccggtgctgcgcgctgggctgaggttatggctcgcttcgcggccaggctgggcgcgcagggccggcgggtggtgttggttacgtcaggcggcaccaaggtcccactggaagcgcggccggtgcgcttcctggacaacttcagcagcgggcggcgcggtgcaacctcggccgaggccttcctagccgccggctacggggtcctgttcttgtatcgcgctcgctctgccttcccctatgcccaccgcttcccaccccagacttggctgtccgctctgcggccttcgggcccagccctttcgggcttgctgagcctggaggccgaggagaatgcacttccgggttttgctgaggctctgaggagctaccaggaggctgcggctgcaggcaccttcctggcagtagagttcaccactttggcggactatttgcatctgttgcaggctgcggcccaggcactcaatccgctaggcccttctgcgatgttttacctggctgcggctgtgtcagatttctatgttcctgtctctgaaatgcctgaacacaagatccagtcatctgggggcccactgcagataacaatgaagatggtgccaaaactgctttctcctttggttaaagattgggctcccaaagcatttataatttcctttaagttggagactgaccccgccattgtaattaatcgagctcggaaggctttggaaatttatcagcatcaagtggtggtggctaatatccttgagtcacgacagtcctttgtgtttattgtaaccaaagactcggaaaccaagttattgctatcaaggaagaaatagaaaaaggcgtagagatagaagagaagatagtggataatcttcagtctcgacacacagcttttataggtgacagaaactgaagtaaaaagcccttataggattaaaaattgttcagggctcttagagatggtgaaaactacaaaaaaaaccatggctttcatatggacagagaaaatgaaagaaagggaaaaggcagtggtgtgtaggcaaatatggtttggcattcgtcttttaatgacacctgatatgatgtcattttgattttgaaattgaacactagaactgttaatcacctttaaaaagaagagcttattgggaattatatattccttaaaatatacatgggggcctgaatgtcagccatctttatactatagaaaaaggattatggatgcatgaatggtcatgctttggagatcaaatattggttgaatgcctatgtatgtcaggccctgtgctgagccatgaggattaaaaagatgaataaacatatcttgtttaggaaatggatgtataaaaaaatcaagtgcaataaagtgtgtgtccaaaagctgacacaatggaaagg

SEQ ID NO: 2012 - DNA, 2395 bp, Homo sapiens
ggaagagaagaagcggaagcgagagagggagcactgtgacacggagggagaggctgacgactttgatcctgggaagaaggtggaggtggagccgcccccagatcggccagtccgagcgtgccggacacagccagttctcggtggaacttaaaatgctgtgagacaccagacagacagatactgtgaacttggagctctctaatgaagggataccaaagtcttgtattcaatttttttttccttaaattgtcagccgaaaatgagagcacacctattcagcaactcctggaacacttcctccgccagcttcagagaaaagatccccatggattttttgcttttcctgtcacggatgcaattgctcctggatattcaatgataataaaacatcccatggattttggcaccatgaaagacaaaattgtagctaatgaatacaagtcagttacggaatttaaggcagatttcaagctgatgtgtgataatgcaatgacatacaataggccagataccgtgtactacaagttggcgaagaagatccttcacgcaggctttaagatgatgagcaaacaggcagctcttttgggcaatgaagatacagctgttgaggaacctgtccctgaagttgtaccagtacaagtagaaactgccaagaaatccaaaaagccgagtagagaagttatcagctgcatgtttgagcctgaagggaatgcctgcagcttgacggacagtaccgcagaggagcacgtgctggcgctggtggagcacgcagctgacgaagctcgggacaggatcaaccggttcctcccaggcggcaagatgggctatctgaagaggaacggggacgggagcctgctctacagcgtggtcaacacggccgagccggacgctgatgaggaggagacccacccggtggacttgagctcgctctccagtaagctactcccaggcttcaccacgctgggcttcaaagacgagagaagaaacaaagtcacctttctctccagtgccactactgcgctttcgatgcagaataattcagtatttggcgacttgaagtcggacgagatggagctgctctactcagcctacggagatgagacaggcgtgcagtgtgcgctgagcctgcaggagtttgtgaaggatgctgggagctacagcaagaaagtggtggacgacctcctggaccagatcacaggcggagaccactctaggacgctcttccagctgaagcagagaagaaatgttcccatgaagcctccagatgaagccaaggttggggacaccctaggagacagcagcagctctgttctggagttcatgtcgatgaagtcctatcccgacgtttctgtggatatctccatgctcagctctctggggaaggtgaagaaggagctggaccctgacgacagccatttgaacttggatgagacgacgaagctcctgcaggacctgcacgaagcacaggcggagcgcggcggctctcggccgtcgtccaacctcagctccctgtccaacgcctccgagagggaccagcaccacctgggaagcccttctcgcctgagtgtcggggagcagccagacgtcacccacgacccctatgagtttcttcagtctccagagcctgcggcctctgccaagacctaactctagaccaccttcagctcttttattttatttttttagttttattttgcacgtgtagagtttttgtcatcagacaaggactttgatcctgtcccctttggcatgcgggaagcagccgcggggaggtaatgaattgtctgtggtatcatgtcagcagagtctccaagccccacgaaccctgaggagtggagtcatacgcgaaggccatatggccatcgtgtcagcagagagagtctctgtacacagccccgtgaaccctgaggagtggagtcatacacgaagggcgtgtggccatcgtgtcagcagagagagtctctgtacacagccccgtgaaccctgaggagtggagtcatacgcgaagggtgtgtggccaggctgcagagctgcgtgccgtttgtgtccgagcatcacgtgtggctccagcccttgtttctgccagtgtagacacctctgtctgccccactgtcctggggtcgctcttgggaggcacaggcatgggtgtgtctggcctcattctgtatcagtccagtgtgttcctgtcatagtttgtgtctcccaggcaggccatggtaggggcctcgcaggggccattggggagcacagggccaggctggggtgaggagagctcccctgttttctgtttaattgatgagcctgggaaaggagtgtgttctgcctgcccgttacagtggagcgttccgtgtccataaaacgttttctaactgggaaaaaaaaaaaaaaaaaaaaa

SEQ ID NO: 2013 - DNA, 2845 bp, Homo sapiens
gttttccggcgcggcccagcgagctcggcaacctcggcgcagcgagcgcgggcggccagccagggccagggggcggtggcggccaaggtccgaccgggtgccagctgttcccagcccccgcctcgggcccgccgccggcgccgccatgggcaagaagcacaagaagcacaaggccgagtggcgctcgtcctacgaggattatgccgacaagcccctggagaagcctctaaagctagtcctgaaggtcggaggaagtgaagtgactgaactctcaggatccggccacgactccagttactatgatgacaggtcagaccatgagcgagagaggcacaaagaaaagaaaaagaagaagaagaagaagtccgagaaggagaagcatctggacgatgaggaaagaaggaagcgaaaggaagagaagaagcggaagcgagagagggagcactgtgacacggagggagaggctgacgactttgatcctgggaagaaggtggaggtggagccgcccccagatcggccagtccgagcgtgccggacacagccagttctcggtggaacttaaaatgctgtgagacaccagacagacagatactgtgaacttggagctctctaatgaagggataccaaagtcttgtattcaatttttttttccttaaattgtcagccgaaaatgagagcacacctattcagcaactcctggaacacttcctccgccagcttcagagaaaagatccccatggattttttgcttttcctgtcacggatgcaattgctcctggatattcaatgataataaaacatcccatggattttggcaccatgaaagacaaaattgtagctaatgaatacaagtcagttacggaatttaaggcagatttcaagctgatgtgtgataatgcaatgacatacaataggccagataccgtgtactacaagttggcgaagaagatccttcacgcaggctttaagatgatgagcaaagagcggctgttagctttgaagcgcagcatgtcgtttatgcaggacatggatttttctcagcaggcagctcttttgggcaatgaagatacagctgttgaggaacctgtccctgaagttgtaccagtacaagtagaaactgccaagaaatccaaaaagccgagtagagaagttatcagctgcatgtttgagcctgaagggaatgcctgcagcttgacggacagtaccgcagaggagcacgtgctggcgctggtggagcacgcagctgacgaagctcgggacaggatcaaccggttcctcccaggcggcaagatgggctatctgaagaggaacggggacgggagcctgctctacagcgtggtcaacacggccgagccggacgctgatgaggaggagacccacccggtggacttgagctcgctctccagtaagctactcccaggcttcaccacgctgggcttcaaagacgagagaagaaacaaagtcacctttctctccagtgccactactgcgctttcgatgcagaataattcagtatttggcgacttgaagtcggacgagatggagctgctctactcagcctacggagatgagacaggcgtgcagtgtgcgctgagcctgcaggagtttgtgaaggatgctgggagctacagcaagaaagtggtggacgacctcctggaccagatcacaggcggagaccactctaggacgctcttccagctgaagcagagaagaaatgttcccatgaagcctccagatgaagccaaggttggggacaccctaggagacagcagcagctctgttctggagttcatgtcgatgaagtcctatcccgacgtttctgtggatatctccatgctcagctctctggggaaggtgaagaaggagctggaccctgacgacagccatttgaacttggatgagacgacgaagctcctgcaggacctgcacgaagcacaggcggagcgcggcggctctcggccgtcgtccaacctcagctccctgtccaacgcctccgagagggaccagcaccacctgggaagcccttctcgcctgagtgtcggggagcagccagacgtcacccacgacccctatgagtttcttcagtctccagagcctgcggcctctgccaagacctaactctagaccaccttcagctcttttattttatttttttagttttattttgcacgtgtagagtttttgtcatcagacaaggactttgatcctgtcccctttggcatgcgggaagcagccgcggggaggtaatgaattgtctgtggtatcatgtcagcagagtctccaagccccacgaaccctgaggagtggagtcatacgcgaaggccatatggccatcgtgtcagcagagagagtctctgtacacagccccgtgaaccctgaggagtggagtcatacacgaagggcgtgtggccatcgtgtcagcagagagagtctctgtacacagccccgtgaaccctgaggagtggagtcatacgcgaagggtgtgtggccaggctgcagagctgcgtgccgtttgtgtccgagcatcacgtgtggctccagcccttgtttctgccagtgtagacacctctgtctgccccactgtcctggggtcgctcttgggaggcacaggcatgggtgtgtctggcctcattctgtatcagtccagtgtgttcctgtcatagtttgtgtctcccaggcaggccatggtaggggcctcgcaggggccattggggagcacagggccaggctggggtgaggagagctcccctgttttctgtttaattgatgagcctgggaaaggagtgtgttctgcctgcccgttacagtggagcgttccgtgtccataaaacgttttctaactggg

SEQ ID NO: 2014 - DNA, 1891 bp, Homo sapiens
ggcgggaccgacggtgtgtgcggaacatggcggagcgcggcaggaagcggccgtgcggcccgggtgaacacggccaaaggattgagtggcgaaaatggaagcaacagaagaaagaggagaaaaaaaaatggaaggatctcaagctgatgaaaaaactggagcggcagcgggcacaggaggaacaggcaaagcgcctggaagaggaggaggcagcggcagagaaggaggaccgcgggcggccctacacactgagcgtagccctgccgggctccatcctggacaatgctcagtcgccggagcttcgcacctacttggccggtcagattgccagagcctgtgccatcttctgtgtggatgagatcgtggtgtttgatgaggagggccaggatgccaagactgtggagggggaattcacaggagttgggaagaaggggcaggcgtgcgtacagctggcccggatcctgcagtacctggagtgtccacagtacctgaggaaggcgttcttccccaagcaccaggatctacagtttgcagggctcctgaaccccctggacagcccccaccacatgcgtcaggatgaggaatccgagttccgagagggcatcgtggtggatcggcccacccggccaggccacggctcctttgtcaactgtggcatgaaaaaggaggtgaagattgacaagaacctggagcccgggcttcgggtgactgtgcgactgaaccagcagcagcacccagactgcaagacctaccatggcaaagtggtatcatcgcaggaccctcgcaccaaagctggtctctactggggctacaccgtccgactggcttcctgcctcagtgctgtgtttgctgaggcccccttccaagatgggtatgacctgaccatcgggacgtcagagcgcggctcagatgtggcctctgcccagcttcccaacttcaggcatgctcttgtggtgttcgggggcctccagggtctggaagctggagcggatgctgaccccaacctggaggtggctgaacccagtgtcctctttgacctgtacgtcaatacctgtcctggccagggtagccgtaccatccgcacggaggaagccatcctcatctccctggccgccctgcagcctggcctcatccaggcgggtgcccggcacacctgaaagttctaaggggccgaggacatcagtgaagcagcagtgaaaccaggggctctgcaggtcacttgggacggacgccaccagacttgtctccaaaaatcaccacctttaatactccccggcctgcacacacccacagtctcactgggctccaccctcacttactgcccgccgtgatggccttgaggctgcctgcccgcgccaggatgtttggcacaaagagcagccccgaagcccgctcaatgctctcgatgggcaccaggaagcgctccagtgggatggcctcatccacaggtgcgttgggcatcacgtaggtgcggagctcaatttgcccacctgctgcctccaggatcagcaccttgaagaagtgtgtgggcactgccacgtggttcttgccgatgacctggtactttacgtaggatttcccatcagcctctgtcctgtgggcagacccaggcacacgtgggcagggggcctggatgaacccaaagccacctcttccaggcagccttccctgatctgtcctctaacttctgtcaacctgcaggaccacgccctcactgtgagacttctgtagcctgcctggctcctccttgaggctggaactctctccagggtggttaactctttccctctgttttccttatgcccaacactgggtcaggcagagtgggcgacaataaacgctgctaggagaatcgaaaaaaaaaaaaaaaaaaaaaaaaaaaaaaaaaaaa

SEQ ID NO: 2015 - DNA, 1695 bp, Homo sapiens
gttgccgctgcgcacctggctcaggtgagctgccccgcccccgcccggcgcgagccccaggtcctggcagcagcccctgacctgtccaggtgccctgtccagctgactgcaaggacagagaggagtcctgcccagctcttggatcagtctgctggccgaggagcccggtggagccaggggtgaccctggagcccagcctgccccgaggaggccccggctcagagccatgccaggtgtctgtgatagggcccctgacttcctctccccgtctgaagaccaggtgctgaggcctgccttgggcagctcagtggctctgaactgcacggcttgggtagtctctgggccccactgctccctgccttcagtccagtggctgaaagacgggcttccattgggaattgggggccactacagcctccacgagtactcctgggtcaaggccaacctgtcagaggtgcttgtgtccagtgtcctgggggtcaacgtgaccagcactgaagtctatggggccttcacctgctccatccagaacatcagcttctcctccttcactcttcagagagctggccctacaagccacgtggctgcggtgctggcctccctcctggtcctgctggccctgctgctggccgccctgctctatgtcaagtgccgtctcaacgtgctgctctggtaccaggacgcgtatggggaggtggagataaacgacgggaagctctacgacgcctacgtctcctacagcgactgccccgaggaccgcaagttcgtgaacttcatcctaaagccgcagctggagcggcgtcggggctacaagctcttcctggacgaccgcgacctcctgccgcgcgctgagccctccgccgacctcttggtgaacctgagccgctgccgacgcctcatcgtggtgctttcggacgccttcctgagccgggcctggtgcagccacagcttccgggagggcctgtgccggctgctggagctcacccgcagacccatcttcatcaccttcgagggccagaggcgcgaccccgcgcacccggcgctccgcctgctgcgccagcaccgccacctggtgaccttgctgctctggaggcccggctccgtgactccttcctccgatttttggaaagaagtgcagctggcgctgccgcggaaggtgcggtacaggccggtggaaggagacccccagacgcagctgcaggacgacaaggaccccatgctgattcttcgaggccgagtccctgagggccgggccctggactcagaggtggacccggaccctgagggcgacctgggtgtccgggggcctgtttttggagagccatcagctccaccgcacaccagtggggtctcgctgggagagagccggagcagcgaagtggacgtctcggatctcggctcgcgaaactacagtgcccgcacagacttctactgcctggtgtccaaggatgatatgtagctcccaccccagagtgcaggatcatagggacagcgggggccagggcagcggcgtcgctcctctgctcaacaggaccacaacccctgccagcagccctgggaccctgccagcagccctgggaaaaggctgtggcctcagggcgcctcccagtgccagaaaataaagtccttttggattctgaaaaaaaaaaaaaaaaaaaaaaaaaaaaaaaaaaaaaaaaaaaaaaaaaaaaaaaa

SEQ ID NO: 2016 - DNA, 1855 bp, Homo sapiens
gttgattcttcaccacactgaaaccattaggaaaaatccttgtggttaacagcagaggcttcagagtgtaacctgtactcgggcctagaaattatttaaaatggcgactgatacgtctcaaggtgaactcgtccatcctaaggcactcccacttatagtaggagctcagctgatccacgcggacaagttaggtgagaaggtagaagatagcaccatgccgattcgtcgaactgtgaattctacccgggaaactcctcccaaaagcaagcttgctgaaggggaggaagaaaagccagaaccagacataagttcagaggaatctgtctccactgtagaagaacaagagaatgaaactccacctgctacttcgagtgaggcagagcagccaaagggggaacctgagaatgaagagaaggaagaaaataagtcttctgaggaaaccaaaaaggatgagaaagatcagtctaaagaaaaggagaagaaagtgaaaaaaacaattccttcctgggctaccctttctgccagccagctagccagggcccagaaacaaacaccgatggcttcttccccacgtcccaagatggatgcaatcttaactgaggccattaaggcatgcttccagaagagtggtgcatcagtggttgctattcgaaaatacatcatccataagtatccttctctggagctggagagaaggggttatctccttaaacaagcactgaaaagagaattaaatagaggagtcatcaaacaggttaaaggaaaaggtgcttctggaagttttgttgtggttcagaaatcaagaaaaacacctcagaaatccagaaacagaaagaataggagctctgcagtggatccagaaccacaagtaaaattggaggatgtcctcccactggcctttactcgcctttgtgaacctaaagaagcttcctacagtctcatcaggaaatatgtgtctcagtattatcctaagcttagagtggacatcaggcctcagctgttgaagaacgctctgcagagagcagtagagaggggccagttagaacagataactggcaaaggtgcttcggggacattccagctgaagaaatcaggggagaaacccctgcttggtggaagcctgatggaatatgcaatcttgtctgccattgctgccatgaatgagccgaagacctgctctaccactgctctgaagaagtatgtcctagagaatcacccaggaaccaattctaactatcaaatgcatttgctgaaaaaaaccctgcagaaatgcgaaaagaatgggtggatggaacagatctctgggaaagggttcagtggcaccttccagctctgttttccctattatcccagcccaggagttctgtttccgaagaaagagccagatgattctagagatgaggatgaagatgaagatgagtcatcagaagaagactctgaggatgaagagccgccacctaagagaaggttgcagaagaaaaccccagccaagtccccagggaaggccgcatctgtgaagcagagagggtccaaacctgcacctaaagtctcagctgcccagcgggggaaagctaggcccttgcctaagaaagcacctcctaaggccaaaacgcctgccaagaagaccagaccctcatccacagtcatcaagaaacctagtggtggctcctcaaagaagcctgcaaccagtgcaagaaaggaagtaaaattgccgggcaagggcaaatccaccatgaagaagtctttcagagtgaaaaagtaaattttataggaaaaaagggtatcatgatgaaattcaaaatcttattttctaagcacttttgatatcaagcaagtggcttcctttttgagatat

SEQ ID NO: 2017 - DNA, 3186 bp, Homo sapiens
agttaatatgatcctctgttgaagcaagaagacaaactgtatggtggagaaagaagtgggaaggatctgcgcggaagaagcctgagaagatgatgcacagatagagaggcaccaggacttgagaggcaccaggacttgggaggcatgttgatccatctccaggaaagactgagaaaaagagcgttgaatataagaaaaaatacttcctctgttctcagatcgtatttgttttaaggccacacctttttgaagttttcagtttgaaacacaacctggactgaaatcatgagggaggttgtgtaggaaagaatcatcaagggacttagttgggagcttctctaccacagcttactccttatggtattaaccccctttaagtgtaaatgtctttggtttaaaacgtttgtacctcatctgttaccagagtgttcatactggagagaaaccctatgaatttactgaatgtgggggaactgttactcatatgttgcatttcgtcgaacgtgcaagtcatgctgaagagaaaccctgtgcttctaaggagtattgacaagcccttagctagatgacaatctcattgagaagcagaaaattcatgctggagagaaactagtgaaggtagcaatacttcattgaatattagaaaatttttctagagagaaagcattgaatatactgagtatgataacatttcctctcaaaccttatcccttactctgcatttgggagatcatacacagagaagccttataaatgtaagagatgtggaaatatcttcagccaaaagtaaatcctcactcatcaagaaatttttactggagagaaaccttgtgaatgtgggaaagcttccattcagatgtcacacctcagccagcagaaaatttacagtggggaaaacccctttgcctgtaaggtatgtggaaaagtcttcagccacaaatcaaacctcactgagcatgagcattttcacacgagagagaaaccttttgaatgtaacgagtgtggaaaagcctttagccaaaagcagtatgtcattaaacatcagaacacccatactggcgagaagcttttcgaatgtaatgaatgtggaaaatcatttagccagaaggaaaacctccttacgcaccagaaaattcacactggagaaaaaccttttgagtgtaaagattgcgggaaagctttcattcagaagtcaaacctcatcagacaccagagaactcacacaggagagaagccctttgtatgtaaggagtgtggaaaaaccttcagtggcaaatccaaccttactgagcatgagaaaatccatattggagagaagccttttaaatgtagtgaatgtggaacagcctttggccagaagaagtacctcataaaacatcagaacattcacactggagagaaaccctatgaatgtaacgaatgtggaaaagccttctctcagcgaacatcacttattgtacatgtgaggattcattcaggtgataaaccttacgaatgcaatgtttgtggaaaagccttctctcagagctcatctctcactgtgcatgtgagaagccatacaggggagaagccctatggttgtaatgaatgtgggaaagctttctctcagttctcaacccttgctctgcatttgagaatacacacaggtaagaagccttatcagtgcagtgaatgtgggaaagctttcagccagaagtcacaccacattagacaccagaaaattcatactcactaaaaaccccatgaaagccttgaaagtgggaaagctttcattagaaatttgcacctcatcatgccccagaaataatccttctgaagcaaagcaccacgaatgaggttaactttaacaagtactaaaaacttaagggacaccagaaaatttgtactgaagagaaagacatgcatatgattaaaaccctgtgtccaacagagaaacctgcagcagagataatggtgaaagtttaggcacattttcactaaaagtgggaacagaaaatggaggcctgttttttattgctaccaccatagatctggagatcttcgccagtaacaagaaaaattaagttgtaaatattggaaaggaacagacaaaaatagatgacatggtcatctacaactaatattaagactcctgtggtattgattgagcagagcagaagagatttcaaaaaaagacctatgcatttattagaatttggaatatgatacaagtggcatcaggaaatgaggaaataatggaactattttttttaagtggaggtagtttgttctccaagggggaaaaatagaccatgaactatacacaaaagtgaatccagagattaaaaacagaaatatggaaaagctatgtactaaaatgcatatgaccttgggaatagggaaacattccttggaacaatttgagaaatacttagcggttctacttatgagtatgaatgctcaggaaatacgcactaggatatttactgtggcttgatttgtagtagccaaaaattagaaacaactgagaaagcccatcacgaacaatatgggaaattcttatgtaatactatatatctgtaaaatgcaacaaatgaaatccacatgtattaacagaaagatcccagaattgttgaggggggatcaagttgcagaatgatacagatagtacaatgacttttttgtaaatttgaattaaaagtttcctcataaaactcagtactatctattggtaatggatgcatatatgtatgtacatgtacatgtttttgaaacggattggaaggatacagaccaaactcttgatagtggtcacctgtgaagagtggagaagggaaaataatgagtgtgggaggtgggatgggtattggttaaaggggacttcagctttttatataaacatccacttctctttcaaaagacttcaagtaaatataagaagatactgattgattctggattgtggtatagggatatcttgtcttattttttgtacttttctgtatttttaaaatttctcaaaataggaatgggagtgaggatgggaatgctgtatctgtggaagtcatgttatactggattcatttccaattaaatactaaacattttatagaaaatatttctaaaattttatcacggatgaatggatggacttgctctctatgtaatatgaaattaatctattttattaaaatttaaaaggacagc

SEQ ID NO: 2018 - DNA, 2703 bp, Homo sapiens
gcagcgcggagtcccggcccgggacacaagatggcggcagcggcgctggggagggcgaggcggaggcggcaaaacgggcggtcgagcagaacgtgtagccgcgtcccctccagtccgctccgggcagctgctgatgcaaggaatcccctgggctcccgtccactccactgctgaccagcccattcgcctgtgctgagtcttcctgcaggcctttccttgcctctgtgggaccctgtgggggtccatccggctggagaagaaaagcctctcatgctaacgttgcagaccccagagggtcctgtgtgggtgtggagatggccaatgagaatcacggcagcccccgggaggaagcgtccctgctgagtcactccccaggtacctccaatcagagccagccctgttctccaaagccaatccgcctggttcaggacctcccagaggagctggtgcatgcaggctgggagaagtgctggagccggagggagaatcgtccctactacttcaaccgattcaccaaccagtccctgtgggagatgcccgtgctggggcagcacgatgtgatttcggaccctttggggctgaatgcgaccccactgccccaagactcaagcttggtggaaactcccccggctgagaacaagcccagaaagcggcagctctcggaagagcagccaagcggcaatggtgtgaagaagcccaagattgaaatcccagtgacacccacaggccagtcggtgcccagctcccccagtatcccaggaaccccaacgctgaagatgtggggtacgtcccctgaagataaacagcaggcagctctcctacgacccactgaggtctactgggacctggacatccagaccaatgctgtcatcaagcaccgggggccttcagaggtgctgcccccgcatcccgaagtggaactgctccgctctcagctcatcctgaagcttcggcagcactatcgggagctgtgccagcagcgagagggcattgagcctccacgggagtctttcaaccgctggatgctggagcgcaaggtggtagacaaaggatctgaccccctgttgcccagcaactgtgaaccagtcgtgtcaccttccatgtttcgtgaaatcatgaacgacattcctatcaggttatcccgaatcaagttccgggaggaagccaagcgcctgctctttaaatatgcggaggccgccaggcggctcatcgagtccaggagtgcatcccctgacagtaggaaggtggtcaaatggaatgtggaagacacctttagctggcttcggaaggaccactcagcctccaaggaggactacatggatcgcctggagcatctgcggaggcagtgtggcccccacgtctcggccgcagccaaggactccgtggaaggcatctgcagtaagatctaccacatctccctggagtacgtcaaacggatccgagagaagcaccttgccatcctcaaggaaaacaacatctcagaggaggtggaggcccctgaggtggagccccgcctagtgtactgctacccagtccggctggctgtgtctgcaccgcccatgcccagcgtggagatgcacatggagaacaacgtggtctgcatccggtataagggagagatggtcaaggtcagccgcaactacttcagcaagctgtggctcctttaccgctacagctgcattgatgactctgcctttgagaggttcctgccccgggtctggtgtcttctccgacggtaccagatgatgttcggcgtgggcctctacgaggggactggcctgcagggatcgctgcctgtgcatgtctttgaggccctccaccgactctttggcgtcagcttcgagtgcttcgcctcacccctcaactgctacttccgccagtactgttctgccttccccgacacagacggctactttggctcccgcgggccctgcctagactttgctccactgagtggttcatttgaggccaaccctcccttctgcgaggagctcatggatgccatggtctctcactttgagagactgcttgagagctcaccggagcccctgtccttcatcgtgttcatccctgagtggcgggaacccccaacaccagcgctcacccgcatggagcagagccgcttcaaacgccaccagttgatcctgcctgcctttgagcatgagtaccgcagtggctcccagcacatctgcaagaaggaggaaatgcactacaaggccgtccacaacacggctgtgctcttcctacagaacgaccctggctttgccaagtgggcgccgacgcctgaacggctgcaggagctgagtgctgcctaccggcagtcaggccgcagccacagctctggttcttcctcatcgtcctcctcggaggccaaggaccgggactcgggccgtgagcagggtcctagccgcgagcctcaccccacttaacatatcctgcggggaggaggagccccaggggtgctagtctggactgctgggactcgggcccctggggcctcagagggaccccggctgccactgacatatgaagattatggttctgccagggctcccctccctgcctgtccccaagtcctcacctcaaactccctccaagtcccatgtatataggtcctgatgccttcccaaccccgcccctcaccctgttgccaccttgtttcatttgtaaaaggaaatacagaaacccccccaagaaaaaaaa

SEQ ID NO: 2019 - DNA, 1978 bp, Homo sapiens
cgctctcagcgcgtgacgcagcacgctttgatataaatgcagaccgcgcggccgtagcttcctctctgctctcgcggccgactcgcaagatggcgccgcagaaagacaggaagcccaagaggtcaacctggaggtttaatttggaccttactcatccagtagaagatggaatttttgattctggaaattttgagcaatttctacgggagaaggttaaagtcaatggcaaaactggaaatctcgggaatgttgttcacattgaacgcttcaagaataaaatcacagttgtttctgagaaacagttctctaaaaggtatttgaaataccttaccaagaaataccttaagaagaacaatcttcgtgattggcttcgagtggttgcatctgacaaggagacctacgaacttcgttacttccagattagtcaagatgaagatgaatcagagtcggaggactaggcaaaggctccccttacagggctttgcttattaataaaataaatgaagtatacatgagaaataccaagaaattggcttttagtttatcagtgaataaaaaatattatactcttgaacttttgtctcatttttttgagtatgctgtttatatgattttgatttccctctgataactatcaacagtatttaaatagcttatagctggtataattttttcccacgatttccaaaatcttttatgtactcaggtaaaagtagcgttatataggaaatcttttttttagacactctcgttctgtcacccaggctggagtgcagtgactcagcttcctaaatagctggaattacaggtgtgagccaccatgcccggctaattttttgtacttttagtagagtagggtttggccatgttggccaggctggtttcaaactcctgacctcaagtgatctacccacctcggcttcccaaagtgctgattatagctgtgaaccaccatgcccggccaggaaatcttactgtagaacaattttttatatagctgtataaaatgtatatgattgtcttgacagtctcaaatactgtttttaatagcttgtaaatgtaatctcaagtgcttagaacagttcttacatataagttgctctgtagtttgctcttatagttagcccaaagactctgggtgtgaggcctgctgtaaaccaatgttaaactgcttattagaaagccctaaccacctgctttgtaggcaccagaaactcaaaaccaaatctcaactcagctacagaatctactgtggtccttgtctgaaaaaattagttcactcggttggaatcttgtctcagagcatcctcatctctttctcaaaagcccctaccccaacaccggcgtgttggttgtctattgaaacttacaagtggatggaccctttctcccgaataaactggcctttgaaagctctaatcgaaatggtttggcaaaatccatactgcaggagattagggaggacaagaatgatgtgcctttttgtactgctgagcctgatggtggtgccactacttcaggtacttagatgagtcttgatgctaatagaattgtgtcgccaaacatatctggacagttacaacctaatctatgcattaattggtttgggaattgcttgaaattattgtttaattcaatgttttaattcgttttcctaaaaatttaagtgcccccatcatcgtgcaatacctcagtgcagcaactccttgattcttggatgactgaacttcctaacttggctctgccccattgttcccatttttcatgtttttcacaaatagttaaccaggtacctactactgtgcaccgctgcagagcattgaggatgtatgtgatgagtaaaaacacccagcctgctctgctgtgttagtattatgacggaaactgatcaaatcacatgtgaacaaatttactgctacaaaagggagggcttaataaaaggaatttcatctgggaaggcaaaaaaaaaaaaaaaaaa

SEQ ID NO: 2020 - DNA, 4449 bp, Homo sapiens
gtaaagtggtggcacctgaccggagcatgtagccacctatgacttcctgagtggggtggtgtggggagggccctgaggagtctgtggtcctaggccttggatttcatcagggctttcctgctccttctggttgcctcagtcccaggcaagatagggtcccagaatcttacagcccagaggccacctgttgcaacttcttttttacagatggagtcatcagaacccactgtgaggaagtgacttctccttgaggtcacccagacactccaaacagagcagagcaaaagcgcctagaacttgaaattttggacctgtctccaacaccctggggatttccaccaggaagccttcagtcaccatccaggggatttttatcgccacaaagggtaattcctgctccatccctgctgtgactcagctgtgacgttgaaccacacaagccagagagaagaagataaagtcatcagagctcctactcaccagagagtgaggcccaggccaggactccacaaggctggtcccctgccctggagcaacttaaacaggccctctggccagcctggaaccctgagatggcctccagctcaggcagcagtcctcgcccggcccctgatgagaatgagtttccctttgggtgccctcccaccgtctgccaggacccaaaggagcccagggctctctgctgtgcaggctgtctctctgagaacccgaggaatggcgaggatcagatctgccccaaatgcagaggggaagacctccagtctataagcccaggaagccgtcttcgaactcaggagaaggctcaccccgaggtggctgaggctggaattgggtgcccctttgcaggtgtcggctgctccttcaagggaagcccacagtctgtgcaagagcatgaggtcacctcccagacctcccacctaaacctgctgttggggttcatgaaacagtggaaggcccggctgggctgtggcctggagtctgggcccatggccctggagcagaacctgtcagacctgcagctgcaggcagccgtggaagtggcgggggacctggaggtcgattgctaccgggcaccctgctccgagagccaggaggagctggccctgcagcacttcatgaaggagaagcttctggctgagctggaggggaagctgcgtgtgtttgagaacattgttgctgtcctcaacaaggaggtggaggcctcccacctggccctggccacctctatccaccagagccagctggaccgtgagcgcatcctgagcttggagcagagggtggtggagcttcagcagaccctggcccagaaagaccaggccctgggcaagctggagcagagcttgcgcctcatggaggaggcctccttcgatggcactttcctgtggaagatcaccaatgtcaccaggcggtgccatgagtcggcctgtggcaggaccgtcagcctcttctccccagccttctacactgccaagtatggctacaagttgtgcctgcggctgtacctgaatggagatggcactggaaagagaacccatctgtcgctcttcatcgtgatcatgagaggggagtatgatgcgctgctgccgtggcccttccggaacaaggtcaccttcatgctgctggaccagaacaaccgtgagcacgccattgacgccttccggcctgacctaagctcagcgtccttccagaggccccagagtgaaaccaacgtggccagtggatgcccactcttcttccccctcagcaaactgcagtcacccaagcacgcctacgtgaaggacgacacaatgttcctcaagtgcattgtggagaccagcacttagggtgggcggggctcctgagggagctccaactcagaagggagctagccagaggactgtgatgccctgcccttggcacccaagacctcagggcacaaagatgggtgaaggctggcatgatccaagcaagactgaggggtcgacttcgggctggccatctggttaggatggcaggacgtgggctgggcccacaaaggcaaagggtccagaaggagacaggcagagctgctcccctctgcacggaccatgcgacactgggaggccagtgagccactccggccccgaatgttgaggtggactctcaccaaatgagaagaaaatggaaccaggcttggaaccgtaggacccaagcagagaagctctcgggctaggaagatctctgcagggccgccagggagacctggacacaggcctgctctctttttctccagggtcagaaacaggaccgggtggaagggatggggtgccagtttgaatgcagtctgtccaggctcgtcattggaggtgaacaagcaaacccagacggctccactaggacttcaaattgggggttggatttgaagacttttaagtttccttccagcccagaaagtctctcattctaggcctcctggcccaggtgagtcctagagctacaggggttctggaaacattcaggagcttcctgtcctcccagctcctcactcaccttcagtaacccccactggactgacctggtccacagggcacctgccaccctgggcctggcagctcagcttccccaacacgcaggagcacacccagcccccacatcctgtgcctccatcagctaaacaccacgtcacttcatgcaggtgaaacccagtcactgtgagctcccaggtgcagccagaggcacctcaagaagaagaggggcataaactttcctcttcctgcctagaggccccacctttggtgctttccagaatcccgtaacacctgattaactgaggcatccacttctttcagcagactgatcaggacctccaagccactgagcaatgtataaccccaaagaaataatttttagaatctctttcgaagttttcctaaagtgtatggtttgggagttgtttgtactgagccaggtttgaaaaggccattgctgagtttgaggtggtgccaccagttttgcaggtggcatcagaggctggcatgctggcaggaacatcccctcttagccccagtcttctcttttctataatgagacccaccccagcttgcctccctccctggcttctctgaccctcaaaggagatgccacgcaggacagactggagagagaagcctgggcaatactgcccgcctgtcatggcctggtggtggcccacacctatcttctcaccttggaggccacacccaactttccaaagaccctgagacaagtcaggaccctactactctcccctgctgctttcctgacagcttactcttcctccacctgctgagcctgtgccagactccattgctcaaatcgttagggttgcttctataaaaatgggtcagtagcccttcctgttctctccagcccagcatacaggaggatcaaaggaggtgacggagcatcgtggcacggcagtctcaatgggtcagaaacccaggccagctgggctctaagcctggcatcctgtcatgcttagtccttcagctgaagatcagaggaagcctctcccttgccctctccagctctaggggttttcaggaggcccaactgcaataatggagcactagtgcttttatgtgcaatggtgtcgtccatgcacgacagcagcaaacattctggggctgctttttattgttcccacggctgacagcgtggcagcggagactgtggaggcagtggagactgacttcttcctgctgacagctggatgtcacacatgaaggtctggcctagcgagtgatgggtctaggccctgaaactgatgtcctagcaataacctcttgatccctactcaccgagtgttgagcccaaggggggatttgtagaacaagcccccatgagaaacagctgttactctacacttttgattgcctatttctgatggcaagagatacatactctcttcaaagagcatgagatgcagccattctttcagcaaagcttcattgacacctgcacctgttaactgtgttcgacattgaagggagaaaggcaagatgtgcactctggactcaagaaactcttagttcagtggaggaaatgagcagataagtagatcattatgattgagagtaggagaagcttagagaaagcacagaatcccagatccagctggtgaaggagggaaggcttcaggcctttaagctcagcctgagaatattgtgaaatgcagaggatggggaaaagggaagagtaccgacttgaaaacggagagctgtcttggctgagggcagggtctgtgtggcaggatgggggagggagtcagaagggtcagatgaactggagtgtagacagcatcagatgcagcagtgcccaccgccccccccccaaccccccgccctgcccacagagcacctgctggtaaccctgggcctattgaaagcaggatgagatgataatttaagacactgaatgatttcttttccaacaaagctctatgttaagtgc

SEQ ID NO: 2021 - DNA, 4088 bp, Homo sapiens
cgaccaggccgggcacctccgagcgcaaggacagcgcgaggtccgcgcagcccagcgcagccatggagccccgcgcggactcactctatgatgtccctgtcggtgcggccgcagcgccgtctgctcagcgcccgggtcaataggagccagtccttcgcaggcgtcctcggcagccacgagcgggggcccaggagtttcccggtcttcagcccgccggggcccccacggaagccccccgcgctctcccgagtgtccaggatgttttccgtggctcacccagccgccaaggtgccgcagcccgagcggctggacctggtgtacacggcgctgaagcggggcctgacggcctacttggaagtgcaccagcaggagcaagagaaactccaggggcagataagggagtccaagaggaattcccgcttgggcttcctgtatgatctggacaagcaagtcaagtccattgaacgcttcctgcgacgactggagttccatgccagcaagatcgatgagctgtatgaggcatactgtgtccagcggcgtctccgggatggtgcctacaacatggtccgtgcctacaccactgggtccccgggaagccgagaggcccgggacagcctggcagaggccactcgggggcatcgcgagtacacggagagcatgtgtctgctggagagcgagctggaggcacagctgggcgagtttcatctccgaatgaaagggctggctggcttcgccaggctgtgtgtaggcgatcagtatgagatctgcatgaaatatgggcgtcagcgctggaaactacggggccgaattgagggtagtggaaagcaggtgtgggacagtgaagaaaccatctttctccctctactcacggaatttctgtctattaaggtgacagaactgaagggcctggccaaccatgtggttgtgggcagtgtctcctgtgagaccaaggacctgtttgccgccctgccccaggttgtggctgtggatatcaatgaccttggtaccatcaagctcagcctggaagtcacatggagccccttcgacaaggatgaccagccctcagctgcttcttctgtcaacaaggcctccacagtcaccaagcgcttctccacctatagccagagcccaccggacacaccctcacttcgggaacaggctttctataacatgctgcgacggcaggaggagctggagaatgggacagcatggtccctgtcatctgaatcttcagacgactcatccagcccacagctctcaggcactgcccgccactcaccagcccctaggcccctggtgcagcagcccgagccccttcccatccaagttgccttccgcaggcctgagacccccagctctgggcccttggatgaggagggggccgtggccccagtcctggcaaatgggcatgcaccctacagtcggactctgagccacatcagtgaggctagtgtagatgctgccttggctgaggcttcagtggaggccgttggcccagaaagcctagcctggggacctagcccacctacacacccagctcccacccatggagagcaccccagtcctgttcctcctgccctggaccctggccactctgccacaagctctaccctcggtacaacaggctctgtccccacatctacagaccctgccccatctgcacacctagactcagttcataagtccacagactctggcccttcagaactgccaggccccactcacaccactacaggctctacctatagtgccattaccactacccacagtgctccaagccccctcactcacactactacaggctccacccacaagcccataatctctacccttactactacaggccctaccctcaatatcataggcccagtccagactaccacaagccccacccacactatgccaagccctacccataccacagcaagccccactcatacttccacaagccccacccatacccccacaagtcccacccacaaaaccagtatgtcacctcccaccactacaagtcctacccccagtggtatgggcctagtccagactgccacaagtcccacccatcctaccacaagccccacccatcccaccacaagccccatccttataaatgtaagcccttccacttctctagaacttgctaccctctccagcccctccaaacactcagaccccaccctcccaggcactgactcccttccctgtagtcccccagtctccaattcctacactcaggcagaccctatggcccccagaactccccacccaagtcctgcccattccagtaggaaacccctcacaagccctgccccagatccctcagagtctacggttcagagtctaagccccactccctcacccccaacccctgcaccccagcattcagacctttgcctggccatggctgtccagaccccagtcccaacggcagccggagggtctggggacaggagcctggaggaggcactgggggccctaatggctgccctggatgactaccgtggccagtttcctgagctgcagggcctggagcaggaggtgacccgcctagaaagtctgctcatgcagagacaaggtctgactcgcagccgggcctccagtctcagcatcactgtggagcatgccttggagagcttcagcttcctcaatgaagacgaagatgaagacaatgatgttcctggggacaggcctccaagcagcccggaggctggggctgaggacagcatagactcacccagtgcccgccccctcagcacggggtgtccagctctggatgctgccttggtccggcacctgtaccactgcagtcgcctcctgctgaaactgggcacatttgggcccctgcgctgccaggaggcatgggccctggagcggctgctgcgggaagcccgagtactggaggcagtatgcgagttcagcaggcggtgggagatcccggccagctctgcccaggaagtggtgcagttctcggcctctcggcctggcttcctgaccttctgggaccagtgcacagagagactcagctgcttcctctgcccggtggagcgggtgcttctcaccttctgcaaccagtatggtgcccgcctctccctgcgccagccaggcttggctgaggctgtgtgtgtgaagttcctggaggatgccctggggcagaagctgcccagaaggccccagccagggcctggagagcagctcacagtcttccagttctggagttttgtggaaaccttggacagccccaccatggaggcctacgtgactgagaccgctgaggaggtgctactggtgcggaatctgaactcggatgatcaggctgttgtgctgaaggccctgagattggcgcccgaggggcgtctgcgaagggacgggctgcgggccctcagctccctgctcgtccatggcaacaacaaggtcatggctgctgtcagcacccagctccggagcctgtcactgggccctaccttccgggagagggccctcctgtgcttcctggaccagctggaggatgaggacgtgcagactcgagtggctggctgcctggccctaggctgcatcaaggctcccgagggcattgagcccctggtgtacctctgccaaactgacacagaagctgtgagggaagctgcccggcaaagcctacagcagtgtggagaagagggacagtctgcccatcgacggctggaggagtccctggacgccctgccccgcatctttgggcctggcagcatggccagcacagcattctaaactattcacccatgggttcctggtgcccctttccccccactttcagggctcaccaggcactggcagggagggtaagggctggctccagatacccctcccccacagattcctagcaatgaaaatctaatatattcttctgttgcccctggggttggagagtcagtgcctgcagtcaagtgcctcccagcctcggctcagcacatcccttgccacaaatcagtgtctggggcttggccaccctgccgctgcccagccacatcccttggttttgtattttatttacagagttttacagaaaataaaaaagcaaaatgtctttcctaaaaaaaaaaaaaaaaaaa

SEQ ID NO: 2022 - DNA, 1646 bp, Homo sapiens
gtggaatgtcatcagttaaggctattttcatttcttttgtggatcttcagttgcttcaggccatctggatgtatacatgcaggtcacagggaatatgatggcttagcttgggttcagaggcctgacacctcaggctgccaaatgtggaagatttaaatacttgaaccaataccctcctcccaaaaactgaaattggcttctgtttctgagttggtccaggcgcaatgttcagcgtatttgaggaaatcacaagaattgtagttaaggagatggatgctggaggggatatgattgccgttagaagccttgttgatgctgatagattccgctgcttccatctggtgggggagaagagaactttctttggatgccggcactacacaacaggcctcaccctgatggacattctggacacacatggggacaagtggttagatgaactggattctgggctccaaggtcaaaaggctgagtttcaaattctggataatgtagactcaacgggagagttgatagtgagattacccaaagaaataacaatttcaggcagtttccagggcttccaccatcagaaaatcaagatatcggagaaccggatatcccagcagtatctggctacccttgaaaacaggaagctgaagagggaactacccttttcattccgatcaattaatacgagagaaaacctgtatctggtgacagaaactctggagacggtaaaggaggaaaccctgaaaagcgaccggcaatataaattttggagccagatctctcagggccatctcagctataaacacaagggccaaagggaagtgaccatccccccaaatcgggtcctgagctatcgagtaaagcagcttgtcttccccaacaaggagacgatgagaaagtctttgggttcggaggattccagaaacatgaaggagaagttggaggacatggagagtgtcctcaaggacctgacagaggagaagagaaaagatgtgctaaactccctcgctaagtgcctcggcaaggaggatattcggcaggatctagagcaaagagtatctgaggtcctgatttccggggagctacacatggaggacccagacaagcctctcctaagcagcctttttaatgctgctggggtcttggtagaagcgcgtgcaaaagccattctggacttcctggatgccctgctagagctgtctgaagagcagcagtttgtggctgaggccctggagaaggggacccttcctctgttgaaggaccaggtgaaatctgtcatggagcagaactgggatgagctggccagcagtcctcctgacatggactatgaccctgaggcacgaattctctgtgcgctgtatgttgttgtctctatcctgctggagctggctgaggggcctacctctgtctcttcctaactacaaaagccctttctccccacaagcctctgggttttccctttaccagtctgtcctcactgccatcgccactaccatcctgtcaccagtgggacctctttaaaacaagcagccaaccattctttgatgtatcccattcgctccatgttaacatccaaaaccagcctggatttcatacatggacttctgattaaaagtggcaggttgtgcatgttaaaaaaaaaaaaaaaaaaaaaa

SEQ ID NO: 2023 - DNA, 1137 bp, Homo sapiens
ggtgccttatgcggtgattttaatgataggtgtcatatataggacggagtaatctgtttacattctgttcttctcgatgcactcacaagcgggtaactaggtgacaagaaaacaaagatcttattcaaaagaggtcttacagcaacccaacgtctcatcttcccatagtaaagatgacggcgccttgaggtaagctacaggcaacaccacttccgcgtttctcttgcgccctggtccaagatggcggatgaagccacgcgacgtgttgtgtctgagatcccggtgctgaagactaacgccggaccccgagatcgtgagttgtgggtgcagcgactgaaggaggaatatcagtcccttatccggtatgtggagaacaacaagaatgctgacaacgattggttccgactggagtccaacaaggaaggaactcggtggtttggaaaatgctggtatatccatgacctcctgaaatatgagtttgacatcgagtttgacattcctatcacatatcctactactgccccagaaattgcagttcctgagctggatggaaagacagcaaagatgtacaggggtggcaaaatatgcctgacggatcatttcaaacctttgtgggccaggaatgtgcccaaatttggactagctcatctcatggctctggggctgggtccatggctggcagtggaaatccctgatctgattcagaagggcgtcatccaccacaaagagaaatgcaaccaatgaagaatcaagccactgaggcagggcagagggacctttgataggctacgatactattttcctgtgcatcacacttaactcatctaactgcttccccggacaccctccacctctagttgttactaagtagctgcagtaggcattgctggggaagaaacaaacacacaccaaacagtactgctacttagtttctaaggctgcacagggaagggaaagactgggctttggacaatctagaggtaatttatatccgcccccaggtggagcaacatgcgattctggaggcacgggggtaactgaaagtgagtacatatagtctttctggtttctggagataacccatcaataaaagctgcttcctctggtaaaaaaaaaaaaaaaaaaaaaaaaaaaaaa

SEQ ID NO: 2024 - DNA, 3350 bp, Homo sapiens
gcggccgcgcacgcgcggcggggggcgtggggctgggcccagccggacgcgacctcagcctgcggcggctaactgccggtaggcgtctgtgtgcgccgccaagtcggtggggcggggacgcgaggtgtggatggggggtcgccttgacctctgcctcagccagtagcgcagtctcggcctcgccgttacggagatggtgccctgggtgcggacgatggggcagaagctgaagcagcggctgcgactggacgtgggacgcgagatctgccgccagtacccgctgttctgcttcctgctgctctgtctcagcgccgcctccctgcttcttaacaggtatattcatattttaatgatcttctggtcatttgttgctggagttgtcacattctactgctcactaggacctgattctctcttaccaaatatattcttcacaataaaatacaaacccaagcagttaggacttcaggaattatttcctcaaggtcatagctgtgctgtttgtggtaaagtgaaatgtaaacgacataggccttctttgctacttgaaaactaccagccatggctagacctgaaaatttcttccaaggttgatgcatctctctcagaggtggatattccatctattataaccaagaaactattaaaagcagcaatgaagcatatagaagtgatagttaaagccagacagaaagtaaaaaatacagagtttttacagcaagctgctttagaagaatatggtccagagcttcatgttgctttgagaagtcgaagagatgaattgcactatttaaggaaacttactgaactgctttttccttatattttgcctcctaaagcaacagactgcagatctctgaccttacttataagagagattctgtctggctctgtgttccttccttctttggatttcctagctgatccagatactgtgaatcatttgcttatcatcttcatagatgacagtccacctgaaaaagcaactgaaccggcttctcctttggttccattcttgcagaaatttgcagaacctagaaataaaaagccatctgtgctgaagttagaattgaagcaaatcagagagcaacaagatcttttatttcgttttatgaactttctgaaacaagaaggcgcagtgcacgtgttgcagttttgtttgactgtggaggaatttaatgatagaattttacgaccagaattatcaaatgatgaaatgctgtctcttcatgaagaattgcagaagatttataaaacatactgtttggatgaaagtattgacaaaattagatttgatcccttcattgtagaagagattcaaagaattgctgaaggcccatacatagatgttgtgaaacttcaaactatgagatgtctttttgaagcatatgaacatgttctttcccttttggagaatgtatttactcctatgttctgccatagtgatgagtatttcagacaacttttaagaggtgcagaatcaccaacacgcaattcaaaattgaacaggaacacacagaaaaggggagaatcatttggaatcagcagaataggtagcaaaattaaaggagtattcaaaagtaccacaatggagggagctatgttgcctaattatggtgtagctgaaggtgaagatgattttattgaagaaggtattgttgtaatggaagatgattctccagtggaggctgtgagcacacctaatactccccgaaaccttgctgcatggaaaattagcattccatatgtagacttttttgaggatccctcctctgaaaggaaggagaaaaaagaaagaattcctgtgttttgtattgatgttgaaagaaatgatagaagagcagttggacacgagcctgaacattggtctgtctatagaagatatcttgaattctatgtacttgaatcaaaactaacagaatttcatggtgcatttcctgatgcccagcttccttctaagaggatcattggccccaaaaattatgaattcttaaagtcaaagagggaagagttccaagaatatctacagaaacttctgcagcatccagaactgagtaatagtcaacttctggcagactttctttcccctaatggtggggaaacacaatttcttgataagatactaccagatgtaaatcttgggaaaattataaaatctgttcctggaaaactaatgaaagagaaaggtcagcatttggaaccttttatcatgaatttcattaattcttgtgagtctccaaagcctaaaccaagtagaccagaactgaccattctcagccctacttcagaaaacaacaagaagcttttcaatgatctgtttaaaaataatgcaaaccgtgctgaaaatacagagagaaagcaaaatcagaattattttatggaggtgatgactgtagaaggagtctatgattacctgatgtatgtaggacgggtagttttccaggttcctgactggcttcatcatctcttaatgggaactcgaatcctctttaaaaacaccctggaaatgtatactgattactatcttcagtgtaaactagaacagctatttcaggagcaccgtttggtctcactcataacacttctcagagatgctatattctgtgaaaacactgaacctcgctctctccaagataagcaaaaaggagcaaaacagacttttgaagaaatgatgaattacattccagatctgttagtcaagtgtattggtgaagaaaccaagtatgaaagcatcagacttctgtttgatggcttacagcaaccagtactcaacaagcagctgacttatgttttattggacattgtgatacaggaactgtttccagagctcaataaggtacaaaaggaagttacctctgtgacatcttggatgtaaacacttggatttggtatagaataacccattgaaatttctgctgtgcgagggtggtagaaatttacttttttgggtatattcttatatatattatgtacatcgctgtctgaaattttagttattttttgtttttaataaagactaacacaaacttaatgattaaaagtgattgagtctcatagtctttcatttgctagctgtgatccaaattttattagaacataagtcacttgttattgccatttttaaaagagaaaattcataatgatgttatggcaaacagataagactgataaacttcgtattgtatagctttgaaaataattatgcctagtatggagaaacaggaataagatctgattttcttagagttaatatattttagtagattggttttccttttttttattttgtacatagttaactgtgtatctataaataaagcatcctatatgagtttttaataataaaaaaa

SEQ ID NO: 2025 - DNA, 3509 bp, Homo sapiens
gcggccgcgcacgcgcggcggggggcgtggggctgggcccagccggacgcgacctcagcctgcggcggctaactgccggtaggcgtctgtgtgcgccgccaagtcggtggggcggggacgcgaggtgtggatggggggtcgccttgacctctgcctcagccagtagcgcagtctcggcctcgccgttacggagatggtgccctgggtgcggacgatggggcagaagctgaagcagcggctgcgactggacgtgggacgcgagatctgccgccagtacccgctgttctgcttcctgctgctctgtctcagcgccgcctccctgcttcttaacaggtatattcatattttaatgatcttctggtcatttgttgctggagttgtcacattctactgctcactaggacctgattctctcttaccaaatatattcttcacaataaaatacaaacccaagcagttaggacttcaggaattatttcctcaaggtcatagctgtgctgtttgtggtaaagtgaaatgtaaacgacataggccttctttgctacttgaaaactaccagccatggctagacctgaaaatttcttccaaggttgatgcatctctctcagaggttcttgaattagtgttggaaaactttgtttatccgtggtacagggatgtgacagatgatgaatcctttgttgatgaactgagaataacattacgtttttttgcatctgtcttaataagaaggattcacaaggtggatattccatctattataaccaagaaactattaaaagcagcaatgaagcatatagaagtgatagttaaagccagacagaaagtaaaaaatacagagtttttacagcaagctgctttagaagaatatggtccagagcttcatgttgctttgagaagtcgaagagatgaattgcactatttaaggaaacttactgaactgctttttccttatattttgcctcctaaagcaacagactgcagatctctgaccttacttataagagagattctgtctggctctgtgttccttccttctttggatttcctagctgatccagatactgtgaatcatttgcttatcatcttcatagatgacagtccacctgaaaaagcaactgaaccggcttctcctttggttccattcttgcagaaatttgcagaacctagaaataaaaagccatctgtgctgaagttagaattgaagcaaatcagagagcaacaagatcttttatttcgttttatgaactttctgaaacaagaaggcgcagtgcacgtgttgcagttttgtttgactgtggaggaatttaatgatagaattttacgaccagaattatcaaatgatgaaatgctgtctcttcatgaagaattgcagaagatttataaaacatactgtttggatgaaagtattgacaaaattagatttgatcccttcattgtagaagagattcaaagaattgctgaaggcccatacatagatgttgtgaaacttcaaactatgagatgtctttttgaagcatatgaacatgttctttcccttttggagaatgtatttactcctatgttctgccatagtgatgagtatttcagacaacttttaagaggtgcagaatcaccaacacgcaattcaaaattgaacagaggtagcctaagtttggatgattttcggaacacacagaaaaggggagaatcatttggaatcagcagaataggtagcaaaattaaaggagtattcaaaagtaccacaatggagggagctatgttgcctaattatggtgtagctgaaggtgaagatgattttattgaagaaggtattgttgtaatggaagatgattctccagtggaggctgtgagcacacctaatactccccgaaaccttgctgcatggaaaattagcattccatatgtagacttttttgaggatccctcctctgaaaggaaggagaaaaaagaaagaattcctgtgttttgtattgatgttgaaagaaatgatagaagagcagttggacacgagcctgaacattggtctgtctatagaagatatcttgaattctatgtacttgaatcaaaactaacagaatttcatggtgcatttcctgatgcccagcttccttctaagaggatcattggccccaaaaattatgaattcttaaagtcaaagagggaagagttccaagaatatctacagaaacttctgcagcatccagaactgagtaatagtcaacttctggcagactttctttcccctaatggtggggaaacacaatttcttgataagatactaccagatgtaaatcttgggaaaattataaaatctgttcctggaaaactaatgaaagagaaaggtcagcatttggaaccttttatcatgaatttcattaattcttgtgagtctccaaagcctaaaccaagtagaccagaactgaccattctcagccctacttcagaaaacaacaagaagcttttcaatgatctgtttaaaaataatgcaaaccgtgctgaaaatacagagagaaagcaaaatcagaattattttatggaggtgatgactgtagaaggagtctatgattacctgatgtatgtaggacgggtagttttccaggttcctgactggcttcatcatctcttaatgggaactcgaatcctctttaaaaacaccctggaaatgtatactgattactatcttcagtgtaaactagaacagctatttcaggagcaccgtttggtctcactcataacacttctcagagatgctatattctgtgaaaacactgaacctcgctctctccaagataagcaaaaaggagcaaaacagacttttgaagaaatgatgaattacattccagatctgttagtcaagtgtattggtgaagaaaccaagtatgaaagcatcagacttctgtttgatggcttacagcaaccagtactcaacaagcagctgacttatgttttattggacattgtgatacaggaactgtttccagagctcaataaggtacaaaaggaagttacctctgtgacatcttggatgtaaacacttggatttggtatagaataacccattgaaatttctgctgtgcgagggtggtagaaatttacttttttgggtatattcttatatatattatgtacatcgctgtctgaaattttagttattttttgtttttaataaagactaacacaaacttaatgattaaaagtgattgagtctcatagtctttcatttgctagctgtgatccaaattttattagaacataagtcacttgttattgccatttttaaaagagaaaattcataatgatgttatggcaaacagataagactgataaacttcgtattgtatagctttgaaaataattatgcctagtatggagaaacaggaataagatctgattttcttagagttaatatattttagtagattggttttccttttttttattttgtacatagttaactgtgtatctataaataaagcatcctatatgagtttttaataataaaaaaa

SEQ ID NO: 2026 - DNA, 2648 bp, Homo sapiens
gcttggggacgcacggagaggtgcagctgggccgtccagcatcaaacactagcctccacacgtggaaaagaccctgactcccacagtagactagtcttatgggagtcctggctcttgggccaggctgcattaggaaaatggaaaccagactgtcttcaaattcttctgcctagccttagccattagagagaggtcctgctaaagatggactgcaaatgcgcttgatggaaggagatgtcaattccactgaagtcctcatttctgctgagctacctgtgcaccctgcctccggctctcctgagcagagagatcctgatggctgactcagaagcactcccctcccttgctggggacccagtggctgtggaagccttgctccgggccgtgtttggggttgttgtggatgaggccattcagaaaggaaccagtgtctcccagaaggtctgtgagtggaaggagcctgaggagctgaagcagctgctggatttggagctgcggagccagggcgagtcacagaagcagatcctggagcggtgtcgggctgtgattcgctacagtgtcaagactggtcaccctcggttcttcaaccagctcttctctgggttggatccccatgctctggccgggcgcattatcactgagagcctcaacaccagccagtacacatatgaaatcgcccccgtgtttgtgctcatggaagaggaggtgctgaggaaactgcgggccctggtgggctggagctctggggacggaatcttctgccctggtggctccatctccaacatgtatgctgtaaatctggcccgctatcagcgctacccggattgcaagcagaggggcctccgcacactgccgcccctggccctattcacatcgaaggagtgtcactactccatccagaagggagctgcgtttctgggacttggcaccgacagtgtccgagtggtcaaggctgatgagagagggaaaatggtccccgaggatctggagaggcagattggtatggccgaggctgagggtgctgtgccgttcctggtcagtgccacctctggcaccactgtgctaggggcctttgaccccctggaggcaattgctgatgtgtgccagcgtcatgggctatggctgcatgtggatgctgcctggggtgggagcgtcctgctgtcacagacacacaggcatctcctggatgggatccagagggctgactctgtggcctggaatccccacaagctcctcgcagcaggcctgcaatgctctgcacttcttctccaggatacctcgaacctgctcaagcgctgccatgggtcccaggccagctaccttttccagcaggacaagttctacgatgtggctctggacacgggagacaaggtggtgcagtgtggccgccgtgtggactgtctgaagctgtggctcatgtggaaggcacagggcgatcaagggctggagcggcgcatcgaccaggcctttgtccttgcccggtacctggtggaggaaatgaagaagcgggaagggtttgagctagtcatggagcctgagtttgtcaatgtgtgtttctggttcgtaccccccagcctgcgagggaagcaggagagtccagattaccacgaaaggctgtcaaaggtggcccccgtgctcaaggagcgcatggtgaaggagggctccatgatgattggctaccagccccacgggacccggggcaacttcttccgtgtggttgtggccaactctgcactgacctgtgctgatatggacttcctcctcaacgagctggagcggctaggccaggacctgtgagccttctctgtcttgctgccggccttgataccacccctcacccgcagagtcactgcattccctcccagcctttgaggccgggtgcagtggctcacgcctgtaatcccagcactttgggaggccgaggcgggtggatcacttgaggtcaggagttcgagaccagcctggccaataaggtgaaaccctgtctctactaaaaatacaaaaattagccgagcatggtggcctgtgcctgtaaacccagctactcaggaggttggggcagaattgcttgaacccagggggcagaggttgcagtgagccgagattgcacccctgcactccaggctgggcaacagtacgagactctgttccaaaaaaaataaaaaagaacagcctttttaggccacagtgacctgcgcaatgtttatatgctttgacctactaactttctcctaactaaatatttgattttaggagagtgtttaaataaattacagtatgtctatatgatgaaatgttattttgccattaaaattttgtttacaaagataatttttattgacataaaaataactttaatgtaatttatgttgaaaaagctgaatacaagtctttatatagagtaatatttgagctgtgttcaaaaatacataggaaaagactgataaaatgaaatatggcaaaatgttaatagttttccctggaataggataataggcaattttaaaacagactcctttaaaaaaacaaacaaacaaaaaaaacatagacttctttatatcttttgagctccctcccttttattatgtaatgaatatgtgttgcttttgtaataggaaaataataaagttaaaatttcaactgcaaaa

SEQ ID NO: 2027 - DNA, 4425 bp, Homo sapiens
gcgcgcgtggggctccattccgcggtgctgggtctccgtgccggggtgggtgctcgtgtgtgcgcttctcctccccatcccccttcccccaagaataaaagaagaaccgggaggcgtgctcagaaaataaataaataaccaccacacacgcgcagcccggagcgagtcggcggggctggcggcagcggcggaggaggagtgaaggcggcggcggcggaggagggacgcgcggaaaaggcagcaactttaaagccagctcagagcctagacctccagccgagcggtttgcagcgcggcggcggcggcggcggcggcggcggcggcgttgagtgtctggcccgccggtccggtcggggtgtgcagtcggacggacgagcagcgcgtcgctgtcctccggcagctggagatgtccgagcccaaggcaattgatcccaagttgtcgacgaccgacagggtggtgaaagctgttccatttcctccaagtcaccggcttacagcaaaagaagtgtttgataatgatggaaaacctcgtgtggatatcttaaaggcgcatcttatgaaggagggaaggctggaagagagtgttgcattgagaataataacagagggtgcatcaattcttcgacaggaaaaaaatttgctggatattgatgcgccagtcactgtttgtggggacattcatggacaattctttgatttgatgaagctctttgaagtcgggggatctcctgccaacactcgctacctcttcttaggggactatgttgacagagggtacttcagtattgaatgtgtgctgtatttgtgggccttgaaaattctctaccccaaaacactgtttttacttcgtggaaatcatgaatgtagacatctaacagagtatttcacatttaaacaagaatgtaaaataaagtattcagaacgcgtatatgatgcctgtatggatgcctttgactgccttcccctggctgccctgatgaaccaacagttcctgtgtgtgcatggtggtttgtctccagagattaacactttagatgatatcagaaaattagaccgattcaaagaaccacctgcatatggacctatgtgtgatatcctgtggtcagaccccctggaagattttggaaatgagaagactcaggaacatttcactcacaacacagtcagggggtgttcatacttctacagttacccggctgtatgtgaattcttacagcacaataacttgttatctatactccgagcccacgaagcccaagatgcagggtaccgcatgtacaggaaaagccaaacaacaggcttcccttctctaattacaattttttcagcaccaaattacttagatgtatacaataacaaagctgcagtattgaagtatgagaacaatgttatgaatatcaggcaattcaactgttctcctcatccatactggcttccaaatttcatggatgtttttacttggtcccttccatttgttggggaaaaagtgactgagatgctggtaaatgtcctcaacatctgctcagatgatgaactagggtcagaagaagatggatttgatggtgcaacagctgcagcccggaaagaggtgataaggaacaagatccgagcaataggcaaaatggccagagtgttctcagtgctcagagaagagagtgagagtgtgctgacgctgaaaggcttgaccccaactggcatgctccccagcggagtactttctggagggaagcaaaccctgcaaagcgctactgttgaggctattgaggctgatgaagctatcaaaggattttcaccacaacataagatcactagcttcgaggaagccaagggcttagaccgaattaatgagaggatgccgcctcgcagagatgccatgccctctgacgccaaccttaactccatcaacaaggctctcacctcagagactaacggcacggacagcaatggcagtaatagcagcaatattcagtgaccacttcctgttcacttttttttttttttttttttttttttgagctgcggggcatgatggggattgctgcatatcagcagttggatgttcttgcctctgacagtagcttatttgctctgggggccaggaattggattcagtttacactatcattaaaaaagagggagagagataataaactatattttggtggggatggtgattaaacacctcttttgggtatgccttttaaaaatgcttatagagaaaaaaattttaaaaagaaagctaatgctagtatatactgcaatgttaggggaatgaacatgttttcctactgcattggggacttctagataggttaatgaaaggccttttattctgttactggacatgaaaactttgtctaatttcttactctattgtacgtttacagtcgcagcactaaaaatggatgacatcaaacatttttaacaaaatgatgtacaaactaaggactatttattgataatgttttgctactcttgtcagacaatggctataaactgaattaggcagtcttaaaaaaaaaaaaaaaacagaaaaagaaaaaaaagaacgttgcaaatttgttaaaatgccaaaaaggacagtttaattttgtacagattatgcttacctcaggtttctttagtgtgcttgaatgcccttctttccatataacacttatcttcttcttaattcggcaatggaatatcttttaagttttaaaaaaactggaataattatatctatcttttttgccgtttatatttaggggtttttgttgataaaatcaagtcttggttgtggcttgctgaattaaatatttatgagtggtgcatttttaagtatagtgaacaagacaccatattaagtacagtgataaagcatctatattctgtaaaaaaaaaaaaaatctgcctatgcatgttttttaagaaaaaaaaaatggctgtatcggcctgtatgggactgtaatgcgcttagtggtctgacatatactggaaatgtatgtatactggcgtactttatattctctaaaatgcttaatgcctttgaaattttgtaatcaaaaaaaagctttgaaaaaatctaaaggggagagtattctttaaagtttttaacataagcttgtcaatgcacatgtagatggttagcatgtttagcaaaccttgtgaaattataataagtttgtagttacatgtgaaactctaaatgcatggcaactgttaatgtcataacagtttagttattttgttctgttctgtcatgtgccacaaaatatgtacttttttcacttttttccctttgtatatcagttacgggttacaactggttcattctgaaaacaacaacaacaaaagtccattcatattttttaacaattgtataagtgcccaagtaattcactacagcctaaagccttgcctttgtaatttgacttctgacatgttggcaatcaaagcatgcacttgtaacaatgaaaaagaaaaagcattttatattactactcaataaaatgtgcatgaacttacagaattctcatccttccactgagtccgctgaagggatttatgtgcacaaccaccatgtgtcttctaggtgctggcccaccaccacacatcacaggctgatttccacaggcttcttcctaggggcctcgtgatctgaggggtggtgcctacttccactgtaagaaagaatcttggtggatttgtgtctcaaatcagataagagaagcctgtttaaagagcagatgccatcttctggcttcctcaaggagccagttaaaaaaccagagcattcctttttattgaaaaataaaattaatttgttatcaggttgtttcagttgtattggatgccctatctatctgctaaagcaaaaagtactaggctactaagtgcattttcatcacagaaaagagttgcatttgtattaacaagaaatttgtatacccacgcttcagctactatctaatcatcacccgaagatttaagatacaccaaatttcagtttgtttgtaacattgttcatctttagtgcactttgttttatataataaagtatgcctgttatattaaataataagaatatggcaattagcgatatagcatacccaaacaaagatgttctcgatacagtctggcaaagactatcccaaggttattttaatgaattcagacattttttcctgtggatatttctccatcctaaaaaaagtggcaaccaaggaaaatatttagatgcaacttactagagtgatgatgtgaaagaaatggtgattctggtatcatggtgtttattttctttcttataactgcagagaaaatatcctgactaaaaaaatttcatttttttggattcctttcttttacaaattgtgctgaggcaactatggcatagaaataaacatttgacattaaaataagtaaaaaaaaaaaaaaaaaaaa

SEQ ID NO: 2028 - DNA, 1763 bp, Homo sapiens
tgtgctttagttgcagtggaaaggaaatgtgtcatctgtggtttggttttaaaagtggaaaactagctgcacatatccttttttactgcagatttactttaaggctcatattctccaagtctattctgctttaaaaagaagacaagaaaagaagtggtttatcaaaatcacgttataatcagattttgaccaagcattttgtaagtatacaaatgtcagccaatgacatataacaaccatttcttataaaaccttgatgttcaaaagcctgactagcagtggcatccatgttgcttaggagttggtttggaaacaaagactttcaggccctacctatactagctagattgccaagcatgcccacggacatggaacacacaggacattacctacatcttgcctttctgatgacaacagttttttctttgtctcctggaacaaaagcaaactatacccgtctgtgggctaacagtacttcttcctgggattcagttattcaaaacaagacaggcagaaaccaaaatgaaaacattaacacaaaccctataactcctgaagtagattataaaggtaattctacaaacatgcctgaaacatctcacatcgtagctttaacttctaaatctgaacaggagctttatataccttctgtcgtcagcaacagtccttcaacagtacagagcattgaaaacacaagcaaaagtcatggtgaaattttcaaaaaggatgtctgtgcggaaaacaacaacaacatggctatgctaatttgcttaattataattgcagtgctttttcttatctgtacctttctatttctatcaactgtggttttggcaaacaaagtctcttctctcagacgatcaaaacaagtaggcaagcgtcagcctagaagcaatggcgattttctggcaagcggtctatggcccgctgaatcagacacttggaaaagaacaaaacagctcacaggacccaacctagtgatgcaatctactggagtgctcacagctacaagggaaagaaaagatgaagaaggaactgaaaaacttactaacaaacagataggttagtgaagaaaaatgcaaagtagcaatgagaaggcttatggagtaaaaatgaagtcagttggtatttaatcccaaagtgttgttctgattatctaaaatttgacatggtagaccttgcaatttagaatcaagcaggtgagacagggagaagtatgcctgcttaattatttaaactgtgtacttttgttttgacactgaatattttaaaaagcaaataataaaataactaagcatttgaggaaaattttaaggataaattgaggaaactgattaatagagatagcaagggataattaaataaatattccctatgtagcaacagtggttagatgatctttgtctgaatgtaattaaactttgaatagttttagtgtgtccttaaagccaagtatatgctttaacatcaaatggaagtcaaattcctaatgcatagatagagagagctaaactgtgtaatttaatggtatcttccttgctggatgtggcagaatccacaccagcttatcaaccaacacagctaattttagaatagatcctttatctttccatatggcacacgtaagaaagtgtttttctactattaatattaaattaaaacctttacttttgtataataaattaaaactcagaataaacctgtgaccacgtaaaaaaaaaaaaaaaaaaaaaaaaaaaaaaaaaaaaaaaaaaaaaaaaaaa

SEQ ID NO: 2029 - DNA, 1622 bp, Homo sapiens
tgtgctttagttgcagtggaaaggaaatgtgtcatctgtggtttggttttaaaagtggaaaactagctgcacatatccttttttactgcagatttactttaaggctcatattctccaagtctattctgctttaaaaagaagacaagaaaagaagtggtttatcaaaatcacgttataatcagattttgaccaagcattttgtaagattgccaagcatgcccacggacatggaacacacaggacattacctacatcttgcctttctgatgacaacagttttttctttgtctcctggaacaaaagcaaactatacccgtctgtgggctaacagtacttcttcctgggattcagttattcaaaacaagacaggcagaaaccaaaatgaaaacattaacacaaaccctataactcctgaagtagattataaaggtaattctacaaacatgcctgaaacatctcacatcgtagctttaacttctaaatctgaacaggagctttatataccttctgtcgtcagcaacagtccttcaacagtacagagcattgaaaacacaagcaaaagtcatggtgaaattttcaaaaaggatgtctgtgcggaaaacaacaacaacatggctatgctaatttgcttaattataattgcagtgctttttcttatctgtacctttctatttctatcaactgtggttttggcaaacaaagtctcttctctcagacgatcaaaacaagtaggcaagcgtcagcctagaagcaatggcgattttctggcaagcggtctatggcccgctgaatcagacacttggaaaagaacaaaacagctcacaggacccaacctagtgatgcaatctactggagtgctcacagctacaagggaaagaaaagatgaagaaggaactgaaaaacttactaacaaacagataggttagtgaagaaaaatgcaaagtagcaatgagaaggcttatggagtaaaaatgaagtcagttggtatttaatcccaaagtgttgttctgattatctaaaatttgacatggtagaccttgcaatttagaatcaagcaggtgagacagggagaagtatgcctgcttaattatttaaactgtgtacttttgttttgacactgaatattttaaaaagcaaataataaaataactaagcatttgaggaaaattttaaggataaattgaggaaactgattaatagagatagcaagggataattaaataaatattccctatgtagcaacagtggttagatgatctttgtctgaatgtaattaaactttgaatagttttagtgtgtccttaaagccaagtatatgctttaacatcaaatggaagtcaaattcctaatgcatagatagagagagctaaactgtgtaatttaatggtatcttccttgctggatgtggcagaatccacaccagcttatcaaccaacacagctaattttagaatagatcctttatctttccatatggcacacgtaagaaagtgtttttctactattaatattaaattaaaacctttacttttgtataataaattaaaactcagaataaacctgtgaccacgtaaaaaaaaaaaaaaaaaaaaaaaaaaaaaaaaaaaaaaaaaaaaaaaaaaa

SEQ ID NO: 2030 - DNA, 3460 bp, Homo sapiens
gtttttctctctgctttctcaacagccagatctgccagtgagcctcaggctttaggaactgaagagtgtttctgaaagatctatccagcactccgatggccagcaacaacaccgccagcatagcacaagccaggaagctggtagagcagcttaagatggaagccaatatcgacaggataaaggtgtccaaggcagctgcagatttgatggcctactgtgaagcacatgccaaggaagaccccctcctgacccctgttccggcttcagaaaacccgtttagggagaagaagtttttctgtgccatcctttaagtctttgagaggggcctgaagagcctccgggctcctgggacattgatgtagagtttttagtgaagtgggcacctttctagtccacggcatttgaagagagcgaggagaaccattctggaaactctaggctatgcatgtttaaagatctggtcccctttatgagaatgcaagccgatccacatcctgacttaagagatctgattctgacgaactgcctggaggaggggaatatataaaaataaaattggtgtcacttcttttctgctatcccccagccccccccccaaaatcctcatgtttctgcttcatattttgaaaaataacaattaaaacagacagctgtactgaggtaagatatgtgtgaccttcttggaatgaatattgtctttagaataccctttgataagctgagctgtcccgtgtagatgcaattcggtttaatggcattgatgtatagtcactgtgcctttctttttctttcttccttctcctctacccctccttccacccctccccattagagtagtgtggagataaggctggactggtctatcagattgaactccaagaatgatcacacaaaatgtttagggagatgttccccgtggtgtatcctcatggtaacaacgacaaaaaatgccggttgtctttgttctcttttcactattcctaacatgtgtacatgatagctttgattctgcaagtaaaagtaaatcctgtgttgtgactggtgctttcatatatttgtgacaatttttgagtaatattgcatgaaaatgtccctatgttacatccattcagaagttttgttgttttactctaaagctgggaaaggaaatgagagggaaaagaccccggagagggaagaaaatctcagtattttgaaaattgagattacttcagagccttagccacacctaaaatacctcctagttaatagtggtataaatgcctcttcaatacgttttccagaatccaaagcattttggtttatccaggacccagggcagcacagctgtcaccaagcaggagagttaaggattcaccatgagctgggaaatgcttttgccatgagtatgagcaaattccctctttccctgaatcatggacattctagattaaaagaacatttttttgtgctcttaacaagataaccatggccctcctttgttcaagtatcagaagaaataaacccacagctccagagaaggtgaccattctcagaactccagctattcactctccagggagaaggacctcaaatcgccactctttgggcggcaggtgcggtccccacggccggctctacgaggaagagttctggctcttttgtccactgagatggtcttggtttttcacttaacaaattttttaatggaatctttgtttttgttctccatcttgtttgttagagtctctcggcctttatttacaaattccttgcaactagagcgctccttccccaagatatggtagtgagagtaatttttcattgtagctgtagtctccatcagtaacagcaggccctggaagacttgatcacctttttctgtgtcattttcagtcaaagagggcctctcttacatcttgtttgctttcaaatccccaaatatcatctccatctccgaattaattttattgtctctttcctctctattcgctttctcctgtttttttttttaaaaaaaagcatgaaaaagggagagaaaaagtttgatatgccaaggacagattttgaaacagacttggtaaatgttttccttagctccttcatgggcatgctggtgaaagaataaatacatccaattaaagctcatgctggggtcggggagaagaggatactgaaacatttgtgaaatgtatgaatgcacttctgtaaccagatacttctgttcttctgttcaaattgtggggtttttgttacagttaggacgcccatgaagatttaggggtgaaaaaaacagcagagtatttattaaactacagcattgtacaattagcttagtaacactatggaataagctaaaacatatcacagtttttacatgggccaaaacatgaattgagtatgtggtcacatgaaaacacggatgaatgaataaaacactctttggtggtgactgaggcatcattagaaggcccagacgatttccactattcacagcatttccttttctcagaaggactctttatatttccatgtaaatctagatctttggagcaattaagatggaattacaatttctagggagcattttaaggaaaatgttttggctttttcataattttatgtcttacagtatggaattataatacgaaaatctttatatgagttttggcttcttggtatttgtacttattcaggggaaaaagtctttcgattacttatgcctctatagagcttaatttcttgagaaattcaacagtcattttcaccagcataattttatcttaaggaataactaataggaaaagtcagcttaattatttaaggccctagtttctacatataatatattcgatagaaatgaaaatctgccgtggaattaactaataagtagtaacaataaacttcatatttagaatgcaaagtctataaagaataattttacatgatcctcaatatcaactccagtttaaaaagtgttatttttaaaacatttgaaaccaagtactgtttaatttcaatcagaagatgcaaatacatactttgatctatgtttgattttgctaataatatttgaaggagattgcctaccaaggacaaaacaataaatttaaaaatcaaacgatttctccatacgctcatagtcacatatggaattttgagaaaataaagcatgctgtctttaggaatttttatacttctttgtctttcttccttaatatttgcttctagctgctcttggcaatgatgaattgttatgtatgcattaatgttttgcagcccaaaagttgttcacatttttcctatataagatctgtggagtgtgtgtttcaaagagagaactacagaaatgttaaagcaggaaaacctgaatgtgatgtgcacattttcatcccacatggacaatgtatgtgttttaataaatggaattttcagattcaaaaaaaaaaaaaaaaaaaaaaaaaacaaaaaaaaaaaaaaa

SEQ ID NO: 2031 - DNA, 7109 bp, Homo sapiens
tggattatgatttttgtttatttttcctgtttatccatatattatttttcaacaatgagtattgattacttatataataattttaaggctgtacacattgcagacagcaccccactgtttgaaaaactcctcctcagtagaacatggcagaccttcatcttccttccctgaaccttttccaaccttaggcttgccattctccaccagtgctaatgtcatgtctcttgaaatctgtattgaagtcagtatttcattcttgccagtttccactgtgtgtttaaatttggagtctggtgtctagcattagctggggttggagcttccactcctctcagcattggtaagcctcctcacccaccccatcccatgtccaagatcacccagttacacacttaccatctacccagttcattcacatcatcagtcccagagctgcagagatgctctttttctacctcctacttctctggctcttagagaggcagcatgggataatggggcaagcgaatagggccttaaagtagagggacaagggttctcttccctatctgccacttattagctatgtgacctcgtgtaagtctcttttctttttgagacagggtctccctctgtcacctaggctggagtacagtggtatgatcatagctcactgcagcctcgaactcctgggctcaagctatccttccaccttagccttctgagcagcagggactacaggcacatgccaccatgtccggctgatttatttatttttatttgggaagatgggggtctcactatgtcgcccaggctggtcatgaactcctggtctcaagcaaccctccaaccttggactcccaaagtgctgggattacaggtgtgagccctggccttgcctcaatttcctcatctgtaaaacggggttagtgaaactcacatcctatcagtggttttgaggatgggccgactcttgtattgcctgctctagtacaatcagcagctaaggcggctcactttccggccgtgctacaataggtaagaactaggatgctttagacgtgtgactgggcagtgggagcccctcacatgatcccgagatgccagacagtgtctctccgcacagggcgtgtgctggtccagaggcccgtttttccagtcgccccacaccccgggtccgcgatcacgctccccccacccatagccgagcctgacgcggcggtggctcatgcgcctttccgtcccagcctttagccacggaccacacgtcccatctcaggcgccccgcccctcccccgccccccgcccccggcgcgcctccccaggctgccggctccggtgtctgagcggccgcgcccgcgagccgtgagcgatgattggctgcgccacggcggcgggcggtccgtgggcgcacacaccctccccgcgcagccaatgggcgtgcgcacgtcactgatccggaggcccgcgggccggcagcccctcaataagccacattgttgcatgaaactccggcgcaggagtcccgggctgccgctggcaacatcgtgtcacccagctaagaaaatccgcgggcccgagccacgcgcctgtgaatcggagaggtcccactgcccgagtggagccgggctgagattcttctcaagttgagcctcagtgatcctgtggccgaagttagcgccttgacgtgggacaaccggacacgtcgccaggagagaactgaggcgccttctagcagttgtgacgccaaaatcacgtctccggagacccgcgccctccgccagccgggcgcaccctcgccggtagccttctttgtgcgccgtccggactcccagctcccggcccggcagccgagccccagcacaaagcagtcggaccgcgccgcccgcctcccctctcgcgtctccgcctcggtttcccaactctgcgccgtcgggccgcggcaggatgattgcctcgcatctgcttgcctacttcttcacggagctcaaccatgaccaagtgcagaaggttgaccagtatctctaccacatgcgcctctctgatgagaccctcttggagatctctaagcggttccgcaaggagatggagaaagggcttggagccaccactcaccctactgcagcagtgaagatgctgcccacctttgtgaggtccactccagatgggacagaacacggagagttcctggctctggatcttggagggaccaacttccgtgtgctttgggtgaaagtaacggacaatgggctccagaaggtggagatggagaatcagatctatgccatccctgaggacatcatgcgaggcagtggcacccagctgtttgaccacattgccgaatgcctggctaacttcatggataagctacaaatcaaagacaagaagctcccactgggttttaccttctcgttcccctgccaccagactaaactagacgagagtttcctggtctcatggaccaagggattcaagtccagtggagtggaaggcagagacgttgtggctctgatccggaaggccatccagaggagaggggactttgatatcgacattgtggctgtggtgaatgacacagttgggaccatgatgacctgtggttatgatgaccacaactgtgagattggtctcattgtgggcacgggcagcaacgcctgctacatggaagagatgcgccacatcgacatggtggaaggcgatgaggggcggatgtgtatcaatatggagtggggggccttcggggacgatggctcgctcaacgacattcgcactgagtttgaccaggagattgacatgggctcactgaacccgggaaagcaactgtttgagaagatgatcagtgggatgtacatgggggagctggtgaggcttatcctggtgaagatggccaaggaggagctgctctttggggggaagctcagcccagagcttctcaacaccggtcgctttgagaccaaagacatctcagacattgaaggggagaaggatggcatccggaaggcccgtgaggtcctgatgcggttgggcctggacccgactcaggaggactgcgtggccactcaccggatctgccagatcgtgtccacacgctccgccagcctgtgcgcagccaccctggccgccgtgctgcagcgcatcaaggagaacaaaggcgaggagcggctgcgctctactattggggtcgacggttccgtctacaagaaacacccccattttgccaagcgtctacataagaccgtgcggcggctggtgcccggctgcgatgtccgcttcctccgctccgaggatggcagtggcaaaggtgcagccatggtgacagcagtggcttaccggctggccgatcaacaccgtgcccgccagaagacattagagcatctgcagctgagccatgaccagctgctggaggtcaagaggaggatgaaggtagaaatggagcgaggtctgagcaaggagactcatgccagtgcccccgtcaagatgctgcccacctacgtgtgtgctaccccggacggcacagagaaaggggacttcttggccttggaccttggaggaacaaatttccgggtcctgctggtccgtgttcggaatgggaagtggggtggagtggagatgcacaacaagatctacgccatcccgcaggaggtcatgcacggcaccggggacgagctctttgaccacattgtccagtgcatcgcggacttcctcgagtacatgggcatgaagggcgtgtccctgcctctgggttttaccttctccttcccctgccagcagaacagcctggacgagagcatcctcctcaagtggacaaaaggcttcaaggcatctggctgcgagggcgaggacgtggtgaccctgctgaaggaagcgatccaccggcgagaggagtttgacctggatgtggttgctgtggtgaacgacacagtcggaactatgatgacctgtggctttgaagaccctcactgtgaagttggcctcattgttggcacgggcagcaatgcctgctacatggaggagatgcgcaacgtggaactggtggaaggagaagaggggcggatgtgtgtgaacatggaatggggggccttcggggacaatggatgcctagatgacttccgcacagaatttgatgtggctgtggatgagctttcactcaaccccggcaagcagaggttcgagaaaatgatcagtggaatgtacctgggtgagattgtccgtaacattctcatcgatttcaccaagcgtggactactcttccgaggccgcatctcagagcggctcaagacaaggggcatctttgaaaccaagttcttgtctcagattgagagtgactgcctggccctgctgcaagtccgagccatcctgcaacacttagggcttgagagcacctgtgacgacagcatcattgttaaggaggtgtgcactgtggtggcccggcgggcagcccagctctgtggcgcaggcatggccgctgtggtggacaggatacgagaaaaccgtgggctggacgctctcaaagtgacagtgggtgtggatgggaccctctacaagctacatcctcactttgccaaagtcatgcatgagacagtgaaggacctggctccgaaatgtgatgtgtctttcctgcagtcagaggatggcagcgggaagggggcggcgctcatcactgctgtggcctgccgcatccgtgaggctggacagcgatagaacccctgaaatcggaagggacttcctctttctctccttcttccctgttttaaattataagatgtcatccccttgtgtcagagacagaccccttggcttttgcttggcagagaggaccccactggactgggttttgtctctgcatctcattgtagagcttggtggctgagcttggccctattaagataaatagagttccaaataaggatttgttcacatgcatcataaccattcccattggttctcctaaaacatgaaaattatctcccttagtaatcccccttgccaaattccatgtccctgtataattctacaggatggggacactaatgaagatacggttgcttcaccttggagcctgaacatgacatttctaagtggggtgcatcccccagcactgatgttgttactgattctcctgtcagagatctgggaggtctccactgaggatgtgagcctgattatcctataggcagacgtggggagggtggaggggtgacagtggaggaaaatccatggatatccacgcagcagcccctctttaacctcatctacaagcatttgccctgtggattccagcatttgccattcctggaatcaaggaatcctgagtctgggcaatgaaaccaaagccaggagttgacgcatcctgcagttgggccagctgtcgcatctcagcggggcgcacatgttatccacaagcaatggacctttggggaagggggagtttttagtttgttttacaaatttttcctgcaaaagtggaatcactgtattttcattttaatttatatttgaaattttatttagttcttgagtagatctgcttcttcatcttgacatgtaatgaatggtcagttgtacgtaatgtatttatatgttaatttgttatgtatatagatgtgcaagtcttgtcagaattggcctcagtgtagttaaagggcagaaggggaagatactgactagtcatagaaatacctcattcgcctgtgggaagagaagggaagcctcttcagggtgagtgaatggcaaagcggttgcttctggctcctccttcccctgtggtcttggaagtgtgtggaaggcagggacagagatggaggccgagccaatagactgaagagaccacagcaattggctcctccatctagagattttcttggcagtattccatgggatgttaagcaaaggaaaccaaaggaatcgtttcaaatggactcatggcttagaaatctttattcttagggcagtcagtagtattctaaagctttctgacaagataaaggaagtcaccaaaatttctttttttaaattgtatctaatcctcaacaacaaaccaaaacagaacaattaaacagccaaataaaacctcagggacaacatttttggtgtatttgagccctcccagcaagtttcaccttgggtttgtattttaaatgttttacaagaattgtccatgtgcttccctaggctgagctggcattggtctgctgacctgtttttgtgtttttcttttttttatacacaacatttatttcaaactattgggagggatgagagtggcttaaaaacttccatccctacttttcaagagtgcagttgattctgaatctgaaagcccgcctctgtcctaaaatacaaacaagcacagacattaaacctggatactatatgataaagagggatgtaactattgaattggatacaaggatcagaatggaaagaaactcacgatgaaattgaacctggtttttgtatatttatcaaacttgtgctgagaatagtgtctgattatacgacttttaagcaaagttgggtgtaattaggtgaaaacagcccaggtcctcccgggagcacagaggggctaggggctggtccttctcgtttgctctagtcttgctttgctgtctggtgtagctcctctgctgctcccatctgcactaattgacccaaaacgtgggtatttcctgctacacaaaagccaaaaggtttcatgtagattttagttcactaaagggtgcccacaaaatagagattaattttaacttaaattttaagcttgaagattaggtactatctgtgaagttacacttttttttttttttttaaaggtagagatgtgtgtgtgtgtaggtattaaagatgtgttgttggtttccaaaaaggaacactggaaaataaattttgaatgtttatgttctcagaatcaggttgacagtcccttgctgacatggctttgctttgtgtaaatacagtggatctcaatcttcggggtgtgatgaatagcgaatcatctcaaatccttgagcactcagtctagtgaagatgttgtcattatgtacaatacataactagtttaattaactatgtgatgttaactattattaataaattttaacattttccaaaataaaaaaaaaaaaaaaaaa

SEQ ID NO: 2032 - DNA, 2410 bp, Homo sapiens
gtccttttcctcctgtcctttgccagcgttgggccggaccgggccgagccgggccgcccgggcgcagtctttaaccatggcgtccctcttcaagaagaaaaccgtggatgatgtaataaaggaacagaatcgagagttacgaggtacacagagggctataatcagagatcgagcagctttagagaaacaagaaaaacagctggaattagaaattaagaaaatggccaagattggtaataaggaagcttgcaaagttttagccaaacaacttgtgcatctacggaaacagaagacgagaacttttgctgtaagttcaaaagttacttctatgtctacacaaacaaaagtgatgaattcccaaatgaagatggctggagcaatgtctaccacagcaaaaacaatgcaggcagttaacaagaagatggatccacaaaagacattacaaacaatgcagaatttccagaaggaaaacatgaaaatggaaatgactgaagaaatgatcaatgatacacttgatgacatctttgacggttctgatgacgaagaagaaagccaggatattgtgaatcaagttcttgatgaaattggaattgaaatttctggaaagatggccaaagctccatcagctgctcgaagcttaccatctgcctctacttcaaaggctacaatctcagatgaagagattgaacggcaactcaaggctttaggagtagattagtcaaaagaagtcatactattttgcttacttataattatgtagtataaaccaagcacagtgcagatttcttttacaaaacacatgtattttgcaaaaaaaaaaaaaatgaagaccatgagtgaacagttgtttcctaacccatggctatttagaatcttttgccaaagaatgacaatgatgcaaaaatgggaacagtttggattttaattagaactgtttaggagtgatgatgtgtaaaaagttgacttctcttttgcatggcacagagaaattatattccttacttcatgtcagtttatgttctaaatctttttcactgaatataaaaatcttgttaaatgccattaggcaccaacttaaagagggttgtaaaaatattaaaagtatatcgttaattctgtatctgttgcttgtcttttgtaagtgattatgtgttatgaccataggtggttacagctgccaaattatttttaaatggtcaaaaagaagagtgctatttaaacatctgtcttaaacaaaaactgtcataacttttcttttttctttttccattaggagaacattctagttggtaaatttcaaaatgtgcttgacacctgccttaaatagcacagacctattgtgcacatctttaaattatttcagctggcagaaaagaattacatttaaaactgaaatcaaggcctcaatacaaagattatcctggctcttttctatctctgtgggcctaattgaaatatgtactcttattttagacacgcctctgttaaaacagaccaggttttcctggtctcagacctatgatgacttgtccctttgatgtcactactgtgaattgaatataattagtaaaaatagacgatgaataaataacactttatagtaagaaaacaatatattttggccatctaaaaatgagaattataattatatgaattataatttaaactgtttaattttgtttaatgtgtatattgaatcttccaaattgaagccattattctcaattaagtactacaactatgacaatgcttgacctacatttctaaaataaaaattcacattttttgataaataaactacagttttaccagaaattactatctaaatgtgtattagcagtattttttaaggtgaaattgccttggtatctaatgaatgtgtagacagggagataaaatgaaggattgccagactagttagaatagaatttaggattaggttagttttgaaaaatgatgttgtaatatatgggttctaacacatcctaccataaaaactggaggagatatgtgtaacctggttaatttgggatggtggacattttgggctaatactgacaaaatacatcttaggactagtatacatgtgacacggattgctaggaggaatgaaaaactaaactgtatagtttatattccgtaaaccattttataatgttcaaagattaggttttgttattgatagtattaaatacacagtttctcttaacagtgatgggtgaaaacattttaccggattatggaatgtttaccagaacatgttttgattcttgaatgtacataataatgccatctaacttatttacattcttgtttacatgtgggagcttttgttttcaaaaattattttgttaaaaaatctcaataaagatttattattgttgttcttttcttaaaaaaaaaaaaaaaa

SEQ ID NO: 2033 - DNA, 3105 bp, Homo sapiens
gcacgagggactggggcggccacgcactccgccagaaggtcgccaggagcctccgcccttcaccttcctcggaaatccgccaggccacgcaagctccctgcccaacccttactgacgggggccacattttcccggcctccgcagccagaccttgacacaaaggacatcaaactgccgagggtaaaaaccccggaagggcggacacctccacatcgccttttgccacctttccctttatttccggagatatttattgagtgtctactgtgtgccaggcactatatctatgtgcatagaaaaaccctggaaggccatacaacaatatatatagagtgatcgtctctgcttgctgagctaacaggggtgtcaagcttccattttggtatctacttctaaatacactcagaacaggagaaatttggactaattttcaaactacagacactttctaatcatgatgcatttcaaaagtggactcgaattaactgagttgcaaaacatgacagtgcccgaggatgataacattagcaatgactccaatgatttcaccgaagtagaaaatggtcagataaatagcaagtttatttctgatcgtgaaagtagaagaagtctcacaaacagccatttggaaaaaaagaagtgtgatgagtatattccaggtacaacctccttaggcatgtctgtttttaacctaagcaacgccattatgggcagtgggattttgggactcgcctttgccctggcaaacactggaatcctactttttctggtacttttgacttcagtgacattgctgtctatatattcaataaacctcctattgatctgttcaaaagaaacaggctgcatggtgtatgaaaagctgggggaacaagtctttggcaccacagggaagttcgtaatctttggagccacctctctacagaacactggagcaatgctgagctacctcttcatcgtaaaaaatgaactaccctctgccataaagtttctaatgggaaaggaagagacattttcagcctggtacgtggatggccgcgttctggtggtgatagttacctttggcataattctccctctgtgtctcttgaagaacttagggtatcttggctatactagtggattttccttgagctgtatggtttttttcctaattgtggttatttacaagaaatttcaaattccctgcattgttccagagctaaattcaacaataagtgctaattcaacaaatgctgacacgtgtacgccaaaatatgttaccttcaattcaaagaccgtgtatgctttacccaccattgcatttgcatttgtttgccacccgtcagtcctgccaatttacagtgagcttaaagaccgatcacagaaaaaaatgcagatggtttcaaacatctcctttttcgccatgtttgttatgtacttcttgactgccatttttggctacttgacattctatgacaacgtgcagtccgacctccttcacaaatatcagagtaaagatgacattctcatcctgacagtgcggctggctgtcattgttgctgtgatcctcacagtgccggtgttatttttcacggatcgttcatctttatttgaactggctaagaaaacaaagtttaatttatgtcgtcataccgtggttacctgcatactcttggttgttatcaacttgttggtgatcttcataccctccatgaaggatatttttggagtcgtaggagttacatctgctaacatgcttattttcattcttccttcatctctttatttaaaaatcacaaccaggatggagataaaggaactcaaagaatttgggctgcccttttcttgggcctgggggtgttgttctccttggtcagcattcccttggtcatctatgactgggcctgctcatcgagtaatggtgaaggccactgaaacccgccgagaaaaagaaacatccctgttgtctgctcagtcaagtccccacacatcagcaatctctcaccacttcttttgcaagtttacagaagcaaacagaaatgtacaggatacttaaaatggaataactttttggttgcaaaacagagacatggttctataatgcttcatgtccctccaagatttgagatcaatttagggattgtgaaatttttttttcaaatttcatacaatcatatttcccagtacttttcacaatcattttttacccatctaactctatgttttgtggcttcccggtctcttagaactttgaaaacatgatatacaataatgtttatttattatacatccagattctgaaataattttcctactgatgttcagctcacactatctgtacctttttagaagagaaaagaatcttgaattgtatatatttattttgctttacagaaaaaaatggtttcgtaaataatttgcctattttgggtaacatagcacatggagataatcatctgaaagttatagggcactgccactgctgaatcagagcatgcccaatatttgaggtggctctgatttcctggcagctgaactcgggtagtccagtggcctagctggtaccacatctattcccatccagagacattctctggcaagtgttctcagctgaaaagtggttggggatgattcttaccttggtaattaaatgaagctacacatttgggtaatctagcaaatgaagtattttttccctcttggcaacttgtgtcagagttactctggtctgagtcaactttcgctggggaaaacctatggaacctactgcaaaaagattgtccaaaatgcctaagaaaatactcctctgatgcatttagccttcaaccctacctgtcttgctgaagggagaaaaatgttttagtacattataggcccagcagcttttattcatgtccaccagctagttgcacagagaatcatgtgtacctaactaaggatgatctaggataagtaactcctgttttatattgagtattttagggaagtctttaaaagacttgttttatatctataaatctaggttattacaaatacaagaattttgtaccttaaataagcctcatttctatttcttcttcattaattctccatctagtcttgtgaaaaaaaaaaaaaaaaaaa

SEQ ID NO: 2034 - DNA, 2425 bp, Homo sapiens
gcggccgccggtcctccctccacctcctcctcggccccccctcgcttccctcctcccacttcccgagctccggcgtcgtcccggccacgctcgacgctgctgcaggaacaaaggaagaccccgcggcggcggcggcgccacctccgcctgctgctccgacccgctcccggcccgcggcggcggcaccagggcgcccggctcagccttcccggaggcctcggcccggcctcatcgtgccggcttcgcgcgcgaacccggctttcgcatttgggaccctgcaggaaaaatatggctcaggagactaaccagaccccggggcccatgctgtgtagcacaggatgtggcttttatggaaatcctaggacaaatggaatgtgttcagtttgctacaaagaacatcttcagaggcagcaaaatagtggcagaatgagcccaatggggacagctagtggttccaacagtcctacctcagattctgcatctgtacagagagcagacactagcttaaacaactgtgaaggtgctgctggcagcacatctgaaaaatcaagaaatgtgcctgtggctgccttgcctgtaactcagcaaatgacagaaatgagcatttcaagagaggacaaaataactaccccgaaaacagaggtgtcagagccagttgtcactcagcccagtccatcagtttctcagcccagtacttctcagagtgaagaaaaagctcctgaattgcccaaaccaaagaaaaacagatgtttcatgtgcagaaagaaagttggtcttacagggtttgactgccgatgtggaaatttgttttgtggacttcaccgttactctgacaagcacaactgtccgtatgattacaaagcagaagctgcagcaaaaatcagaaaagagaatccagttgttgtggctgaaaaaattcagagaatataaattacttcttgtgaagagactgaaactttgtttttattttaatatatcgtaggaaaacattaaagagcagatgcatggccatttttctttgatgttctccagagttttacattacacttgtctgtcttataattgatattttaggatgtttgggtgtttgttacaggcagaattggatagatacagccctacaaatgtatatgccctcccctgaaaaaaattggatgaaaatctgcacagcaaagtgaaacacacagataataggaacaaaatgtagttcccatgtgccaaacaaaataaatgaaatctctgcatgtttgcagcatatctgccttttgggaatgtaatcaaggtataatctttggctagtgttatgtgcctgtatttttttaaaatggtacaccagaaaaggactggcagtctacttctaccatagttaaacttcaccctctttaatttcacaacatattctttggaagcaggaagaaatgctcataaagaggatcagaccttctttcccgtgaaaccagtatttggcgccatatataagcctggttaaattggtcatctaaagctgtcaaataagacattctgtgaaaggtaaacatcgaaactggttataagtaaaaccatcaagccaacaacagggtcttgagataacctttgaagcttattgtactggcctgcaccagaagatgtctgcattactcattgctaaaaatgtgtagcacagaactgcactaggattaatttgtttacaagaagaaatttaaactctacgtttggttttcacatacagcagctctattgaataacatgcatctgaattttaagttgcaaaggtatctgaataatttttcatgtgcatcttttgtcgaatgttttggttcaagaaagaatgtttaaagctttttaaaagacttcagttcttaatgtaactgtacccttctgcatggaaaatcataaccaacatggctgcagtagacttcttagtggtatccagcgccacttgcagagggctgctttatcatattgtacttgggtgtaggactctagtgttcttgggtgtattgcatgggctgcattatctacagcattgtacaataacaactagaaaaggcagtatacttcactgatgcttgtctggtaataatcacttctgtgttataatggaaggttttttgtgatgtatgaaacttgtgttttttatatataaatgagtatagttagtgttgtggtaatgcctgttttcatctgtaaatagttaagtatgtacacgaggcactacttctgatttattgcaatgttcagtcctagtttttacttttattcttaaagcattcagttttgctttcaattttatgtaccttagttctgagttagacctgcagatgtgtacagatagttcatatttatgtattgcacataatcatgctattcagcattgatgctatattgtattatgtaaataataaaagccatgtacagagggaaa

SEQ ID NO: 2035 - DNA, 3980 bp, Homo sapiens
gctggcggctgtttccgggcttagagggctggagtggccgccgagttggaggcggtggtggcagcagtaggagtgtgtagagtgcgggattgggggccaggccctgcggagggcgggggaagttgtcttcttttttttccggaggggccggtaaacctggtggctgaacggcaagatgaatttcctccgcggggtaatggggggtcagagtgccggaccccagcacacagaagccgagacgattcaaaagctttgtgacagagtagcttcatctactttattggatgatcgaagaaatgctgttcgtgctctcaaatcattatctaagaaataccgcttggaagtgggtatacaagctatggaacatcttattcatgttttacaaacagatcgttcagattctgaaataataggttatgctttggacatactatataatataatatctaatgaagaagaagaagaagtagaagaaaattccacaagacagagtgaagatttgggaagccaatttacagaaattttcattaagcagcaggaaaatgtcactcttctgttatctttattggaggagtttgatttccatgtccgctggcctggtgtgaagcttcttacttctcttttaaaacaactagggcctcaggtgcaacaaattattttagtcagtcctatgggtgtttcaagattgatggacttactagcggattccagggaagttatacgtaatgatggcgtcttactactgcaggcactaacaagaagcaatggtgcaatccagaaaattgttgcttttgaaaatgctttcgagagactactggacattatttcagaggaggggaacagtgatggaggtatagtagttgaagattgtttgattttgctccaaaacttattaaaaaacaacaactccaatcaaaatttttttaaagaaggctcatatattcaacgtatgaaaccttggtttgaagttggagatgaaaattctggctggtctgcacagaaagtgaccaatctacatctaatgctacagcttgttcgtgtattggtatctcccaccaaccctcctggtgctaccagtagctgccagaaggctatgttccagtgtgggttattgcagcagctttgtactatcctaatggctactggggttcctgctgatatcctgactgagaccataaatactgtatcagaagttattcgaggctgccaagtaaaccaagactactttgcatctgtaaatgcaccttcaaacccaccaagaccggcaattgtagtacttctcatgtccatggttaatgaaaggcagccatttgttttgcgctgtgctgttctctattgtttccagtgtttcttgtataaaaaccaaaaaggacaaggagaaatcgtgtcaacacttttaccttctaccattgatgcaacaggtaattcagtttcagctggccagttattatgtggaggtttgttttctactgattcactttcaaactggtgtgctgctgtggcccttgcccatgcgttgcaagaaaatgccacccagaaagaacagttgctcagggttcaacttgctacaagtattggcaaccctccagtttctttacttcaacagtgcaccaatattctttcacagggaagcaaaatacaaacaagagttggattattaatgttgctttgtacctggctaagcaattgtcccattgcagtaacgcattttcttcacaattcagccaatgttccattccttacaggacaaattgcagaaaatcttggagaagaagagcagttggtccaaggcttatgtgcccttttgttgggcatttcgatttatttcaatgataactcacttgagagctacatgaaagagaagctaaaacaactgattgagaagaggattggcaaagagaatttcatagagaaactaggatttattagcaaacatgagttgtattccagagcatctcagaaaccccagccaaactttcccagtccagaatacatgatatttgatcatgagtttacgaagctggtaaaagaacttgaaggtgttataactaaggctatttataagtccagtgaagaagataaaaaagaagaagaggtgaaaaaaacattagaacagcatgacaatattgtgactcactacaaaaatatgattcgagagcaagatctccaacttgaggaattaaggcagcaggtttctacattaaaatgtcaaaatgaacagctccagacggcagtcacacagcaagtatcacagatccagcagcacaaagaccagtataatcttcttaaaatacagctaggaaaagacaatcagcatcaaggttcttacagtgagggggctcagatgaatggcattcagccagaagaaattggtagattgcgagaagagatagaagaattaaaacgtaatcaggaacttttacaaagccagctgactgaaaaggactctatgattgaaaatatgaaatcttcccaaacatctggcacaaatgaacagtcttcagcaatagtttcagctagagattctgaacaagttgcagaattaaaacaggaactggcaactttaaagtctcagttaaactcacaatctgtggagatcaccaaactacagacagaaaagcaggaactgttacagaaaacagaagcgtttgcaaaatcagttgaggtacaaggagagaccgagactataatagccaccaaaactactgatgtagaaggaagactgtcagcattattacaagagaccaaagagttaaagaatgaaattaaagctctgtctgaggaaagaactgccattaaagagcagctggattcatctaatagtaccattgccattttacaaactgagaaagacaaactagagttggaaattacagattctaaaaaagaacaagatgatctcttggtgctcttggccgatcaagatcagaaaatactgtcattgaagaataaactcaaggatcttggtcatccagttgaagaagaggatgaacttgaatctggagaccaagaggatgaggatgatgaaagtgaagatcctggcaaggatctagatcatatctagttttcaaatctctaggaacaatagagattatatcataactctgaagatggactctaaactttggtttacctccatggaaaataaagatttagaaaccaggtggaaaacattcactattaagactattgatatatttttgtaatgttgccacccatgttgaaaaccttaaaactgaatttatgtagaacacacatcttttatttaaatccatctgaactgtcccaaaatgtaatttgcaaagagcttcaaacaccaaaaatataccattttaaggcatgtggtgacaatgctatttgccttagttcattcgttgtttactttgcaaaatttgtgacttttaagtactaacacatttgattgaatgtgtattgaattggaattattatttctaaattcagcatttgagtccttagttgatgattttcttttaaagaaattagtttatttaaaagcaagatagcctgggttgggagttagtgcatatcatcagccctccatctaatgtgattgctaagatgtgcaggataggacagcttagaatgagtgccttgacacctacatatggctgcattccatacctcagtgaagaagccgaaggatgctgacacacagtgatgtggagggcattccggagaaacttttgcaacagtgtattaatgtgattggttttctttttgttttaagctaaacatctaaaacaaatttcaagttaacagttcatacaactcagatttagtattattgtttatcataaaacatattatgttcctagttttaaaaagacccaaagtatgattaatataatttattggcatttttgctgaataggtttaagtcagataatagattttaaaaaagcaaatgaggcaatgtgtccaaatttaatgtttcataataaaaatagatacgttgactt

SEQ ID NO: 2036 - DNA, 498 bp, Homo sapiens
cgcagccaccgagacaccatgagagccctcacactcctcgccctattggccctggccgcactttgcatcgctggccaggcaggtgcgaagcccagcggtgcagagtccagcaaaggtgcagcctttgtgtccaagcaggagggcagcgaggtagtgaagagacccaggcgctacctgtatcaatggctgggagccccagtcccctacccggatcccctggagcccaggagggaggtgtgtgagctcaatccggactgtgacgagttggctgaccacatcggctttcaggaggcctatcggcgcttctacggcccggtctagggtgtcgctctgctggcctggccggcaaccccagttctgctcctctccaggcacccttctttcctcttccccttgcccttgccctgacctcccagccctatggatgtggggtccccatcatcccagctgctcccaaataaactccagaagaggaatctgaaaaaaaaaaaaaaaaaa

SEQ ID NO: 2037 - DNA, 6335 bp, Homo sapiens
gcccaacatggctggagcgcggcggaggtgagccggccgcccgcccgcagacgccccagcctactgcgcccgagtcccgcggccccagtggcgcctcagctctgcggtgccgaggcccaacggctcgatcgctgcccgccgccagcatgttgggcgccccggacgagagctccgtgcgggtggctgtcagaataagaccacagcttgccaaagagaagattgaaggatgccatatttgtacatctgtcacaccaggagagcctcaggtcttcctagggaaagataaggcttttacttttgactatgtatttgacattgactcccagcaagagcagatctacattcaatgtatagaaaaactaattgaaggttgctttgaaggatacaatgctacagtttttgcttatggacaaactggagctggtaaaacatacacaatgggaacaggatttgatgttaacattgttgaggaagaactgggtattatttctcgagctgttaaacacctttttaagagtattgaagaaaaaaaacacatagcaattaaaaatgggcttcctgctccagattttaaagtgaatgcccaattcttagagctctataatgaagaggtccttgacttatttgataccactcgtgatattgatgcaaaaagtaaaaaatcaaatataagaattcatgaagattcaactggaggaatttatactgtgggcgttacaacacgtactgtgaatacagaatcagagatgatgcagtgtttgaagttgggtgctttatcccggacaactgccagtacccagatgaatgttcagagctctcgttcacatgccatttttaccattcatgtgtgtcaaaccagagtgtgtccccaaatagatgctgacaatgcaactgataataaaattatttctgaatcagcacagatgaatgaatttgaaaccctgactgcaaagttccattttgttgatctcgcaggatctgaaagactgaagcgtactggagctacaggcgagagggcaaaagaaggcatttctatcaactgtggacttttggcacttggcaatgtaataagtgccttgggagacaagagcaagagggccacacatgtcccctatagagattccaagctaacaagactactacaggattccctcgggggtaatagccaaacaatcatgatagcatgtgtcagcccttcagacagagactttatggaaacgttaaacaccctgaaatacgccaatcgagctagaaatatcaagaataaggtgatggtcaatcaggacagagctagtcagcaaatcaatgcacttcgtagtgaaatcacacgacttcagatggagctcatggagtacaaaacaggtaaaagaataattgacgaagagggtgtggaaagcatcaatgacatgtttcatgagaatgctatgctacagactgaaaataataacctgcgtgtaagaattaaagccatgcaagagacggttgatgcattgaggtccagaattacacagcttgttagtgatcaggccaaccatgttcttgccagagcaggtgaaggaaatgaggagattagtaatatgattcatagttatataaaagaaatcgaagatctcagggcaaaattattagaaagtgaagcagtgaatgagaaccttcgaaaaaacttgacaagagccacagcaagagcgccatatttcagcggatcatcaactttttctcctaccatactatcctcagacaaagaaaccattgaaattatagacctagcaaaaaaagatttagagaagttgaaaagaaaagaaaagaggaagaaaaaaagtgtggctggtaaagaggataatacagacactgaccaagagaagaaagaagaaaagggtgtttcggaaagagaaaacaatgaattagaagtggaagaaagtcaagaagtgagtgatcatgaggatgaagaagaggaggaggaggaggaggaagatgacattgatgggggtgaaagttctgatgaatcagattctgaatcagatgaaaaagccaattatcaagcagacttggcaaacattacttgtgaaattgcaattaagcaaaagctgattgatgaactagaaaacagccagaaaagactgcagactctgaaaaagcagtatgaagagaagctaatgatgctgcaacataaaattcgggatactcagcttgaaagagaccaggtgcttcaaaacttaggctcggtagaatcttactcagaagaaaaagcaaaaaaagttaggtctgaatatgaaaagaaactccaagccatgaacaaagaactgcagagacttcaagcagctcaaaaagaacatgcaaggttgcttaaaaatcagtctcagtatgaaaagcaattgaagaaattgcagcaggatgtgatggaaatgaaaaaaacaaaggttcgcctaatgaaacaaatgaaagaagaacaagagaaagccagactgactgagtctagaagaaacagagagattgctcagttgaaaaaggatcaacgtaaaagagatcatcaacttagacttctggaagcccaaaaaagaaaccaagaagtggttctacgtcgcaaaactgaagaggttacggctcttcgtcggcaagtaagacccatgtcagataaagtggctgggaaagttactcggaagctgagttcatctgatgcacctgctcaggacacaggttccagtgcagctgctgtcgaaacagatgcatcaaggacaggagcccagcagaaaatgagaattcctgtggcgagagtccaggccttaccaacgccggcaacaaatggaaacaggaaaaaatatcagaggaaaggattgactggccgagtgtttatttccaagacagctcgcatgaagtggcagctccttgagcgcagggtcacagacatcatcatgcagaagatgaccatttccaacatggaggcagatatgaatagactcctcaagcaacgggaggaactcacaaaaagacgagagaaactttcaaaaagaagggagaagatagtcaaggagaatggagagggagataaaaatgtggctaatatcaatgaagagatggagtcactgactgctaatatcgattacatcaatgacagtatttctgattgtcaggccaacataatgcagatggaagaagcaaaggaagaaggtgagacattggatgttactgcagtcattaatgcctgcacccttacagaagcccgatacctgctagatcacttcctgtcaatgggcatcaataagggtcttcaggctgcccagaaagaggctcaaattaaagtactggaaggtcgactcaaacaaacagaaataaccagtgctacccaaaaccagctcttattccatatgttgaaagagaaggcagaattaaatcctgagctagatgctttactaggccatgctttacaagatctagatagcgtaccattagaaaatgtagaggatagtactgatgaggatgctcctttaaacagcccaggatcagaaggaagcacgctgtcttcagatctcatgaagctttgtggtgaagtgaaacctaagaacaaggcccgaaggagaaccaccactcagatggaattgctgtatgcagatagcagtgaactagcttcagacactagtacaggagatgcctccttgcctggccctctcacacctgttgcagaagggcaagagattggaatgaatacagagacaagtggtacttctgctagggaaaaagagctctctcccccacctggcttaccttctaagataggcagcatttccaggcagtcatctctatcagaaaaaaaaattccagagccttctcctgtaacaaggagaaaggcatatgagaaagcagaaaaatcaaaggccaaggaacaaaagcactcagattctggaacttcagaggctagtctttcacctccttcttccccaccaagccggccccgtaatgaactgaatgtttttaatcgtcttactgtttctcagggaaacacatcagttcagcaggataagtctgatgaaagtgactcctctctctcggaggtacacagatcctccagaaggggcataatcaacccatttcctgcttcaaaaggaatcagagcttttccacttcagtgtattcacatagctgaagggcatacaaaagctgtgctctgtgtggattctactgatgatctcctcttcactggatcaaaagatcgtacttgtaaagtatggaatctggtgactgggcaggaaataatgtcactggggggtcatcccaacaatgtcgtgtctgtaaaatactgtaattataccagtttggtcttcactgtatcaacatcttatattaaggtgtgggatatcagagattcagcaaagtgcattcgaacactaacgtcttcaggtcaagttactcttggagatgcttgttctgcaagtaccagtcgaacagtagctattccttctggagagaaccagatcaatcaaattgccctaaacccaactggcaccttcctctatgctgcttctggaaatgctgtcaggatgtgggatcttaaaaggtttcagtctacaggaaagttaacaggacacctaggccctgttatgtgccttactgtggatcagatttccagtggacaagatctaatcatcactggctccaaggatcattacatcaaaatgtttgatgttacagaaggagctcttgggactgtgagtcccacccacaattttgaaccccctcattatgatggcatagaagcactaaccattcaaggggataacctatttagtgggtctagagataatggaatcaagaaatgggacttaactcaaaaagaccttcttcagcaagttccaaatgcacataaggattgggtctgtgccctgggagtggtgccagaccacccagttttgctcagtggctgcagagggggcattttgaaagtctggaacatggatacttttatgccagtgggagagatgaagggtcatgatagtcctatcaatgccatatgtgttaattccacccacatttttactgcagctgatgatcgaactgtgagaatttggaaggctcgcaatttgcaagatggtcagatctctgacacaggagatctgggggaagatattgccagtaattaaacatgaatgaagataggttgtaaactgaatgctgtgataatactctgtattctttatggaaaatgttgtcctgtacttactaggcaaaacgtatgaatcggattaactggaaaatatatctgaattcaactgctgactataaatggtattctaataaaattgtgtactatcctgtgtgcttagttttaagatcaaccaatagatatatatcctacaattgatatattgctttattcacacttttattgtggctgaatttttgtgcctatctataaaacacactttcaaattatttgaattaccaagacgtctgcttttgtgacagtcagaaaacacacctggaatacgatgcagcccaccattaactcattcatgtagtttattcaagtgatttatgtatttaaactaaatattgaaaatgttagtcaaattgtggtttgcttgtcaggtatttatatcagtctgtagtggattcccaaatttcaaagctcttttaatgtaatggacaaaaataagatatgagaatattattgatgaattttcataaggtggaattgatcttaatctactaacagagaagggtagacagtttgtgttaaatgttggcatttacttgtattgaccaaagttttgcagctctactatattctgtgctcaggactaaaatgctgttaatttttttttttttttccagtgctgtgcatatattctgtgatgggaaacattgttgatgtcctaacagaaatatattttgatctattttcctatggagttgtttctattatgaccatttaattttgtttttatttaatagtagtatttccttcccttttatctaattttttatatgctgctaaatatattttaaatatactatgtttgcgaaccttggtagctatgatgagagctattatcatctgtggtgggaaaagctatgtaaataggtagattgtatagagagactatcttgtgttgtgcctgtatgaatttttaaaagttgttgactggattttgcaaaaggatgtataatatttctgtctgctcagaatattaatttgtaaattctgcaagtttaatttttatgtagatggtataacatttgaaaatattgtcttatgtgattttttcccctgaaaatatttgcttgtaaatgaaaacttagctagggcttaaataaacatgttgctatgaaattaaaaaaaa

SEQ ID NO: 2038 - DNA, 2583 bp, Homo sapiens
ggggttgggaagatggcggctcccagcctcctcaactggaggcgagtttcttccttcacggggccggtcccccgcgcccggcacggacaccgagcggtggccatccgggagctgatgatcatctttggagggggaaatgagggcatcgcggatgagctgcacgtctacaacacggctacgaatcagtggtttctgccagctgttagaggagatatccctccaggctgtgctgcccatggatttgtctgtgatggtaccagaatattagtatttgggggaatggttgaatatggaagatacagcaatgagttatatgagttacaagcaagtcgttggttatggaaaaaagtgaaaccccatccccctccttctggtttacctccttgtcctcggcttggacatagcttctctttatatggtaacaaatgctatttgtttggtggcctggcaaacgaaagcgaagattcaaacaataatgttcccagatatttaaatgatttttatgagttggagctacagcatggctctggtgttgtgggttggagcattccagtgactaaaggggttgtgccttctccaagagaatcccacacagctgttatatattgcaaaaaagattctggaagtcctaaaatgtatgtttttggtggaatgtgtggtgctcgcctggatgacctatggcagcttgacttagaaactatgtcatggtcaaaaccagaaactaaagggacagtgccacttccacgaagccttcatacagccagtgttataggaaacaagatgtacatttttggtggatgggtcccacataagggggaaaatactgagacttcacctcatgattgtgaatggagatgtaccagttcattttcttacctaaatctggatacaacagagtggaccaccctagtatcagattctcaggaagataaaaaaaattcaagaccaagaccaagagctggccactgtgctgttgcaatcggcactcgattgtatttttggagtggaagagatggctacaaaaaagcactgaatagtcaagtttgctgcaaggatctttggtatcttgatactgagaaaccaccggcaccatctcaagtacagctgatcaaagccactaccaactcctttcatgtcaagtgggatgaagtgtctacagttgagggctatcttttgcagttgagtacagacttgccataccaagctgcatcatcagattcttcagcagcaccaaatatgcaaggagtcaggatggaccctcacagacaaggcagtaataacatcgttcctaacagtatcaatgatacaataaacagcacaaaaactgaacagccagccacaaaagaaacttcaatgaaaaacaaaccagactttaaagcactgacggattctaatgccattttatatccatctttggcatcaaatgcttctaatcataatagtcatgtggtggatatgctaaggaaaaatgaaggtcctcacacttcagcaaatgtaggtgttctaagtagttgcctggatgtaagaacagtaattcctgaaacatctgtatccagtactgtttccagcacacaaactatggtaacccagcagaccattaaaactgaatcatccagtacaaatggggcagttgttaaagatgaaacttcactaacaacattcagtaccaaatctgaagttgatgaaacatatgcactgcctgcaacgaagatcagccgtgtagagacacatgctacagcaacgccgttttctaaagagactccttcaaatccagtggccacagtgaaagcgggagaacgacaatggtgtgatgtgggaatttttaaaaataatacagctttggtgagccagttttatttgctgccaaaagggaagcaaagcatctcaaaggtaggaaatgcagatgtacctgactacagcttgcttaagaaacaagatcttgttccaggcacaggatacagattcagggttgctgcaatcaatggttgtgggataggtcctttcagcaaaatcagtgaatttaaaacttgtattcctggttttcctggagctccttctgcagtcagaatttcaaagaatgttgaaggtatccacctttcctgggaacctccaacctcaccttctggaaatattttggaatattcagcctacttggctatccgcacagcacagatacaagataatccaagtcaacttgtgttcatgaggatttattgtggtcttaagacatcatgtatagtaactgctgggcaacttgcaaatgcacatattgattatacatccaggcctgccattgtgttcaggatatcagcaaagaatgaaaagggatatggaccagctacacaagttcggtggcttcaaggtaacaataagaaagcacctttaaattgaattggtttttttactgaagctattgtgatgatgattatttattagtaactggttatgaagatttgtcatttaaaagagtattctctggctgtatttccagcagttatgaacttgagtttgtaaattgttcttaaaatgtatttgctgaattatagatccaaataaaagaaaagaagcaaagactctctgaaa

SEQ ID NO: 2039 - DNA, 1660 bp, Homo sapiens
ccgccttcgcccacgtggtccggctccggctcagtcagccgcgtcgcgaatggggcaggagcgagcctctctggtcccgacgcgggtggcccgggtctcctcgactcctgaggaaagcccaccgggcggggcgggaggtgaagaggctggggaagtcagagctcgccgcgcatggccgggaacgcggagccgccgcccgccggagccgcatgcccccaggaccggaggtcctgcagcggccgggccgggggcgaccgcgtctgggaggacggagaacatccggcgaagaagctcaagagcggtggcgacgaggagcggcgcgagaagccgcccaagcggaagatcgtgctgctcatggcctattcgggcaagggctaccacggcatgcagaggaatgtcgggtcctcacaattcaaaacaattgaagatgacttggtgtccgccctcgtccggtcaggctgtattcctgaaaatcatggtgaggacatgaggaaaatgtccttccagcgctgcgcccggacagacaagggtgtgtccgcagccggccaggtggtatccctgaaggtgtggctgattgacgacattctagaaaagatcaacagccaccttccctctcacattcggattctgggactgaagcgggtcacgggcgggtttaactccaagaacagatgtgatgccaggacctattgctacctgctgcccacgtttgcctttgcgcacaaggaccgggacgttcaggatgagacctaccgcctgagcgccgagacgctgcagcaggtcaacaggctcctggcctgctacaagggcacgcacaacttccacaatttcacctcgcagaaggggccgcaggatcccagtgcctgccgctacatcctggagatgtactgcgaggaaccctttgtgcgggagggcctggagtttgcggtgatcagggtgaagggccagagcttcatgatgcatcagatccggaagatggtcggcctggtggtggccattgtgaagggttatgcccctgagagcgtgctggagcgcagctggggcacagagaaggtggacgtgcccaaggcgcccggactcggcctggtcctggagagggtgcacttcgagaagtacaaccagcgctttggcaacgatgggctgcatgagccgctggactgggcgcaggaggaaggaaaggtcgcagccttcaaggaggagcacatctaccccaccatcatcggcaccgagcgggacgaacgctccatggcccagtggctgagcaccttgcccatccacaacttcagtgccaccgctctcacggcaggtggcacgggcgccaaggtgcccagtcccctggaaggcagtgaaggggacggagacactgactgaggcgatgggagctgcccaccagagtgcctctgagcagctcacagtgtgtgcccagatgtgccacccctgtgggcagcaagaagctgggatcgctgcagccatgttttcccggccatgccggcgttgtaacctcaggaccttcccttgtaggaacagcctttctcgaatctgttttcagctcttgcattgcatagatgaacctcagcatgtaaagaactatttttttaaagaagtgattttcttattaaacaagtacaaattttgcttagtcaaaaaaaaaaaaaaaaaa

SEQ ID NO: 2040 - DNA, 1636 bp, Homo sapiens
ccgccttcgcccacgtggtccggctccggctcagtcagccgcgtcgcgaatggggcaggagcgagcctctctggtcccgacgcgggtggcccgggtctcctcgactcctgaggaaagcccaccgggcggggcgggagctcgccgcgcatggccgggaacgcggagccgccgcccgccggagccgcatgcccccaggaccggaggtcctgcagcggccgggccgggggcgaccgcgtctgggaggacggagaacatccggcgaagaagctcaagagcggtggcgacgaggagcggcgcgagaagccgcccaagcggaagatcgtgctgctcatggcctattcgggcaagggctaccacggcatgcagaggaatgtcgggtcctcacaattcaaaacaattgaagatgacttggtgtccgccctcgtccggtcaggctgtattcctgaaaatcatggtgaggacatgaggaaaatgtccttccagcgctgcgcccggacagacaagggtgtgtccgcagccggccaggtggtatccctgaaggtgtggctgattgacgacattctagaaaagatcaacagccaccttccctctcacattcggattctgggactgaagcgggtcacgggcgggtttaactccaagaacagatgtgatgccaggacctattgctacctgctgcccacgtttgcctttgcgcacaaggaccgggacgttcaggatgagacctaccgcctgagcgccgagacgctgcagcaggtcaacaggctcctggcctgctacaagggcacgcacaacttccacaatttcacctcgcagaaggggccgcaggatcccagtgcctgccgctacatcctggagatgtactgcgaggaaccctttgtgcgggagggcctggagtttgcggtgatcagggtgaagggccagagcttcatgatgcatcagatccggaagatggtcggcctggtggtggccattgtgaagggttatgcccctgagagcgtgctggagcgcagctggggcacagagaaggtggacgtgcccaaggcgcccggactcggcctggtcctggagagggtgcacttcgagaagtacaaccagcgctttggcaacgatgggctgcatgagccgctggactgggcgcaggaggaaggaaaggtcgcagccttcaaggaggagcacatctaccccaccatcatcggcaccgagcgggacgaacgctccatggcccagtggctgagcaccttgcccatccacaacttcagtgccaccgctctcacggcaggtggcacgggcgccaaggtgcccagtcccctggaaggcagtgaaggggacggagacactgactgaggcgatgggagctgcccaccagagtgcctctgagcagctcacagtgtgtgcccagatgtgccacccctgtgggcagcaagaagctgggatcgctgcagccatgttttcccggccatgccggcgttgtaacctcaggaccttcccttgtaggaacagcctttctcgaatctgttttcagctcttgcattgcatagatgaacctcagcatgtaaagaactatttttttaaagaagtgattttcttattaaacaagtacaaattttgcttagtcaaaaaaaaaaaaaaaaaa

SEQ ID NO: 2041 - DNA, 2047 bp, Homo sapiens
ccgccttcgcccacgtggtccggctccggctcagtcagccgcgtcgcgaatggggcaggagcgagcctctctggtcccgacgcgggtggcccgggtctcctcgactcctgaggaaagcccaccgggcggggcgggaggtgaagaggctggggaagtcagaggttaacctgggcgtcaggggacgttggagttgatccgtcagggtcccggggcggtctgggggcagtagagacggggcttgggcgcggggcctgagaggtcaggggtcagcaggagtgaggctggggcgtccaggtccgagaggtcaggggtcagctggagaggggctggggcgccggtttcccggaggtcaggggtcagaaggaacagggctgcagcgtcagggtccgagaggttaggggtcggcagaggcggagctggggcactgggggtcaggggtcggggatcagggcggggtcgggtgcactggtagcctgcgcatgggcctccagcttcgcgcgctgttgggagccttcggacggtggaccctgcgcctgggaccgcgtccgtcctgctcgccgcgcatggccgggaacgcggagccgccgcccgccggagccgcatgcccccaggaccggaggtcctgcagcggccgggccgggggcgaccgcgtctgggaggacggagaacatccggcgaagaagctcaagagcggtggcgacgaggagcggcgcgagaagccgcccaagcggaagatcgtgctgctcatggcctattcgggcaagggctaccacggcatgcagaggaatgtcgggtcctcacaattcaaaacaattgaagatgacttggtgtccgccctcgtccggtcaggctgtattcctgaaaatcatggtgaggacatgaggaaaatgtccttccagcgctgcgcccggacagacaagggtgtgtccgcagccggccaggtggtatccctgaaggtgtggctgattgacgacattctagaaaagatcaacagccaccttccctctcacattcggattctgggactgaagcgggtcacgggcgggtttaactccaagaacagatgtgatgccaggacctattgctacctgctgcccacgtttgcctttgcgcacaaggaccgggacgttcaggatgagacctaccgcctgagcgccgagacgctgcagcaggtcaacaggctcctggcctgctacaagggcacgcacaacttccacaatttcacctcgcagaaggggccgcaggatcccagtgcctgccgctacatcctggagatgtactgcgaggaaccctttgtgcgggagggcctggagtttgcggtgatcagggtgaagggccagagcttcatgatgcatcagatccggaagatggtcggcctggtggtggccattgtgaagggttatgcccctgagagcgtgctggagcgcagctggggcacagagaaggtggacgtgcccaaggcgcccggactcggcctggtcctggagagggtgcacttcgagaagtacaaccagcgctttggcaacgatgggctgcatgagccgctggactgggcgcaggaggaaggaaaggtcgcagccttcaaggaggagcacatctaccccaccatcatcggcaccgagcgggacgaacgctccatggcccagtggctgagcaccttgcccatccacaacttcagtgccaccgctctcacggcaggtggcacgggcgccaaggtgcccagtcccctggaaggcagtgaaggggacggagacactgactgaggcgatgggagctgcccaccagagtgcctctgagcagctcacagtgtgtgcccagatgtgccacccctgtgggcagcaagaagctgggatcgctgcagccatgttttcccggccatgccggcgttgtaacctcaggaccttcccttgtaggaacagcctttctcgaatctgttttcagctcttgcattgcatagatgaacctcagcatgtaaagaactatttttttaaagaagtgattttcttattaaacaagtacaaattttgcttagtcaaaaaaaaaaaaa

SEQ ID NO: 2042 - DNA, 11344 bp, Homo sapiens
ctcttacctgccaacctgggaggttgatgatgaacatgtctttaccttttctttggagtttgcttaccttattaatatttgctgaagtaaatggcgaacgtggagaacttgagctgcagagacaaaaaagaagcatcaatctccaacagcctcgaatggctacagagagaggaaatttggtgtttcttacggggtctgctcaaaacattgagtttagaaccggatccctgggaaaaattaaattaaatgatgaagatctcagtgagtgtttacatcagatccagaaaaacaaagaagatattatagagttaaaagggagcgcaattggtctgcctcaaaatatatctagtcaaatctatcagcttaattccaagctggtggatcttgagagaaaattccaaggcttgcagcagactgttgacaaaaaggtttgcagcagcaatccttgccagaatggtgggaactgcctcaatctgcatgattcctttttttgtatctgtcccccacagtggaagggtcctctctgctcagctgatgttaacgaatgtgagatttactcaggaacacccttgagctgccagaatggaggcacatgtgttaatacaatgggaagttacagttgtcactgcccacctgagacgtacggaccccagtgtgcatccaaatatgacgactgtgaagggggttctgtggcacgctgtgtccatggcatctgtgaggatttaatgcgagagcaagctggagagcccaagtacagctgcgtctgtgatgctgggtggatgtcttcacccaacagccctgcctgcacgctggacagagacgagtgcagcttccagcccgggccttgctccacacttgtgcagtgtttcaacactcaaggctctttctactgtggggcctgtccaacaggctggcaaggcaatggatatatttgcgaagatatcaatgaatgtgagataaataatggcggctgttctgtggctccacccgttgagtgtgtgaatacacctgggtcttcccactgccaggcctgtccaccagggtaccagggtgacggaagagtgtgcacactcacagacatctgctcagtcagtaatggaggctgccacccagatgcctcatgctcctcaactctaggttccttacctctctgcacgtgtctcccgggttatactggaaatggttatgggccaaatggatgtgtgcagctcagtaatatttgcctaagtcacccctgtctaaatggacaatgcatcgacactgtctctggttatttttgtaagtgtgactcaggttggacaggtgtcaactgtacagaaaacatcaatgagtgtttgagcaacccctgtttgaatggaggaacttgtgttgatggcgttgattctttcagttgtgaatgcacacgtctctggactggagctctctgtcaggttcctcagcaagtttgtggagagtccctctcaggaataaatggaagcttcagctacaggagcccggatgttggttatgttcatgatgttaactgcttctgggttatcaaaactgaaatgggaaaggtcctgcgtatcactttcacttttttccggttagaatccatggacaactgtccacacgagtttcttcaggtttatgatggagattcctcttctgcttttcaacttggaagattttgtggctccagcctccctcatgaactcctcagcagtgacaatgctctctattttcatctctattctgaacatttaagaaatgggagaggctttacagtaagatgggaaacacagcaaccagagtgtggaggtatcctgactggtccttacggttctattaagtctccggggtatcctggaaactatcccccaggaagagattgtgtctggattgttgtaactagtcctgacctcctggtaacatttacttttgggaccttgagcctcgagcaccatgatgactgcaacaaagattaccttgagattcgagatggtcctttgtatcaggacccccttcttgggaagttctgcaccactttctctgtcccaccgctccagactactggcccctttgccagaattcacttccattcagactcccagattagtgaccaaggcttccatatcacctacttaacatcaccttcggatctgcgttgtggtgggaactacacggacccagagggtgaactcttcttgcctgagttgtctgggcctttcactcacaccaggcaatgcgtctatatgatgaagcagccccagggagaacaaatacaaatcaacttcacccacgtggagctgcaatgccagagtgacagttctcagaattacattgaggttcgagatggtgaaaccttacttggaaaagtctgtggcaacggaaccatctctcacattaaatccattactaatagtgtctggatcaggtttaaaatagatgcttctgttgaaaaagctagtttcagagctgtttatcaagtcgcttgcggggatgaattaactggagaaggggtcattcgctcgcctttttttcctaacgtgtatcctggagaaagaacctgtaggtggaccatccaccagccccaaagccaagtcattctcctcaacttcactgtctttgaaattggaagttctgcccactgtgaaacagattatgttgagattggtagcagttccattttgggttctcctgaaaataaaaagtattgcggtacagacataccttcatttataacatctgtgtacaattttctttatgtcacattcgtgaaaagttcttctactgaaaaccatggtttcatggctaagttcagtgctgaggatttggcatgtggagaaattcttacagaatcaacagggaccattcaaagtcctggccatccaaatgtctacccccacggtatcaactgtacttggcatatattagtccaacctaatcacctgattcatttaatgttcgaaacatttcatctggagtttcattacaattgcacaaacgactacttggaagtttatgacaccgactctgagacatcccttggaagatactgtggaaagtcgatcccgccatctctcacaagcagtggtaactcattgatgctggtgtttgtgactgactccgacctcgcttatgaaggcttcttaataaactatgaagcaatcagtgcagcaacagcatgtttgcaagactacacagatgatttggggacattcacttctccaaacttccccaataattatcccaacaactgggaatgcatttatcggatcacagtgagaactggccaactgattgcagtgcacttcacaaacttctccttggaggaagccattggaaactattatacagattttctggaaatcagagatggaggctatgaaaaatcaccattgctgggaatattctatggctcaaatctacccccaacaatcatctctcatagtaacaaactatggttaaaatttaagagtgaccaaatagacacaaggtctggattctcagcttactgggatgggtcatcaacaggttgcgggggtaatctcaccacttcaagcggtacgttcatatctcccaactacccgatgccctattaccacagctctgaatgctactggtggttgaaatctagccacggcagcgcatttgaactggaattcaaagactttcacttggagcatcatccaaactgcactttagattacctggctgtatatgatggcccaagtagcaactctcatctgctaactcagctttgtggggatgagaaaccccctcttattcgttctagtggagacagcatgtttataaaactgaggacagatgaaggtcagcaaggacgtggcttcaaggctgaataccggcagacatgtgagaatgtggtaatagtcaatcaaacctatggcatcttagagagtatagggtatccgaatccttattctgaaaatcagcattgcaactggaccatccgggcaacaacaggcaacactgtgaactacacatttttagcatttgacttggaacatcacataaactgctccacagattatttagagctctatgatggaccacggcagatgggacgctactgtggagtagacctgccccctccagggagtactacaagctccaagcttcaagtgctgctccttacagatggggttggccgccgtgagaaaggatttcagatgcagtggtttgtttacggttgtggtggagagctgtctggggccacaggctccttcagcagccccgggttccccaacaggtatccaccaaacaaggagtgtatctggtacattaggacggaccccgggagtagcattcagctcaccatccatgacttcgatgtggagtatcattcaaggtgcaactttgatgtcttggagatctatggaggccccgatttccactctcccagaatagcccaactgtgtacccagagatcacctgagaaccccatgcaggtctccagcactggaaatgagctagcaattcgattcaagaccgacttgtccataaatgggagaggcttcaatgcgtcatggcaagcagtcactggaggttgtggtgggattttccaggctcccagtggagagattcattctccaaattaccccagtccttataggagcaacacagactgttcttgggtcattcgggttgacagatatcatcgtgttctcttgaacttcactgactttgatcttgaaccacaagactcttgtattatggcatacgatggcttaagctccacaatgtcccgccttgccaggacgtgtggaagggagcagctggctaaccccatcgtctcctcaggaaacagcctcttcttgagatttcagtctggcccttccagacagaacagaggcttccgagctcaattcaggcaagcctgcggaggccacatcctcaccagctcatttgatactgtttcctctccacggttccctgccaattatccaaacaatcagaactgcagctggatcattcaagcgcaacctccattaaatcatatcaccctctcttttacccactttgaacttgaaagaagcacaacgtgtgcacgtgactttgtagaaattttggatggcggccacgaagacgcgcccctccgaggccgttactgtggcaccgacatgccccatcctatcacatccttcagcagcgccctgacgctgagattcgtctctgattctagcatcagtgctgggggtttccacaccacggtcaccgcatcagtgtcggcttgtggtggaacgttctacatggctgaaggcatcttcaacagccctggctacccagacatttatccccctaatgtggaatgtgtctggaacatcatcagttcccctggcaaccggctccagctgtcttttatatctttccagttggaagactctcaggactgcagcagagattttgtggagatccgtgaaggaaatgccacgggtcacttggtgggacgatactgtggaaactccttccctctcaattattcttccatcgttggacataccctgtgggtcagatttatctcagatggttctggcagcggcacgggcttccaggccacatttatgaagatatttggcaatgataatattgtgggaactcatgggaaagtcgcctctcctttctggcctgaaaactacccacataactccaattaccaatggacagtaaatgtgaatgcatctcacgttgtccatggtagaatcttggagatggacatagaagaaatacaaaactgctattatgacaaattaaggatctatgatgggcctagcattcacgcccgcctaattggagcttactgtggtacccagactgaatctttcagctccactggaaattctttgacatttcatttttactccgactcttcaatctcggggaagggattccttctggagtggtttgcagtggatgcacctgatggtgttttacctaccattgctccaggtgcttgtggtggcttcctgaggacgggagatgcacccgtgtttctcttctccccgggctggcctgacagttacagtaatagagtggactgtacgtggctcatccaggctcccgactctaccgtggaactcaacattctttccctggacattgaatctcaccgaacgtgtgcctatgatagccttgtgatacgagatggagataataacttggcccagcagctagcagttctctgtggcagagagatccctgggcccatccggtctactggagagtacatgttcatccgcttcacctcggactccagtgtaaccagggcaggcttcaatgcatcctttcacaagagctgcggtggatatttgcatgcagacagagggatcatcacgtcccccaagtatccagagacttacccatccaacctcaactgttcttggcacgtcctggtccaaagtggcctgaccattgctgtccattttgaacagcctttccagattccaaatggagattcttcttgcaaccagggggattacttggtgctaagaaatggtcctgatatctattctccacccttgggaccccctggaggaaatggtcatttttgtggcagtcatgcttcatcaactctgttcacctcggataatcaaatgtttgttcagtttatttctgatcacagtaatgaagggcaaggatttaaaatcaaatatgaggcaaagagtttagcctgtgggggcaacgtctacatccatgatgctgattctgctgggtatgtgacctcccccaaccaccctcataattatcccccgcacgctgattgcatttggatcttagcggctccaccggaaacacgcatacagctgcaatttgaagatcgattcgatattgaagtaacacccaactgtacttccaactaccttgagttgcgggatggagtggattcggatgcaccaatactttccaaattttgtgggacatctttgcccagcagtcagtggtcctcaggagaggttatgtatttgagatttcgatctgacaacagccccacacatgtgggattcaaggccaagtattctatagctcagtgtgggggaagagtaccagggcaaagtggtgttgttgaaagcattggacatccaacacttccatacagagacaacttattctgtgagtggcatctccaggggctctctggacactatctcaccatctcttttgaagactttaaccttcagaattcttctggctgtgaaaaagacttcgtggagatctgggacaatcatacctctggaaacatcttgggcagatactgtggaaacaccattcctgacagcatagacacttctagcaatactgctgtggtcaggtttgtcacagacggctctgtgactgcctcaggattcagactgcgatttgaatccagtatggaagagtgtggtggggatcttcagggctctattggaacatttacttctcccaactacccgaacccaaatcctcatggccggatctgcgagtggagaatcactgccccggagggaaggcggatcaccctaatgtttaacaacctgaggctggccacgcatccgtcctgcaacaatgagcatgtgatagtattcaatggcattagaagtaactcaccccagctagagaaactgtgtagtagtgtgaatgtaagcaatgagattaaatcttcaggaaacacaatgaaagtcatttttttcacggatggatccaggccatatggcggcttcactgcttcctatacctccagtgaagatgcagtgtgtggtgggtctcttccaaatactcctgaaggaaactttacttctcctggctatgacggagtcaggaattactcaagaaacctgaactgcgaatggactctcagcaatccaaatcagggaaattcatccatttccattcactttgaagatttttacctagaaagtcaccaagactgtcaatttgatgtcctcgagtttcgagtgggtgatgctgatgggcccctgatgtggagactttgtggtccttcaaagcctacattgccattggttataccttattctcaggtatggattcactttgtcaccaacgaacgtgtagaacacattggattccatgcaaagtattcctttacagattgtggcggaatacagataggtgacagtggagtgatcacaagccccaactatccaaatgcttatgacagcctgacccactgctcttggctgttggaggccccacaagggcacaccatcactctcacatttagtgactttgatattgaaccccatacaacttgtgcttgggactctgtcactgtcaggaatggtgggtcccctgaatcacccatcataggacaatactgtggaaattcaaaccccaggacaatacagtcaggttccaatcagctggtcgtgacttttaactcagaccattcattgcaaggtggtggattttatgctacgtggaacacacaaactttaggttgtggtggaatatttcattctgataatggtacaatcagatcccctcactggcctcagaattttcccgaaaacagcagatgttcctggacggccattactcacaaaagtaaacacttggagatcagctttgacaacaacttcctaatccccagcggtgatggacaatgtcagaatagcttcgtgaaggtgtgggcaggaactgaggaggtggacaaagccctgctagccactggctgtgggaacgtggctccgggtcccgttatcacaccaagtaacacattcactgccgtcttccagtctcaggaggcaccagctcagggcttctccgcgtcctttgttagccgatgtggaagtaatttcactggcccttcaggttacatcatttctccaaattacccaaaacaatatgacaacaacatgaattgcacctatgtcatagaggctaatcctctgtcagtggtcctcttgacttttgtgtccttccacttagaagctcgttccgctgtgacgggaagctgtgtcaacgatggcgtgcacattatcagaggttacagcgtcatgtccaccccatttgctactgtgtgtggggatgagatgccagctcccctcaccatcgctgggccggttctgcttaacttctactccaacgagcaaatcacagacttcggattcaagttttcctataggataatctcctgtggtggtgtgttcaatttctcttctggaatcatcacaagtcctgcctattcatacgcagactacccaaatgatatgcactgtctgtataccatcaccgttagtgacgacaaggtgatcgagctcaagttcagtgattttgatgtggttccctccacctcctgctcccatgactacctggcaatttacgatggtgccaataccagcgatccccttcttggcaaattctgcggttccaagcgcccaccaaatgtgaagagcagcaataatagtatgctcctggtgttcaagacagattcatttcagacagcaaaaggctggaagatgtctttccggcagacattggggcctcagcaaggatgtggtggttatctgacaggctcgaataatacctttgcctctcctgattctgattcgaatggaatgtatgacaagaatttaaactgtgtatggatcataattgcacctgtaaacaaagtaattcacctcaccttcaatacatttgctctggaggcagcaagtactaggcaaagatgcctttatgattatgtaaagttatatgatggggatagtgaaaatgcgaacttggctggaacgttttgtggttccacagtacctgctccttttatctcttctggtaacttccttacggttcaattcatcagtgacttaacattagagagggaaggatttaatgctacatacaccatcatggacatgccttgtggtggaacgtacaatgcaacttggaccccacaaaatatttcatcacccaattcatcagacccagatgtcccattttccatctgtacttgggtcattgattcccctccgcatcagcaggtcaagataactgtgtgggcattacagctgacctcgcaagactgcacgcagaattacttacagcttcaggactcaccgcagggtcacggaaattcaagatttcagttctgtggcagaaatgcttcggctgtgccagtgttttattcttctatgagtactgcaatggtcattttcaaatctggagttgtaaacagaaactctagaatgagtttcacctatcagattgcagattgcaacagagactatcacaaggcatttggcaacctgagaagccctggatggccagataactacgacaatgacaaggattgcaccgttactctcacagccccccagaaccacaccatttccctcttttttcattcacttggcatcgagaactcagttgaatgcagaaacgatttcttggaggtgagaaatggaagtaacagcaattcaccattactgggcaagtactgtggaactctgctgccaaaccctgtcttctctcaaaataatgaactatacctacgatttaagagtgatagtgtaacttctgatcgtggatatgaaatcatctggacttcatcaccctctggatgtggtggaactctttatggagacagaggctcattcaccagccccggctatccaggcacatacccaaacaacacgtactgcgagtgggtccttgttgctcctgctggaaggcttgtcaccatcaacttctacttcatcagcattgacgatccaggagactgtgtccagaactatctcacactctatgatgggcccaacgccagctctccatcctctggaccatactgcggaggcgacaccagcatagctcccttcgtggcttcctcaaatcaggtcttcataaaatttcatgctgattatgcacggcgtccatccgcattccgattaacttgggacagctaagtgggtaacaactcgtgttcactcagcactttccctctgcagcacgctggacagcactctgccatcctgatacatgacccctgctgatgccacagagaataagctgaacttgtatggtttttcaccaaaccatggatagaatcaatatttgtaggccaggcgtggtggctcacccccctgtattctcagcactttgggaggccgaggcaggttgatcacctgaggtcaggagtttgagactagcctggccagcatggtgaaacctcatccctctaacaatataataattagccaggcgtggtggtgggtgcctgtaattccagccactcgagaggctgaggcaggagaattgcttgaacccaggaggcagaggttgcagtgagctaagatcacaccactacactccagcctgggcgagacggcaagactccatctcaaaaaaaaaa

SEQ ID NO: 2043 - DNA, 1443 bp, Homo sapiens
catggccgccccgccgcgccccgcgccatcgccccccgccccgcggcgcctcgacacgagcgacgtcctgcagcagatcatggccatcaccgaccagagcctggacgaggcacaggccagaaagcatgctctgaattgccatcggatgaagcctgctctgttcagcgtgctctgtgagatcaaggaaaagacagtggtaagcatccgtggcattcaagacgaagatccccctgacgcccagctcctgaggctggataacatgctgctggctgagggcgtgtgcaggcccgagaagagaggaagaggaggagcggtggccagggccggcacagcaacaccaggtggctgtccaaatgacaatagcattgagcactctgactacagggccaagctgtcccagatccgacagatttaccactctgagctagagaaatatgaacaggcctgtcgtgagttcaccacgcacgtcaccaacctcctccaggagcagagcaggatgaggcctgtctcccctaaggagattgagcgcatggtcggcgccattcacggcaagttcagcgccatccagatgcagttgaagcagagcacctgtgaggcagtgatgaccctgcgttcgcggctgctcgatgccaggcgcaagcggcggaatttcagcaagcaggcgacggaagtgctgaatgagtatttttactcccatctgaacaacccttaccccagcgaagaagccaaagaagagctggccaggaagggcggcctcaccatctcccaggtctctaactggtttggcaacaaaagaatccggtataaaaagaacatggggaagtttcaagaagaggctaccatttacacgggtaaaacggctgtggataccacggaagttggggtcccagggaaccacgccagctgcctgtcaacacctagctccggctcctctggacccttcccgctgcccagcgctggggacgccttcctcaccctgcggactctggcctctctccagcctcctcctgggggaggctgcctgcagtcccaggcccagggtagctggcagggggccaccccccaacctgcaactgcctcacctgctggagaccctggcagcatcaactccagtacatctaattaagtttgggggataagcaggaaagagcgctgcgtgagctgccatgtatcgccagccgttgctttgttactgaacgtgccgccgacgacctcagaaaacccagatgggtggtggtgcccatgagcccctgctcctcagccaggcccgtggcgccggctcatgtgtctgctgcgactcgagatggcctgaaacgccactcattctcccacttcagttcgtttttttgacagtaattttatggtaacgctatgaattgaattgtctgttctaggactgggcacagattttcccattaaaatttttgacttattttaaaaaaa

SEQ ID NO: 2044 - DNA, 6033 bp, Homo sapiens
atggaaacggggaaggacggcgcccgcagaggtacacaaagcccggagcggaaaaggcgaagcccagtgccgcgggcgcccagcacgaagctgaggccggcggcggcggcccgggccatggatccggtggcggccgaggccccgggcgaggccttcctggcgcggcgacggcctgagggcggtggcgggtccgcgcggccgcgttacagcctgttggcggagatcgggcgcggcagctacggcgtggtttatgaggcagtggccgggcgcagcggggcccgggtggcggtcaagaagatccgctgcgacgcccccgagaacgtggagctggcgctggctgaattctgggccctcaccagcctcaagcggcgccaccagaacgtcgtgcagtttgaggagtgcgtcctgcagcgcaatgggttagcccagcgcatgagtcacggcaacaagagctcgcagctttacctgcgcctggtggagacctcgctgaaaggagaaaggatcctgggttatgctgaggagccctgctatctctggtttgtcatggagttctgtgaaggtggagacctgaatcagtatgtcctgtcccggaggccagacccagccaccaacaaaagtttcatgctacagctgacgagcgccattgccttcctgcacaaaaaccatattgtgcacagggacctgaagccagacaacatcctcatcacagagcggtctggcacccccatcctcaaagtggccgactttggactaagcaaggtctgtgctgggctggcaccccgaggcaaagagggcaatcaagacaacaaaaatgtgaatgtgaataagtactggctgtcctcagcctgcggttcggacttctacatggctcctgaagtctgggagggacactacacagccaaggcggacatctttgccctgggcattatcatctgggcaatgatagaaagaatcacttttattgactctgagaccaagaaggagctcctggggacctacattaaacaggggactgagatcgtccctgttggtgaggcgctgctagaaaacccaaagatggagttgcacatcccccaaaaacgcaggacttccatgtctgaggggatcaagcagctcttgaaagatatgttagctgctaacccacaggaccggcctgatgcctttgaacttgaaaccagaatggaccaggtcacatgtgctgcttaaaattcagggctaagcattttgggtgattttaaactaggtcgattcctcgggacccacagtctcaccacgtctcctccagaggacggcagagggtacaggtggtggcctggccggttggcgatctcccgacagctggatccggcaatgtgaagcttttgtttgggtttccccgcttctttttagttttgctttatttttttccttttcttttcttttttttttttcctctttcctttttttaaatttaaaccattgagacttcagaagagcaggacacaatgctgtggacaggcaccaatttctttaaagaaattcaatgtgggcaaggcatatgtgtaaatttcacttttactttttataaggggttagggagctatttttggttttgtccttcactttccctctgtcttccttctttatacttttctcagttctacttatgacacctcacttccctagagaaggcctgcctccccatagggaatctgggggtttcttctggaacggggcgtgaggacacaaggaggcctctgggccacgcctccctaccagatgcaggaactcctggactccttggtgggctggccctggctagcccttgggcctcggagatgatcagaggtgaagaaccgcctggaagaggaaggccagggtttggccaggagaactaagaaggtctcaactccaggctttgttgtgtttaagctattgagagccccaggccacaccaggacttgcagtggtgggaatccattcctcttctgccctgtgttgcagggaactaggaggtaagggtggagggcgaccatctcgctcttgctggcggtggagcagccatccctgcctttctgttgggaaaaactgttgtgccaaactcttgtgtggaacacagctgggtcttcagcaggcatctgtcactgccgtgaggtcagcgcttctcacctaactgcctcctggattgtcatcttcccagatgtgtcccatagtgtccaggtgtcacagagacggcctgaggccctaagatctggttgtgactttgccatgataacagggtgtcctgaactggctgccgttgtcgtgttctcacagtgaagggcgtgccctgtgtgccggggtccatggtgtcatatgcagtgacacacactgtcaagcgccatttccctcacccctggagacttactgttaggtgcctgccctcagtatagacgtatccaatgggaaaacagcggacctgcccagagcagggaggtgtcgtggaactgggtagaccccctgcagcgttaggggcccatttgtgggctcgccaccttcaggcttccccagccatgacacttcagccccgccacccatgcctgtctgctgcagccatccttgcactctccagcgacactctcgcacctccctaggggaagcttccctccccctgggctgctgctctgagcccatctgttctccccctgcaagaaggggcaatgctcttgtgttgtccctctgtctggacgcgcctggccactccgaaggcttttcaccccattatggccaaatagtatagggccactggggagggggaagggaatcattttgtgttcatttttgttttctgtttcacctaaaccagcataggattgataggggagacggttggcgggcatttccgtttctatgtgaccaaggcagcaggggcttttacctgctaagcggcaatcctttggccctgagaatttgggagagaacagtgcatcaggccaggctcagcaatatgtttgctcacattctttcagccttctgtcacccccctcaacaccaaactttcttccttgtgagcagaaggttggctgctgttagcaggatcccacagtgataaccaggcccttcccttcctaagccaaaacccattgtgactgcctgtctctcctgtctctgacttctcaggcagcctcctgagtgcactgagttgtatccgagagggtgggaacagcagcatcccctaattgcagtacacggttccttttccgcccgccaccctgcctttccttgggggcagctgtctctctgtacatgagcaaatgggcaaaaacagtccccaaacccagcacccccctctccctggctgcagcccacactgtaacatccctagtgaggctccagcctaatgagccccttattttcttttttttccctccccaggtctagtagctctaactaaaaagttcttggagccatcgtgctccccctttgttatttttcttgctatcagagtagcaagaaacagcacccctgtaggtgacaggtgggcagcctggtaggggtcgccagcctccatgccccctcatcttccagttcttgcttagtggcacgacctctttccatagcataaatgcaggccagcgttttagccccaagtgcctgcccttgcttcttacccctcccctgctttctcaaacacttgcccacctcaggcactcagcgggctccgccgtggtgagagaactggccgtggctcagccccgggtagcacctgtagtttcagtgccactctccactgtccccttgtggaccagcttccactcactgtcacgtcccccctcctgcgtcttcactgggtctcaggctgccagcagctctctggtgcatcgtctcaacaccaccaagtttgtaggacctgcccaagttctagtagtattcaaaacttcaaacggcagtcatttgttctcctcggctctgtggcaaggatagccctttggagggggactcttgacctcggctgttagggatctgaacttggttttcccgtcagaagaatcagcaggacagatcgtagtgccttattccattgtcctcccctggccaggcctcctggctcagctggaagtgcatggcttctttctccctatctgtgtcctctgtcacttgctctttcactctctctctcattcccagagagccacgggggagggatcaccctcacccccaacaccctcttcctgagggctgtagccaggtccgcatctccccaccaccaccagggcactcactcgcagctatagcccaggacagaaaaactgtgctttggacaggtgcacactctctgcctcttacctctagccaggaggatgcctcagtctgttcattcgagactggccccgtctgaaccttctctgggcactggggactaaggttgcaggccttagcctcgtctcgtcccagaggcattggatcaggagaatgggaatttttttcctcccacctggacatagtttgcccctgtggctgcctttctgagggagtatactaaatgtttacttaagaaacaccctgtttacagccagaggagaaacacccaacactgagtggagatttgactctggacagggcctggcctccttagtggcactgccggggggccccagagcgaatgagggcagagatgcccggggcaggggcaaacgccctccgctccctctgctcccaaccctgtggtgctaggaccactccccgccttccctacggcctcctcgccctgcacattccccacctccacattcccctcctccaagatctcagctccttaacatatcagttgtctcctagcctagaaaaccagtgtttggagcaataagatgattatttttgcttgaatctttttctaagagaaggaaaagagctggcattgtgggaattttctttttatgctgttagctgtttaccttcttagaagacatcctaataggatggatgtctgggttttagccttggggtatcttttggaaacttagaaaagcaggagtcaggctgccaccccctaaggagggaccctaacgttctgcccttgcctggttccatatggctccttccagccctgcccaccaagtgcagctcccactttccatcctgcccatacgcccctcttcccccgacatctgggggcgctggtggcacttactctaggttggtctcagactatccctccccttggctggttttccctcctaggcctgtctggcagcccccagacagacgtagctcctgggagtctcggccctggcaaccttggaagagccaagctgacattgtttagctcttcaggccactgggttttggaggcagaagtccagagatactggctctgccaagctgtcgtactgggctgtggcacagccttcgagacaacacgggtgtatctctgatcctgccctacctaggcttcaaggggcttctgtctggagaaatgccctcaaagggtaaccagtaggtgtggcattgaattggccagtgttagcatctacagccatcaccgagatgagtccactgccgttgcctgcccgagggccccctaaggttatagacggtatcagcagggaggccgtcccgctggttttctaggagagcccacaggaggaagggagcctcttcaggggcactggaatcttttgtgccaggggcttcttttcatcagagccggggagtacattgcagtgacttcttaaacatttgtgtgggacagacgagcgtgagggaggttttaagccaggcacaaagttagtttccaatactagttaataaatctatttttcttcatttcctttttttgcacagaagctggtaatctaggacctacgtgtgaacaactttatatgaatattttttgtacttggtttacttgggttggtatgatacattatatttaagttccttgaacactgtggatcccctaatgtgtatgaatgactgaggctttgtaaattaagggacgtttgtgtgaataaagttatttgatggggtcaaagaagccatatgtgatttgaaaaaaaaaaaaaaaaaaaaaaa

SEQ ID NO: 2045 - DNA, 1070 bp, Homo sapiens
gcgattgctggggctgcagcgctgcctccgagaccgagagtgggtggagcgggtcttcctggaagggtgcgataaggccgggcgaggtgcctgggatgcttctccccttccgcgaggaagagatctaattgggtagggcgggtgtagactagcctgccgagccgcccgctggcacctgcagcctcctgggcgcccgcgggcccggcgagaaagttgttaaagggagcgaggtggttgttcctggggtccgaggcgcgcctctcacgccctgcccaacagaagccgcagtcccgtggggtctggagacgcagtttccttgttaatgacaataaatccctgctccccctgcctcagacatctacgcagcgaaatcgagcctggccttgagggtccacaccgcgaggaagatgcgtgcgcccattccagagcctaagcctggagacctgattgagatttttcgccctttctacagacactgggccatctatgttggcgatggatatgtggttcatctggcccctccaagtgaggtcgcaggagctggtgcagccagtgtcatgtccgccctgactgacaaggccatcgtgaagaaggaattgctgtatgatgtggccgggagtgacaagtaccaggtcaacaacaaacatgatgacaagtactcgccgctgccctgcacgaaaatcatccagcgggcggaggagctggtggggcaggaggtgctctacaagctgaccagtgagaactgcgagcactttgtgaatgagctgcgctatggagtcgcccgcagtgaccaggtcagagatgtcatcatcgctgcaagcgttgcaggaatgggcttggcagccatgagccttattggagtcatgttctcaagaaacaagcgacaaaagcaataactgaaaaagactgtctgtcagcgatgactttatacatcaagggggtcttgttttgctagagagtttggggtttggtttgtggatttcattgtgatttataataaggcttattttcacagaataaaataaagcaaaacgagggaggattttattgggggagtgcagcccaaaaaa

SEQ ID NO: 2046 - DNA, 2599 bp, Homo sapiens
gcgggagcctcccggcctgggattggtcgaaaaggaggggcgtggggcgggcgtgggggcagttccccagcccaggtcctcctctcacccgggccagttttcaaggcgggctgtaactggtggcatttgtcccgggaccaggtccacagttttatgtgtgagcaagatggaggctgacctgtctggctttaacatcgatgccccccgttgggaccagcgcaccttcctggggagagtgaagcacttcctaaacatcacggacccccgcactgtctttgtatctgagcgggagctggactgggccaaggtgatggtggagaagagcaggatgggggttgtgcccccaggcacccaagtggagcagctgctgtatgccaagaagctgtatgactcggccttccaccccgacactggggagaagatgaatgtcatcgggcgcatgtctttccagcttcctggcggcatgatcatcacgggcttcatgctccagttctacaggacgatgccggcggtgatcttctggcagtgggtgaaccagtccttcaatgccttagtcaactacaccaacaggaatgcggcttcccccacatcagtcaggcagatggccctttcctacttcacagccacaaccactgctgtggccacggctgtgggcatgaacatgttgacaaagaaagcgccgcccttggtgggccgctgggtgccctttgccgctgtggctgcggctaactgtgtcaatatccccatgatgcgacagcaggagctcataaagggaatctgcgtgaaggacaggaatgaaaatgagattggtcattcccggagagctgcggccataggcatcacccaagtagttatttctcggatcaccatgtcagctcctgggatgatcttgctgccagtcatcatggaaaggcttgagaaattgcacttcatgcagaaagtcaaggtcctgcacgccccattgcaggtcatgctgagcgggtgcttcctcatcttcatggtgccagtggcgtgtgggcttttcccacagaaatgtgaattgccagtttcctatctggaaccgaagctccaagacactatcaaggccaagtatggagaacttgagccttatgtctacttcaataagggtctctaaatgccccacttcagcaaggaccagtctattcccatattcaccagctcctccttagctacgtgcacacttgtgtcctccttcccctttgccaacaaggcctgaaggccagggtagattggggggtgggacaatgaatgcctcatacttacaccctggtactggttgattggacctcagggaaaaaaagtgaaaaagggtagcaaaggccaatgtcttctagctgcttcctcaacccctgtcccctggagaccagaagctgaggccctctcagggaggagacatccaagcaaatcatttggaaaagttaggaaacctttaggattctggttccagccagggttgaggaaaggaccttggatcaaaaggaagcttctatacctctttcttcttcgcttcctcctctcccaagcaatggaaacttttacccatgtaattctagctgaactcaggaaaaagaagggggaaaggactctgtccccttggggctcatcacccttccacatcctcctcctcgttgccccctggtcaggcagcttctttttttttttttcaagatggagtcttgctctgtcgcccaggctggaatgcagtggcgcgatctcggctcactgcaaactctgcctcctggattcaagcgattctcctgcctcagcctctcaagtagctgggattacagggcacctgccaccacgcctggctaatttttgtattttagtggagacggggtttcaccatgctggccagactggtctcgaactcctgacctcaggtgatccgcccgcctcagcctctgaaattgctgggattacaggcatgagccaccacacccagcccggacagcttctttgggagtgctgctaaccttgaaattatcagacacttaggagttattagtgctaaaaaggggaccgtgcaaggcagcagagttacatggttcttcaaatcatgtctgaacctattcttggaatcttctctataataagggaagttctcttaccccactgccacatacctctgttttaaaagataagtccactaactgtgagtaaaaatgatatatataggcattaaccacacactttaatgggtataatttcctggctgcctcccttcctcagcccattaggttaaacaccaaagaaagactggtgtgtactgaataggaaagggaagttttatttggaaccttctaagaggaaatcaaccaggaccaaagagccttaaaggacacacagcaatgcacagccacttcccttccccagcttggctgccctaggtgatttctcaagctccttgggggactgttgtttctcatctggaatcaatgtgtgtatgagttttgtctggtaggattgctgactctgtccaacagatatcactgtgaattgaataaatttgttgaaagagcacacaggcacacataaaaaaaaaaaaaaaaaaaaaaaaaaaaaaaaaaaaaaaaaa

SEQ ID NO: 2047 - DNA, 2570 bp, Homo sapiens
gggagtccggggacccgcgatcagccccggaggacggggtggggtcgccccaaacaggagcgccgggaccgctgggaccccgcactcggcgtccgccgccgccgggtagccgggcagtggaggtcccggatgaggcgacaatttttccggccccccctcccagtcccgccccacttccggggccgccactttcactttctcttccgccgaagccgctccccttgcgaagaactggggcctcccgggaggagagagggctttgccttgaaacccgggacgccaggggcgctcccgcaagtgggggtcctccgggacttggaacgccccggctgggtggtgtccgggcgtcctttccccgcttcttcccacctcggctggtcccgtttcctcctgcgcccagtgcggacctgtctcggcgcccgctgccctctcaccgccccacgcaggatcccggcctggtcatcgggcagtgtgatgcttcccgactgccgcggggacagcgaggcacacacagggcttgggccgcgccggaggccacacggcctggctgagttgctcctggtctcccgcctctcccaggcgacccggaggtagcatttcccaggaggcacggtcccccccagggggatgggcacagccacgccagatggacgagaagaccaagaaaggctgtgggtgagcgtggaggatgctcagatgcacaccgtcaccatctggctcacagtgcgccctgatatgacagtggcgtctctcaaggacatggtttttctggactatggcttcccaccagtcttgcagcagtgggtgattgggcagcggctggcacgagaccaggagaccctgcactcccatggggtgcggcagaatggggacagtgcctacctctatctgctgtcagcccgcaacacctccctcaaccctcaggagctgcagcgggagcggcagctgcggatgctggaagatctgggcttcaaggacctcacgctgcagccgcggggccctctggagccaggccccccaaagcccggggtcccccaggaacccggacgggggcagccagatgcagtgcctgagcccccaccggtgggctggcagtgccccgggtgcaccttcatcaacaagcccacgcggcctggctgtgagatgtgctgccgggcgcgccccgaggcctaccaggtccccgcctcataccagcccgacgaggaggagcgagcgcgcctggcgggcgaggaggaggcgctgcgtcagtaccagcagcggaagcagcagcagcaggaggggaactacctgcagcacgtccagctggaccagaggagcctggtgctgaacacggagcccgccgagtgccccgtgtgctactcggtgctggcgcccggcgaggccgtggtgctgcgtgagtgtctgcacaccttctgcagggagtgcctgcagggcaccatccgcaacagccaggaggcggaggtctcctgccccttcattgacaacacctactcgtgctcgggcaagctgctggagagggagatcaaggcgctcctgacccctgaggattaccagcgatttctagacctgggcatctccattgctgaaaaccgcagtgccttcagctaccattgcaagaccccagattgcaagggatggtgcttctttgaggatgatgtcaatgagttcacctgccctgtgtgtttccacgtcaactgcctgctctgcaaggccatccatgagcagatgaactgcaaggagtatcaggaggacctggccctgcgggctcagaacgatgtggctgcccggcagacgacagagatgctgaaggtgatgctgcagcagggcgaggccatgcgctgcccccagtgccagatcgtggtacagaagaaggacggctgcgactggatccgctgcaccgtctgccacaccgagatctgctgggtcaccaagggcccacgctggggccctgggggcccaggagacaccagcgggggctgccgctgcagggtaaatgggattccttgccacccaagctgtcagaactgccactgagctaaagatggtggggccacatgctgacccagccccacatccacattctgttagaatgtagctcagggagcttcgtggacggccttgcttgctgtagcgttgtaggggccctgcctgcactgcggttgtccacggtcacatctgccccagtgcctttgtccttcccttggggcttgccggccagacttctctcccctgcggctcccacctctgcctgaccccagccttaaacatagcccctggccagaggccttgctgggtggagcctctgtgtgactccatactcctcccaccacaacactcatctgtcaaacaccaagcactctcagcctccccgccttcagctgtcagctttctggggctaacttctctgcctttgtggttggaggcctgaggcctcttggaactcttgctaacctgttcagagccaggaaggagactgcacagttttgaaagcacagcccgtcaggtccggctctgcgtctccctctctgcagcctgtgtaagctattataattaaaatggttttccgggaa

SEQ ID NO: 2048 - DNA, 2715 bp, Homo sapiens
gggagtccggggacccgcgatcagccccggaggacggggtggggtcgccccaaacaggagcgccgggaccgctgggaccccgcactcggcgtccgccgccgccgggtagccgggcagtggaggtcccggatgaggcgacaatttttccggccccccctcccagtcccgccccacttccggggccgccactttcactttctcttccgccgaagccgctccccttgcgaagaactggggcctcccgggaggagagagggctttgccttgaaacccgggacgccaggggcgctcccgcaagtgggggtcctccgggacttggaacgccccggctgggtggtgtccgggcgtcctttccccgcttcttcccacctcggctggtcccgtttcctcctgcgcccagtgcggacctgtctcggcgcccgctgccctctcaccgccccacgcaggatcccggcctggtcaccgggcagtgtgatgcttcccgactgccgcggggacagcgaggcacacacagggcttgggccgcgccggaggccacacggcctggctgagttgctcctggtctcccgcctctcccaggcgacccggaggtagcatttcccaggaggcacggtcccccccagggggatgggcacagccacgccagatggacgagaagaccaagaaagcagaggaaatggccctgagcctcacccgagcagtggcgggcggggatgaacaggtggcaatgaagtgtgccatctggctggcagagcaacgggtgcccctgagtgtgcaactgaagcctgaggtctccccaacgcaggacatcaggctgtgggtgagcgtggaggatgctcagatgcacaccgtcaccatctggctcacagtgcgccctgatatgacagtggcgtctctcaaggacatggtttttctggactatggcttcccaccagtcttgcagcagtgggtgattgggcagcggctggcacgagaccaggagaccctgcactcccatggggtgcggcagaatggggacagtgcctacctctatctgctgtcagcccgcaacacctccctcaaccctcaggagctgcagcgggagcggcagctgcggatgctggaagatctgggcttcaaggacctcacgctgcagccgcggggccctctggagccaggccccccaaagcccggggtcccccaggaacccggacgggggcagccagatgcagtgcctgagcccccaccggtgggctggcagtgccccgggtgcaccttcatcaacaagcccacgcggcctggctgtgagatgtgctgccgggcgcgccccgaggcctaccaggtccccgcctcataccagcccgacgaggaggagcgagcgcgcctggcgggcgaggaggaggcgctgcgtcagtaccagcagcggaagcagcagcagcaggaggggaactacctgcagcacgtccagctggaccagaggagcctggtgctgaacacggagcccgccgagtgccccgtgtgctactcggtgctggcgcccggcgaggccgtggtgctgcgtgagtgtctgcacaccttctgcagggagtgcctgcagggcaccatccgcaacagccaggaggcggaggtctcctgccccttcattgacaacacctactcgtgctcgggcaagctgctggagagggagatcaaggcgctcctgacccctgaggattaccagcgatttctagacctgggcatctccattgctgaaaaccgcagtgccttcagctaccattgcaagaccccagattgcaagggatggtgcttctttgaggatgatgtcaatgagttcacctgccctgtgtgtttccacgtcaactgcctgctctgcaaggccatccatgagcagatgaactgcaaggagtatcaggaggacctggccctgcgggctcagaacgatgtggctgcccggcagacgacagagatgctgaaggtgatgctgcagcagggcgaggccatgcgctgcccccagtgccagatcgtggtacagaagaaggacggctgcgactggatccgctgcaccgtctgccacaccgagatctgctgggtcaccaagggcccacgctggggccctgggggcccaggagacaccagcgggggctgccgctgcagggtaaatgggattccttgccacccaagctgtcagaactgccactgagctaaagatggtggggccacatgctgacccagccccacatccacattctgttagaatgtagctcagggagcttcgtggacggccttgcttgctgtagcgttgtaggggccctgcctgcactgcggttgtccacggtcacatctgccccagtgcctttgtccttcccttggggcttgccggccagacttctctcccctgcggctcccacctctgcctgaccccagccttaaacatagcccctggccagaggccttgctgggtggagcctctgtgtgactccatactcctcccaccacaacactcatctgtcaaacaccaagcactctcagcctccccgccttcagctgtcagctttctggggctaacttctctgcctttgtggttggaggcctgaggcctcttggaactcttgctaacctgttcagagccaggaaggagactgcacagttttgaaagcacagcccgtcaggtccggctctgcgtctccctctctgcagcctgtgtaagctattataattaaaatggttttccgggaa

SEQ ID NO: 2049 - DNA, 3633 bp, Homo sapiens
gagaaccggatgaggcggcgaccgtgaggccgagccgggagcgggcgtcttgccgaggcccgggcgggcggggagcaacggctacagacgccgcggggccaggtcgttgagggtcggcggcgggcgaggagcgcagggcgctcgggccgggggccgccggcgccatgggcaaccgcgggatggaagagctgatcccgctggtcaacaaactgcaggacgccttcagctccatcggccagagctgccacctggacctgccgcagatcgctgtagtgggcggccagagcgccggcaagagctcggtgctggagaacttcgtgggccgggacttccttccccgcggttcaggaatcgtcacccggcggcctctcattctgcagctcatcttctcaaaaacagaacatgccgagtttttgcactgcaagtccaaaaagtttacagactttgatgaagtccggcaggagattgaagcagagaccgacagggtcacggggaccaacaaaggcatctccccagtgcccatcaaccttcgagtctactcgccacacgtgttgaacttgaccctcatcgacctcccgggtatcaccaaggtgcctgtgggcgaccagcctccagacatcgagtaccagatcaaggacatgatcctgcagttcatcagccgggagagcagcctcattctggctgtcacgcccgccaacatggacctggccaactccgacgccctcaagctggccaaggaagtcgatccccaaggcctacggaccatcggtgtcatcaccaagcttgacctgatggacgagggcaccgacgccagggacgtcttggagaacaagttgctcccgttgagaagaggctacattggcgtggtgaaccgcagccagaaggatattgagggcaagaaggacatccgtgcagcactggcagctgagaggaagttcttcctctcccacccggcctaccggcacatggccgaccgcatgggcacgccacatctgcagaagacgctgaatcagcaactgaccaaccacatccgggagtcgctgccggccctacgtagcaaactacagagccagctgctgtccctggagaaggaggtggaggagtacaagaactttcggcccgacgaccccacccgcaaaaccaaagccctgctgcagatggtccagcagtttggggtggattttgagaagaggatcgagggctcaggagatcaggtggacactctggagctctccgggggcgcccgaatcaatcgcatcttccacgagcggttcccatttgagctggtgaagatggagtttgacgagaaggacttacgacgggagatcagctatgccattaagaacatccatggagtcaggaccgggcttttcaccccggacttggcattcgaggccattgtgaaaaagcaggtcgtcaagctgaaagagccctgtctgaaatgtgtcgacctggttatccaggagctaatcaatacagttaggcagtgtaccagtaagctcagttcctacccccggttgcgagaggagacagagcgaatcgtcaccacttacatccgggaacgggaggggagaacgaaggaccagattcttctgctgatcgacattgagcagtcctacatcaacacgaaccatgaggacttcatcgggtttgccaatgcccagcagaggagcacgcagctgaacaagaagagagccatccccaatcagggggagatcctggtgatccgcaggggctggctgaccatcaacaacatcagcctgatgaaaggcggctccaaggagtactggtttgtgctgactgccgagtcactgtcctggtacaaggatgaggaggagaaagagaagaagtacatgctgcctctggacaacctcaagatccgtgatgtggagaagggcttcatgtccaacaagcacgtcttcgccatcttcaacacggagcagagaaacgtctacaaggacctgcggcagatcgagctggcctgtgactcccaggaagacgtggacagctggaaggcctcgttcctccgagctggcgtctaccccgagaaggaccaggcagaaaacgaggatggggcccaggagaacaccttctccatggacccccaactggagcggcaggtggagaccattcgcaacctggtggactcatacgtggccatcatcaacaagtccatccgcgacctcatgccaaagaccatcatgcacctcatgatcaacaatacgaaggccttcatccaccacgagctgctggcctacctatactcctcggcagaccagagcagcctcatggaggagtcggctgaccaggcacagcggcgggacgacatgctgcgcatgtaccatgccctcaaggaggcgctcaacatcatcggtgacatcagcaccagcactgtgtccacgcctgtacccccgcctgtcgatgacacctggctccagagcgccagcagccacagccccactccacagcgccgaccggtgtccagcatacacccccctggccggcccccagcagtgaggggccccactccagggccccccctgattcctgttcccgtgggggcagcagcctccttctcggcgcccccaatcccatcccggcctggaccccagagcgtgtttgccaacagtgacctcttcccagccccgcctcagatcccatctcggccagttcggatccccccagggattcccccaggagtgcccagcagaagaccccctgctgcgcccagccggcccaccattatccgcccagccgagccatccctgctcgactaggcctcgaggggggcgtgctctcgggggggcctcacgcacccgcggcgcaggagcttcagtggtctggggccctccgccgcccctatgctgggaccaggctcccagtgggcagccctggcctcttccttaacgctggccccggtccagggccggcccctgtgcctggctggacaccgcactgcgcaaaggggccctggagctccaggcagggggcgctggggtgttgcactttgggggatggagtctcagggtggcagaggggggaccagaacccttgacaccatcctgaatgaggggtccagcctgggggggactctaccaaggtcttcttgggctgggaaagcccatgtagggcaggccttctataagtgcgggcaccaagggcgcctacatccccaggccttgctggggtgcaggggtatatcaacttcccattagcaggagctccccagcggcaagcctggcccagtgggctcggtagtgcccagctggcaggcctgaggtgtacatagtccttcccggccatattaaccacacagcctgagcctggcccagcctcggctgccagaggtgcctttgctaggcccggagccgttggcccgggccggccttgccctattcctctcctcctcctcctcctgggtcccccagggtggctgggcttgggctatgtgggtggtggtggcggggggtcttgggggcctctcagctcccgcccatgcctccctgatgggtgggcccagggcggcctctctctgaggagacctcacccactcctcgctcagtttgaccactgtaagtgcctgcactctgtattctattaataaactaaaataaagggaagacgctgctggtg

SEQ ID NO: 2050 - DNA, 3633 bp, Homo sapiens
gagaaccggatgaggcggcgaccgtgaggccgagccgggagcgggcgtcttgccgaggcccgggcgggcggggagcaacggctacagacgccgcggggccaggtcgttgagggtcggcggcgggcgaggagcgcagggcgctcgggccgggggccgccggcgccatgggcaaccgcgggatggaagagctgatcccgctggtcaacaaactgcaggacgccttcagctccatcggccagagctgccacctggacctgccgcagatcgctgtagtgggcggccagagcgccggcaagagctcggtgctggagaacttcgtgggccgggacttccttccccgcggttcaggaatcgtcacccggcggcctctcattctgcagctcatcttctcaaaaacagaacatgccgagtttttgcactgcaagtccaaaaagtttacagactttgatgaagtccggcaggagattgaagcagagaccgacagggtcacggggaccaacaaaggcatctccccagtgcccatcaaccttcgagtctactcgccacacgtgttgaacttgaccctcatcgacctcccgggtatcaccaaggtgcctgtgggcgaccagcctccagacatcgagtaccagatcaaggacatgatcctgcagttcatcagccgggagagcagcctcattctggctgtcacgcccgccaacatggacctggccaactccgacgccctcaagctggccaaggaagtcgatccccaaggcctacggaccatcggtgtcatcaccaagcttgacctgatggacgagggcaccgacgccagggacgtcttggagaacaagttgctcccgttgagaagaggctacattggcgtggtgaaccgcagccagaaggatattgagggcaagaaggacatccgtgcagcactggcagctgagaggaagttcttcctctcccacccggcctaccggcacatggccgaccgcatgggcacgccacatctgcagaagacgctgaatcagcaactgaccaaccacatccgggagtcgctgccggccctacgtagcaaactacagagccagctgctgtccctggagaaggaggtggaggagtacaagaactttcggcccgacgaccccacccgcaaaaccaaagccctgctgcagatggtccagcagtttggggtggattttgagaagaggatcgagggctcaggagatcaggtggacactctggagctctccgggggcgcccgaatcaatcgcatcttccacgagcggttcccatttgagctggtgaagatggagtttgacgagaaggacttacgacgggagatcagctatgccattaagaacatccatggagtcaggacggggctcttcacccccgacatggcctttgaagccattgtgaaaaaacagattgtaaaactcaaagagccgagtttgaagtgtgttgatctcgtggtctcagagctggccacggtcataaaaaagtgtgccgagaagctcagttcctacccccggttgcgagaggagacagagcgaatcgtcaccacttacatccgggaacgggaggggagaacgaaggaccagattcttctgctgatcgacattgagcagtcctacatcaacacgaaccatgaggacttcatcgggtttgccaatgcccagcagaggagcacgcagctgaacaagaagagagccatccccaatcagggggagatcctggtgatccgcaggggctggctgaccatcaacaacatcagcctgatgaaaggcggctccaaggagtactggtttgtgctgactgccgagtcactgtcctggtacaaggatgaggaggagaaagagaagaagtacatgctgcctctggacaacctcaagatccgtgatgtggagaagggcttcatgtccaacaagcacgtcttcgccatcttcaacacggagcagagaaacgtctacaaggacctgcggcagatcgagctggcctgtgactcccaggaagacgtggacagctggaaggcctcgttcctccgagctggcgtctaccccgagaaggaccaggcagaaaacgaggatggggcccaggagaacaccttctccatggacccccaactggagcggcaggtggagaccattcgcaacctggtggactcatacgtggccatcatcaacaagtccatccgcgacctcatgccaaagaccatcatgcacctcatgatcaacaatacgaaggccttcatccaccacgagctgctggcctacctatactcctcggcagaccagagcagcctcatggaggagtcggctgaccaggcacagcggcgggacgacatgctgcgcatgtaccatgccctcaaggaggcgctcaacatcatcggtgacatcagcaccagcactgtgtccacgcctgtacccccgcctgtcgatgacacctggctccagagcgccagcagccacagccccactccacagcgccgaccggtgtccagcatacacccccctggccggcccccagcagtgaggggccccactccagggccccccctgattcctgttcccgtgggggcagcagcctccttctcggcgcccccaatcccatcccggcctggaccccagagcgtgtttgccaacagtgacctcttcccagccccgcctcagatcccatctcggccagttcggatccccccagggattcccccaggagtgcccagcagaagaccccctgctgcgcccagccggcccaccattatccgcccagccgagccatccctgctcgactaggcctcgaggggggcgtgctctcgggggggcctcacgcacccgcggcgcaggagcttcagtggtctggggccctccgccgcccctatgctgggaccaggctcccagtgggcagccctggcctcttccttaacgctggccccggtccagggccggcccctgtgcctggctggacaccgcactgcgcaaaggggccctggagctccaggcagggggcgctggggtgttgcactttgggggatggagtctcagggtggcagaggggggaccagaacccttgacaccatcctgaatgaggggtccagcctgggggggactctaccaaggtcttcttgggctgggaaagcccatgtagggcaggccttctataagtgcgggcaccaagggcgcctacatccccaggccttgctggggtgcaggggtatatcaacttcccattagcaggagctccccagcggcaagcctggcccagtgggctcggtagtgcccagctggcaggcctgaggtgtacatagtccttcccggccatattaaccacacagcctgagcctggcccagcctcggctgccagaggtgcctttgctaggcccggagccgttggcccgggccggccttgccctattcctctcctcctcctcctcctgggtcccccagggtggctgggcttgggctatgtgggtggtggtggcggggggtcttgggggcctctcagctcccgcccatgcctccctgatgggtgggcccagggcggcctctctctgaggagacctcacccactcctcgctcagtttgaccactgtaagtgcctgcactctgtattctattaataaactaaaataaagggaagacgctgctggtg

SEQ ID NO: 2051 - DNA, 3621 bp, Homo sapiens
gagaaccggatgaggcggcgaccgtgaggccgagccgggagcgggcgtcttgccgaggcccgggcgggcggggagcaacggctacagacgccgcggggccaggtcgttgagggtcggcggcgggcgaggagcgcagggcgctcgggccgggggccgccggcgccatgggcaaccgcgggatggaagagctgatcccgctggtcaacaaactgcaggacgccttcagctccatcggccagagctgccacctggacctgccgcagatcgctgtagtgggcggccagagcgccggcaagagctcggtgctggagaacttcgtgggccgggacttccttccccgcggttcaggaatcgtcacccggcggcctctcattctgcagctcatcttctcaaaaacagaacatgccgagtttttgcactgcaagtccaaaaagtttacagactttgatgaagtccggcaggagattgaagcagagaccgacagggtcacggggaccaacaaaggcatctccccagtgcccatcaaccttcgagtctactcgccacacgtgttgaacttgaccctcatcgacctcccgggtatcaccaaggtgcctgtgggcgaccagcctccagacatcgagtaccagatcaaggacatgatcctgcagttcatcagccgggagagcagcctcattctggctgtcacgcccgccaacatggacctggccaactccgacgccctcaagctggccaaggaagtcgatccccaaggcctacggaccatcggtgtcatcaccaagcttgacctgatggacgagggcaccgacgccagggacgtcttggagaacaagttgctcccgttgagaagaggctacattggcgtggtgaaccgcagccagaaggatattgagggcaagaaggacatccgtgcagcactggcagctgagaggaagttcttcctctcccacccggcctaccggcacatggccgaccgcatgggcacgccacatctgcagaagacgctgaatcagcaactgaccaaccacatccgggagtcgctgccggccctacgtagcaaactacagagccagctgctgtccctggagaaggaggtggaggagtacaagaactttcggcccgacgaccccacccgcaaaaccaaagccctgctgcagatggtccagcagtttggggtggattttgagaagaggatcgagggctcaggagatcaggtggacactctggagctctccgggggcgcccgaatcaatcgcatcttccacgagcggttcccatttgagctggtgaagatggagtttgacgagaaggacttacgacgggagatcagctatgccattaagaacatccatggagtcaggacggggctcttcacccccgacatggcctttgaagccattgtgaaaaaacagattgtaaaactcaaagagccgagtttgaagtgtgttgatctcgtggtctcagagctggccacggtcataaaaaagtgtgccgagaagctcagttcctacccccggttgcgagaggagacagagcgaatcgtcaccacttacatccgggaacgggaggggagaacgaaggaccagattcttctgctgatcgacattgagcagtcctacatcaacacgaaccatgaggacttcatcgggtttgccaatgcccagcagaggagcacgcagctgaacaagaagagagccatccccaatcaggtgatccgcaggggctggctgaccatcaacaacatcagcctgatgaaaggcggctccaaggagtactggtttgtgctgactgccgagtcactgtcctggtacaaggatgaggaggagaaagagaagaagtacatgctgcctctggacaacctcaagatccgtgatgtggagaagggcttcatgtccaacaagcacgtcttcgccatcttcaacacggagcagagaaacgtctacaaggacctgcggcagatcgagctggcctgtgactcccaggaagacgtggacagctggaaggcctcgttcctccgagctggcgtctaccccgagaaggaccaggcagaaaacgaggatggggcccaggagaacaccttctccatggacccccaactggagcggcaggtggagaccattcgcaacctggtggactcatacgtggccatcatcaacaagtccatccgcgacctcatgccaaagaccatcatgcacctcatgatcaacaatacgaaggccttcatccaccacgagctgctggcctacctatactcctcggcagaccagagcagcctcatggaggagtcggctgaccaggcacagcggcgggacgacatgctgcgcatgtaccatgccctcaaggaggcgctcaacatcatcggtgacatcagcaccagcactgtgtccacgcctgtacccccgcctgtcgatgacacctggctccagagcgccagcagccacagccccactccacagcgccgaccggtgtccagcatacacccccctggccggcccccagcagtgaggggccccactccagggccccccctgattcctgttcccgtgggggcagcagcctccttctcggcgcccccaatcccatcccggcctggaccccagagcgtgtttgccaacagtgacctcttcccagccccgcctcagatcccatctcggccagttcggatccccccagggattcccccaggagtgcccagcagaagaccccctgctgcgcccagccggcccaccattatccgcccagccgagccatccctgctcgactaggcctcgaggggggcgtgctctcgggggggcctcacgcacccgcggcgcaggagcttcagtggtctggggccctccgccgcccctatgctgggaccaggctcccagtgggcagccctggcctcttccttaacgctggccccggtccagggccggcccctgtgcctggctggacaccgcactgcgcaaaggggccctggagctccaggcagggggcgctggggtgttgcactttgggggatggagtctcagggtggcagaggggggaccagaacccttgacaccatcctgaatgaggggtccagcctgggggggactctaccaaggtcttcttgggctgggaaagcccatgtagggcaggccttctataagtgcgggcaccaagggcgcctacatccccaggccttgctggggtgcaggggtatatcaacttcccattagcaggagctccccagcggcaagcctggcccagtgggctcggtagtgcccagctggcaggcctgaggtgtacatagtccttcccggccatattaaccacacagcctgagcctggcccagcctcggctgccagaggtgcctttgctaggcccggagccgttggcccgggccggccttgccctattcctctcctcctcctcctcctgggtcccccagggtggctgggcttgggctatgtgggtggtggtggcggggggtcttgggggcctctcagctcccgcccatgcctccctgatgggtgggcccagggcggcctctctctgaggagacctcacccactcctcgctcagtttgaccactgtaagtgcctgcactctgtattctattaataaactaaaataaagggaagacgctgctggtg

SEQ ID NO: 2052 - DNA, 3621 bp, Homo sapiens
gagaaccggatgaggcggcgaccgtgaggccgagccgggagcgggcgtcttgccgaggcccgggcgggcggggagcaacggctacagacgccgcggggccaggtcgttgagggtcggcggcgggcgaggagcgcagggcgctcgggccgggggccgccggcgccatgggcaaccgcgggatggaagagctgatcccgctggtcaacaaactgcaggacgccttcagctccatcggccagagctgccacctggacctgccgcagatcgctgtagtgggcggccagagcgccggcaagagctcggtgctggagaacttcgtgggccgggacttccttccccgcggttcaggaatcgtcacccggcggcctctcattctgcagctcatcttctcaaaaacagaacatgccgagtttttgcactgcaagtccaaaaagtttacagactttgatgaagtccggcaggagattgaagcagagaccgacagggtcacggggaccaacaaaggcatctccccagtgcccatcaaccttcgagtctactcgccacacgtgttgaacttgaccctcatcgacctcccgggtatcaccaaggtgcctgtgggcgaccagcctccagacatcgagtaccagatcaaggacatgatcctgcagttcatcagccgggagagcagcctcattctggctgtcacgcccgccaacatggacctggccaactccgacgccctcaagctggccaaggaagtcgatccccaaggcctacggaccatcggtgtcatcaccaagcttgacctgatggacgagggcaccgacgccagggacgtcttggagaacaagttgctcccgttgagaagaggctacattggcgtggtgaaccgcagccagaaggatattgagggcaagaaggacatccgtgcagcactggcagctgagaggaagttcttcctctcccacccggcctaccggcacatggccgaccgcatgggcacgccacatctgcagaagacgctgaatcagcaactgaccaaccacatccgggagtcgctgccggccctacgtagcaaactacagagccagctgctgtccctggagaaggaggtggaggagtacaagaactttcggcccgacgaccccacccgcaaaaccaaagccctgctgcagatggtccagcagtttggggtggattttgagaagaggatcgagggctcaggagatcaggtggacactctggagctctccgggggcgcccgaatcaatcgcatcttccacgagcggttcccatttgagctggtgaagatggagtttgacgagaaggacttacgacgggagatcagctatgccattaagaacatccatggagtcaggaccgggcttttcaccccggacttggcattcgaggccattgtgaaaaagcaggtcgtcaagctgaaagagccctgtctgaaatgtgtcgacctggttatccaggagctaatcaatacagttaggcagtgtaccagtaagctcagttcctacccccggttgcgagaggagacagagcgaatcgtcaccacttacatccgggaacgggaggggagaacgaaggaccagattcttctgctgatcgacattgagcagtcctacatcaacacgaaccatgaggacttcatcgggtttgccaatgcccagcagaggagcacgcagctgaacaagaagagagccatccccaatcaggtgatccgcaggggctggctgaccatcaacaacatcagcctgatgaaaggcggctccaaggagtactggtttgtgctgactgccgagtcactgtcctggtacaaggatgaggaggagaaagagaagaagtacatgctgcctctggacaacctcaagatccgtgatgtggagaagggcttcatgtccaacaagcacgtcttcgccatcttcaacacggagcagagaaacgtctacaaggacctgcggcagatcgagctggcctgtgactcccaggaagacgtggacagctggaaggcctcgttcctccgagctggcgtctaccccgagaaggaccaggcagaaaacgaggatggggcccaggagaacaccttctccatggacccccaactggagcggcaggtggagaccattcgcaacctggtggactcatacgtggccatcatcaacaagtccatccgcgacctcatgccaaagaccatcatgcacctcatgatcaacaatacgaaggccttcatccaccacgagctgctggcctacctatactcctcggcagaccagagcagcctcatggaggagtcggctgaccaggcacagcggcgggacgacatgctgcgcatgtaccatgccctcaaggaggcgctcaacatcatcggtgacatcagcaccagcactgtgtccacgcctgtacccccgcctgtcgatgacacctggctccagagcgccagcagccacagccccactccacagcgccgaccggtgtccagcatacacccccctggccggcccccagcagtgaggggccccactccagggccccccctgattcctgttcccgtgggggcagcagcctccttctcggcgcccccaatcccatcccggcctggaccccagagcgtgtttgccaacagtgacctcttcccagccccgcctcagatcccatctcggccagttcggatccccccagggattcccccaggagtgcccagcagaagaccccctgctgcgcccagccggcccaccattatccgcccagccgagccatccctgctcgactaggcctcgaggggggcgtgctctcgggggggcctcacgcacccgcggcgcaggagcttcagtggtctggggccctccgccgcccctatgctgggaccaggctcccagtgggcagccctggcctcttccttaacgctggccccggtccagggccggcccctgtgcctggctggacaccgcactgcgcaaaggggccctggagctccaggcagggggcgctggggtgttgcactttgggggatggagtctcagggtggcagaggggggaccagaacccttgacaccatcctgaatgaggggtccagcctgggggggactctaccaaggtcttcttgggctgggaaagcccatgtagggcaggccttctataagtgcgggcaccaagggcgcctacatccccaggccttgctggggtgcaggggtatatcaacttcccattagcaggagctccccagcggcaagcctggcccagtgggctcggtagtgcccagctggcaggcctgaggtgtacatagtccttcccggccatattaaccacacagcctgagcctggcccagcctcggctgccagaggtgcctttgctaggcccggagccgttggcccgggccggccttgccctattcctctcctcctcctcctcctgggtcccccagggtggctgggcttgggctatgtgggtggtggtggcggggggtcttgggggcctctcagctcccgcccatgcctccctgatgggtgggcccagggcggcctctctctgaggagacctcacccactcctcgctcagtttgaccactgtaagtgcctgcactctgtattctattaataaactaaaataaagggaagacgctgctggtg

SEQ ID NO: 2053 - DNA, 3471 bp, Homo sapiens
cagattacacttggttgactactccggagcagccactaagagggatgaacaggcctgcgtggaaattgaatgagattcttggaagctcgaagtctggctgtggccatgggagatacagtagtggagcctgcccccttgaagccaacttctgagcccacttctggcccaccagggaataatggggggtccctgctaagtgtcatcacggagggggtcggggaactatcagtgattgaccctgaggtggcccagaaggcctgccaggaggtgttggagaaagtcaagcttttgcatggaggcgtggcagtctctagcagaggcaccccactggagttggtcaatggggatggtgtggacagtgagatccgttgcctagatgatccacctgcccagatcagggaggaggaagatgagatgggggccgctgtggcctcaggcacagccaaaggagcaagaagacggcggcagaacaactcagctaaacagtcttggctgctgaggctgtttgagtcaaaactgtttgacatctccatggccatttcatacctgtataactccaaggagcctggagtacaagcctacattggcaaccggctcttctgctttcgcaacgaggacgtggacttctatctgccccagttgcttaacatgtacatccacatggatgaggacgtgggtgatgccattaagccctacatagtccaccgttgccgccagagcattaacttttccctccagtgtgccctgttgcttggggcctattcttcagacatgcacatttccactcaacgacactcccgtgggaccaagctacggaagctgatcctctcagatgagctaaagccagctcacaggaagagggagctgccctccttgagcccggcccctgacacagggctgtctccctccaaaaggactcaccagcgctctaagtcagatgccactgccagcataagtctcagcagcaacctgaaacgaacagccagcaaccctaaagtggagaatgaggatgaggagctctcctccagcaccgagagtattgataattcattcagttcccctgttcgactggctcctgagagagaattcatcaagtccctgatggcgatcggcaagcggctggccacgctccccaccaaagagcagaaaacacagaggctgatctcagagctctccctgctcaaccataagctccctgcccgagtctggctgcccactgctggctttgaccaccacgtggtccgtgtaccccacacacaggctgttgtcctcaactccaaggacaaggctccctacctgatttatgtggaagtccttgaatgtgaaaactttgacaccaccagtgtccctgcccggatccccgagaaccgaattcggagtacgaggtccgtagaaaacttgcccgaatgtggtattacccatgagcagcgagctggcagcttcagcactgtgcccaactatgacaacgatgatgaggcctggtcggtggatgacataggcgagctgcaagtggagctccccgaagtgcataccaacagctgtgacaacatctcccagttctctgtggacagcatcaccagccaggagagcaaggagcctgtgttcattgcagcaggggacatccgccggcgcctttcggaacagctggctcataccccgacagccttcaaacgagacccagaagatccttctgcagttgctctcaaagagccctggcaggagaaagtacggcggatcagagagggctccccctacggccatctccccaattggcggctcctgtcagtcattgtcaagtgtggggatgaccttcggcaagagcttctggcctttcaggtgttgaagcaactgcagtccatttgggaacaggagcgagtgcccctttggatcaagccatacaagattcttgtgatttcggctgatagtggcatgattgaaccagtggtcaatgctgtgtccatccatcaggtgaagaaacagtcacagctctccttgctcgattacttcctacaggagcacggcagttacaccactgaggcattcctcagtgcacagcgcaattttgtgcaaagttgtgctgggtactgcttggtctgctacctgctgcaagtcaaggacagacacaatgggaatatccttttggacgcagaaggccacatcatccacatcgactttggcttcatcctctccagctcaccccgaaatctgggctttgagacgtcagcctttaagctgaccacagagtttgtggatgtgatgggcggcctggatggcgacatgttcaactactataagatgctgatgctgcaagggctgattgccgctcggaaacacatggacaaggtggtgcagatcgtggagatcatgcagcaaggttctcagcttccttgcttccatggctccagcaccattcgaaacctcaaagagaggttccacatgagcatgactgaggagcagctgcagctgctggtggagcagatggtggatggcagtatgcggtctatcaccaccaaactctatgacggcttccagtacctcaccaacggcatcatgtgacacgctcctcagcccaggagtggtggggggtccggggcaccctccctagagggcccttgtctgagaaaccccaaaccaggaaaccccacctacccaaccatccacccaagggaaatggaaggcaagaaacacgaaggatcatgtggtaactgcgagagcttgctgaggggtgggagagccagctgtggggtccagacttgttggggcttccctgcccctcctggtctgtgtcagtattaccaccagactgactccaggactcactgccctccagaaaacagaggtgacaaatgtgagggacactggggcctttcttctccttgtaggggtctctcagaggttctttccacaggccatcctcttattccgttctggggcccaggaagtggggaagagtaggttctcggtacttaggacttgatcctgtggttggccactggccatgctgctgcccagctctacccctcccagggacctacccctcccagggaccgacccctggcccaagctccccttgctggcgggcgctgcgtgggccctgcacttgctgaggttccccatcatgggcaaggaagggaattcccacagccctccagtgtactgagggtactggcctagccatgtggaattccctaccctgactccttccccaaacccagggaaaagagctctcaattttttatttttaatttttgtttgaaataaagtccttagttagccacttgtgtcatttccaggttttctgggggagtgcagggggagatgggtgatgaggtatgaacggatgcctcagtgtccaagatacaaaaggcaccacatagaagtttgctttttccctgcctgtcttggtcactaccacctcttccctgagaagggcgggccttccatgttctctcacccgcttcaactccacat

SEQ ID NO: 2054 - DNA, 1067 bp, Homo sapiens
gcgtctgccaggagctacggccggaagatggcggcggccgcagagttgtcgctactggagaagtccctgggactgagtaaggggaataaatacagtgctcagggcgagcgacagattccagttcttcagacaaacaatggtccaagtctaacaggattgactactatagcagctcatctagtcaagcaagccaacaaagaatatttgctggggagtactgcagaagaaaaagcaatcgttcagcagtggttagaatacagggtcactcaagtagatgggcactccagtaaaaatgacatccacacactgttgaaggatcttaattcatatcttgaagataaagtctaccttacagggtataactttacattagcagatatactattgtactatggacttcatcgctttatagttgacctgacagttcaagaaaaggagaaatatcttaatgtgtctcgctggttttgtcacattcagcattatccaggcatcaggcaacatctgtctagtgttgtcttcatcaagaacagactatatactaattcccactagaagctgtccatgccatacagaagatctattaaaagtgttttaaatggaaaatgtactctagaccacaggactaatgtaaattaatatacagtcattcattatttgttgaagttgatagaatttttgaagtgtaaacttgtgtctgaatgttttatttgttctttagctgaagttttgcaatttttatgtcaaaattcaattgctattaaacaagttgagatccagttataaattaaccttgtttttagtagatgacatttatttcaataaaagttgcaaatcgggcttaatcttaaaattggtggtcatttcaatggttgacatatttggctatttattaacctctctttcatattctaaaattcattttccccttatggatatttatggtagtttgttaagaactgataaattgtgccaaggaagccaaaagggaagacagatggatttgttttaaaatgtttatgtgagctagtaaatgtgggaaaaaaaaaaaaaaaaaaaaaaaaaaaaaa

SEQ ID NO: 2055 - DNA, 3443 bp, Homo sapiens
agtcaggggtcacggcggcgtaggctgtggcgggaaacgctgtttgaagcgggatggatggcaagcggcggccaggcccagggcccggggtgcccccaaagcgggcccgtgggggcctctgggatgatgatgatgcaccttggccatcccaattcgaggaggacctggcactgatggaggagatggaggcagaacacaggctgcaggagcaggaggaggaggagctgcagtcagtcctggagggggttgcagacgggcaggtcccaccatcagccatagatcctcgctggcttcggcccacaccaccagcgctggacccccagacagagcccctcatcttccaacagttggagattgaccattatgtgggcccagcgcagcctgtgcctggggggcccccaccatcccgcggctccgtgcctgtgctccgcgccttcggggtcaccgatgaggggttctctgtctgctgccacatccacggcttcgctccctacttctacaccccagcgccccctggtttcgggcccgagcacatgggtgacctgcaacgggagctgaacttggccatcagccgggacagtcgcggggggagggagctgactgggccggccgtgctggctgtggaactgtgctcccgagagagcatgtttgggtaccacgggcacggcccctccccgttcctgcgcatcaccgtggcgctgccgcgcctcgtggccccggcccgccgtctcctggaacagggcatccgtgtggcaggcctgggcacgcccagcttcgcgccctacgaggccaacgtcgactttgagatccggttcatggtggacacggacatcgtcggctgcaactggctggagctcccagctgggaaatacgccctgaggctgaaggagaaggctacgcagtgccagctggaggcggacgtgctgtggtctgacgtggtcagtcacccaccggaagggccatggcagcgcattgcgcccttgcgcgtgctcagcttcgatatcgagtgcgccggccgcaaaggcatcttccctgagcctgagcgggaccctgtcatccagatctgctcgctgggcctgcgctggggggagccggagcccttcctacgcctggcgctcaccctgcggccctgtgcccccatcctgggtgccaaggtgcagagctacgagaaggaggaggacctgctgcaggcctggtccaccttcatccgtatcatggaccccgacgtgatcaccggttacaacatccagaacttcgaccttccgtacctcatctctcgggcccagaccctcaaggtacaaacattccctttcctgggccgtgtggccggcctttgctccaacatccgggactcttcattccagtccaagcagacgggccggcgggacaccaaggttgtcagcatggtgggccgcgtgcagatggacatgctgcaggtgctgctgcgggagtacaagctccgctcccacacgctcaatgccgtgagcttccacttcctgggcgagcagaaggaggacgtgcagcacagcatcatcaccgacctgcagaatgggaacgaccagacccgccgccgcctggctgtgtactgcctgaaggatgcctacctgccactgcggctgctggagcggctcatggtgctggtgaacgccgtggagatggcgagggtcactggcgtgcccctcagctacctgctcagtcgtggccagcaggtcaaagtcgtatcccagctgttgcggcaggccatgcacgaggggctgctgatgcccgtggtgaagtcagagggcggcgaggactacacgggagccactgtcatcgagcccctcaaagggtactacgacgtccccatcgccaccctggacttctcctcgctgtacccgtccatcatgatggcccacaacctgtgttacaccacgctccttcggcccgggactgcacagaaactgggcctgactgaggatcagttcatcaggacccccaccggggacgagtttgtgaagacctcagtgcggaaggggctgctgccccagatcctggagaacctgctcagtgcccggaagagggccaaggccgagctggccaaggagacagaccccctccggcgccaggtcctggatggacggcagctggcgctgaaggtgagcgccaactccgtatacggcttcactggcgcccaggtgggcaagttgccgtgcctggagatctcacagagcgtcacggggttcggacgtcagatgatcgagaaaaccaagcagctggtggagtctaagtacacagtggagaatggctacagcaccagtgccaaggtggtgtatggtgacactgactccgtcatgtgccgattcggcgtgtcctcggtggctgaggcgatggccctggggcgggaggccgcggactgggtgtcaggtcacttcccgtcgcccatccggctggagtttgagaaggtctacttcccatacctgcttatcagcaagaagcgctacgcgggcctgctcttctcctcccggcccgacgcccacgaccgcatggactgcaagggcctggaggccgtgcgcagggacaactgccccctcgtggccaacctggtcactgcctcactgcgccgcctgctcatcgaccgagaccctgagggcgcggtggctcacgcacaggacgtcatctcggacctgctgtgcaaccgcatcgatatctcccagctggtcatcaccaaggagctgacccgcgcggcctccgactatgccggcaagcaggcccacgtggagctggccgagaggatgaggaagcgggaccccgggagtgcgcccagcctgggcgaccgcgtcccctacgtgatcatcagtgccgccaagggtgtggccgcctacatgaagtcggaggacccgctgttcgtgctggagcacagcctgcccattgacacgcagtactacctggagcagcagctggccaagcccctcctgcgcatcttcgagcccatcctgggcgagggccgtgccgaggctgtgctactgcggggggaccacacgcgctgcaagacggtgctcacgggcaaggtgggcggcctcctggccttcgccaaacgccgcaactgctgcattggctgccgcacagtgctcagccaccagggagccgtgtgtgagttctgccagccccgggagtctgagctgtatcagaaggaggtatcccatctgaatgccctggaggagcgcttctcgcgcctctggacgcagtgccagcgctgccagggcagcctgcacgaggacgtcatctgcaccagccgggactgccccatcttctacatgcgcaagaaggtgcggaaggacctggaagaccaggagcagctcctgcggcgcttcggaccccctggacctgaggcctggtgaccttgcaagcatcccatggggcgggggcgggaccagggagaattaataaagttctggacttttgct

SEQ ID NO: 2056 - DNA, 1710 bp, Homo sapiens
gtcggcgtgtcgagtggctcttcctggctgctgaggcgggttaaggtctgagggtcttgtggggccacggcgctgatcaccaggtgtttggcttggtcggttcttatttctcgcctggcaatggcgacgtacacctgcataacttgccgggtggcgttccgcgacgcggacatgcagcgggcccactataagacggactggcaccgctacaacctgcggcggaaggtggccagcatggccccagtgaccgccgagggcttccaggagcgagtgcgggcgcagcgggccgtcgcggaggaggagagcaagggctcggccacctactgcaccgtttgcagtaagaagtttgcctctttcaacgcctacgagaaccacctcaagtcccggcgtcacgttgagctggagaagaaggccgtgcaggcagtgaatcggaaagtggagatgatgaatgaaaagaacttggagaaaggactgggcgtggacagtgtggacaaggatgccatgaacgcggccatccagcaggccatcaaggcccagccgtccatgtctcccaagaaggcgcccccagcgcctgcaaaggaggccaggaatgtcgtggccgtgggtactggtggccgtgggacccacgaccgagacccgagtgagaaaccaccccggctccagtggtttgaacagcaggcgaagaagttggcaaagcagcaggaggaggacagcgaggaggaggaagaggacctggatggagacgattgggaagatattgattctgatgaagaattggaatgtgaggatactgaagcaatggacgatgtggtggagcaggatgcagaggaggaagaggctgaggaaggcccaccccttggtgccatccctatcacggactgcttattttgttcccatcattccagctcgctgatgaagaatgtggctcacatgaccaaagaccacagtttctttattcctgatatagaatatctttcagatattaagggactgattaaatacttgggagagaaagttggtgttggcaagatttgcttgtggtgcaacgagaaagggaagtccttctactccacagaagctgtacaggcacatatgaatgacaaaagccactgtaagctcttcacagatggcgatgctgctttggaatttgcagacttctatgattttaggagtagctatccagatcacaaggaaggggaggaccccaataaggctgaggagttgccctcagaaaagaacttggaatatgatgatgaaaccatggaattgattctgccttctggtgccagagtgggtcatcgctccttgatgagatactacaaacagcgatttggcttgtcaagagctgtggcagttgccaaaaatcggaaggccgtgggccgagtacttcagcagtacagagccctgggatggactggcagcacaggagcggctcttatgcgagagcgagacatgcagtatgtccaaaggatgaaatcaaaatggatgctgaagacaggaatgaagaacaatgccaccaagcagatgcactttcgggtccaagtgagattctgagagtctgctgggattgagcaatcatctcctgcccaagtttcctccttgccctgaggaccagtgaaagacagatcataggagagacccttttgctgctacttcattcgttctgacctaataataaaagttagaaccataaaaaaaaaaaaaaaaaaa

SEQ ID NO: 2057 - DNA, 2000 bp, Homo sapiens
atcttcttcctgccctcgccgtggcgggcgacggtttctcgcgccgtggctggctcggccggccggggcaccgcgccgggctccatgcagccgggctgcgcggtcccgcagagcgggcgcctccggggctcgagtcggggacccggcaggagcgggccggggatggcggcggcgggcggcgggtcggccgtggagccccggagaggcggccgccaccaccgctgcccgcagtctgcgaggtgtccggcggtccgctcagggcctcttttgcagactcggtgcccggagtgcgccggcgccgcccgccaggtcttggcactgctggcgcggccgcggcggcgggggcccggctccagatcaccgacccccacgagcgccggccctgcctgcccgctattttggttccatctcttctgcatatttatgcttgcctgttacattccctggcctctgagtgtcctttggcagtttccaaagcatttgggcaagaaggagcttgggcagcttcacaacaggtggggacgcgcaggggaggggccgcggccggaccggcagagtttcaagggctggcgcgccggcggactttccacactgtctttcgggactggggttaggagacagcccttggccaccactgtgtccttactttgtcgctttacttggggctggacctcccctttccagctctggcgtgtgaccccgcaacgagcgtggtgtcgagaccaccaccagctggggcggtgggagcgaaggtgccccaggctcggggaaggtggaaaccttttccccgctccccaagtgattgttgcgcgctccggtgaggggacagtggtacctcgatttcccgtgtgccagcttcgggactcagctgtgcttttgtgtctctttgattagcaaaagcaaaacgaattcctccccgaacactaagcttcctggaaacttccctagacctaaacttgagaaccgcatataaatgggccttgagggttctgtcgtcagtagcgggttacgtgattgcaaacgagcaagtttaaaacggagtgggctttgggctgcagagccgcctggcattctgacagctgagcaggaggcagaggtgagagtccaagatggactaaaaatgtcccagcagctgggagcccaacctcggcccaacctcgttgaaaggaggaacattcggtgcagccgtcggaaccttattatttatgaaaggggacagctcacaggattacatttttctaagccaatcctgtgaccatcctccatgaaattctctattttggttgcatgtggtcaaaactgagcctcactgaaacaattgaaaacaaatactcccgacaaatcttaagaatcgttttgaaaatcaaaaggtggggaaaatgttgtggcttctgagctttcttcagcccatattctattattctctgatgttttatggtgtaaaatcatacccattccattatgtattgattgtcaagaaggaagtaggcttttattgctatttttatgtcagtttccatttactgtctcaccacatttattgggttattgcctttgcctttgactcaacaggagctggaagggtaggaatcccaaattctgttgcctaaggcagccagttgtcagaatggactttcctcattttctattatgaggcctgaggaaagacattcagttccaaaggctgtgcctatccttttaaatagaagagagagggcccggcacggtggctcacgcctgtaatcccagcactttgggaggccgaagggggcgaatcacgaggtcaggagttccagaccagcctggccaacatagtgaaaccccgtgtctactaaagatacaaatattagccgggcgtaatggcgggcgcctgtattcccagctactcgggaggctgaggcaggagaatggcttgaatccgggaggcggaggttgcagtgaaccgaaccgagatcgcgtcgctggactccagcccgggcgacagagtgagactccgtccc

SEQ ID NO: 2058 - DNA, 1673 bp, Homo sapiens
gcctggtgtggggacgctcaggtgccggcgtggggccccctcggaggctgtgaatcttttggacccccgaatgtaaatgggagatgagagtacccagagaaggagaagccagcaaaggagacgacacagacaagacctcagagatcaaaggaagaggccccttaatatcctggaataatgggacccatccccgtaatcagtgaatctcatccacccgcttgccagcttctacccgcagcaagtagaagctaagtcctggctcaaatctcttccctccctccctctcccagctgtcagtgcttttggacttgtgctcaggtgaagtagtatttgaagcttttcatcagttggctcattctttactcaagaataaacctcaagaaacgtcatcagggtcagaatgacaacggcaacacgacaagaagtccttggcctctaccgcagcattttcaggcttgcgaggaaatggcaggcgacatcagggcagatggaagacaccatcaaagaaaaacagtacatactaaatgaagccagaacgctgttccggaaaaacaaaaatctcacggacacagacctaattaaacagtgtatagatgaatgcacagccaggattgaaattggactgcattacaagattccttacccaaggccaattcatctgcctccaatgggccttaccccactccgaggccggggacttcgaagccaagagaaactgaggaaactttccaaaccagtatatctcagatctcatgatgaagtttcctaatctagaggaaagtttatttctgcaaatgatgagccaactagttattgaatgtaaaccagatggcaaaacacttcttgattaggggcaaaaattcaaatgtcttcttaaaacctccacaattgattctccccctgtgatgtaaacttagatatccctagagtttctcagcatctttcttcctgagtggatggcattatccctagaggtcatggaccttacatcctcactgcagtcacctttggaaacaagaccgaggcctgtagaaggaaagcggaaggatgtaagagctgttcatgggaattccattcaccacacatgccagctgatgcaaagaaatttgccagtcactggaagttactgtggctactataaaactatgtaccactctcagaatattcttaggcttttttttttttcaagttatagatttgcttaaagtgaggttttttggtgtgtgcttttttgttgtcttttgacccttccagtttccagacaaacttgtcttaaaaagtgcatcattggattgaccatggtttttcatgaaattttatgagatttctgccttaacaaaatgcatatattccttatcttaaagcctgtcattacttaggatgcacttataggatctgaaaagctcactttaaactcatactacattcgttacgagtattttacgttaacataattgaaaagtacaaggtccaagctggctttcaaattatgtctaaacagaaatgggacaaatagacttgaaaatagaagggatttattccacccctgcaagggtagagtcaggtgagagtcccttggtgagtcatttgtacatcagtgtcatttcttcttaacctctgaagaagatgggcatcagaaataaagacaaagcactatcaaaaaaaaaaaaaaa

SEQ ID NO: 2059 - DNA, 10013 bp, Homo sapiens
atcgaaactgagagctcctgggcaggctcggcagggcaggcagctccaggagggcttcgaaccgtggccaacagttccagtggactgcgtggacccgtgagctcaggagcctcagacgcctccctggagagccaagctggtgttcgaggtggcgcctccagggtccaccctgctgcccaacagccccgcggccaccagagggccgtccctggcccggctgtgtgccctggtggacctgtgtctgggctgctcccgctgcacccagcggctcaatgaaagcacctacgtcctccgtagggtggagcatgactgctcccgcgagatcctgctggcccgctttaagcaggccaccaagagcaaggtctggcgcgtggtgggctgccggcccaccttcccaaggcccctgtgctaccaagtctgccactactacagccctgggctcggctgccggcgccaccgaaaccggtgcacctttgcccgcagtcgcgaggaggccctggtctggaccttcgagcgtcagcacaacctccagcgcctatggctgaaggcggaggtgcagggcagcggggcccagggaggggcaggccgggcggccgacgccatccttacggagtttggcggccgcttcgagctgctttgctccctctgcttcaggcgctgtcccccatgcatctgtcgcgtggacccccaggggcagtgccctgagcacggagcctgcccctccctcctggcccacgtgagcgccgagggccgccgcaagcaacagtttgtggtggtgaggccgcggccccgggccggccagcctcctgcctactgcaggtttgtggggcgtgggcagccgtgctggcgtggggagtcccgctgccagtttgcacacagcgccgtggagatggctgtgtgggaggccgagcagctgggtggcctccagcggggggacctgctcacaccccctgcccctgatggcgacgggcgcacggccccccttggccagccccctggggcccagctgtactgcccggcctgcttggtcacctgccactctcaggaggccttcgagaaccactgcgcatcctcggagcacgcacagatggtggccttcgaccaggccctgccctgggagcaccgttccccacccccgggactctccaagttcgagctctgcccaaagcctgacctctgtgagtatggggacgcctgcaccaaggcacactcagcacaggagctgcaggagtgggtccggcgcacgcaggctgtggagctgcgggggcaggcggcctggcaggacgggctggtgccctaccaggagcggctgctggccgagtaccagcgcagcagcagtgaggtccttgtgctggcagagacccttgatggagtgcgtgtcacctgcaaccagcccctgatgtaccaggcccaggagaggaagacccagtacagctggacgtttgccgtccactctgaggagcccctgctacacgcggccctgctgaagcaggagccaggagccgacttctctctggtggctcccggcctcccgccaggccggctctacgcacggggtgagcgcttccgtgtgcccagctccactgccgacttccaggtgggagtgcgtgtgcaggccgcctcgttcggcacctttgagcaatgggtggtcttcgactttggccgccggccggtgctgctacaaaagctggggctgcagctgggccaggggcgtcgcccaggaccctgcaggaatctggcgctcggccaccctgaggagatggagcgctggcacactggcaaccgccacgtggtgcctggcgtggagcggacggccgagcagacggccctgatggccaagtacaagggccctgccctggccctggagtccaaccacagcagcgtggcctcgggccccatctcgccaaccaactatcggcagaggatgcaccagtttctctatgaggaggaggcggctcagcagcagctggtggccaagctgaccctgcggggccaggtgttcctgaagacggcattgcagacgccagcgctgaacatgctcttcgcgcctccgggagcactgtacgcagaggtccccgtcccctcctccctgatgccagacacagaccagggcttcctgctgggccgggcggtcagcacagccctggtggcccctgtacctgcacccgacaatacggtgttcgaggtgcggctggagaggcgggccagctcagagcaggcgctgtggctgctgcttccggcccgctgctgcttggccctggggctgcagcctgaggcccgcctggtcctggaggtgcagttccagattgacccgatgaccttccgcctctggcaccaggcagtggacacactgcctgaggagcagctggtggtgcccgacttgcccacctgcgccctgcccagaccttggtctgtcccacccttgcggcgtggcaaccgcaagcaggagctggccgtggcgctcatcgcgggctggggccctggggatgggaggcgtgtccccccgctactcatctatggcccctttggcaccggcaagacctacacgctggccatggcctccctggaggtcatccggaggcctgaaaccaaggtgctcatctgcacacacaccaacagtgccgccgacatctacatccgggagtatttccacagccacgtcagcggcggccaccccgaggccactcctctccgtgtgatgtacacggaccggccgctgagccagacggacccagtcacgctgcagtactgttgcctgaccgacgaccgccaggctttccgcccgcccacacgggcagagctggcgcggcaccgcgtggtggtcaccaccacctcccaggcccgtgagctcagggtgccggtcggcttcttctcccacattctcatcgatgaggcggcccagatgctggagtgcgaggccctcaccccgctggcctacgcctcgcacggcacccgcctcgtgctggcgggcgaccacatgcaggtcacaccccggctgttcagtgtggccagggcccgggcggccgagcacacgctgctgcaccgcctcttcctgtgctaccagcaggagactcacgaggtggcgcggcagagccgcctggtcttccacgagaactaccgctgcacggacgccattgtcagcttcatctcgcggcacttctacgtggccaagggcaaccccatccacgccaggggcaaggttccgccccacccccggcactacccgctcatgttctgccacgtggcgggcaacccagaccgggacatgtccatggcgtcctggctgaatctggctgagattgcgcaggtcgtcgagaaggtgcaggaggcctacaacacctggcccagctgctggggcggccgtgagcagaggtgcatctgtgtcgtttcccacggtgcccaggtcagtgcactgaggcaggagctgaggaggcgggacctaggccaggtgtctgtcggcagttttgagatcctgccagggcggcagttccgggtcgtggtgctcagcactgtgcacacctgccagagcctgctcagccctggggcactggcccctgagttcttcaccgacgcccgcgtgctcaacaccgtcctgacccgcgcccagtcccagctggtggtagtgggggacgccgtggccctctgctccttcggggcctgcggcaagctctgggagagcttcatccgtgagtgcgtggagcggcacagtgtctgccccgagggcctgtccatggagcaggtcgagcagggtgtggcgcagagacggcgctggcctccccgaggcacacaggctggggcagcggggaactgggaggctgccccagagccagtaggggacctggccgaggagcaggcggctgtggtgacggccatggtgaaggcagagccgggagatgaggctctgagcccagcatcccgtgacatcacggcaaccacagcgcagacggaggctgcggcagcaccagcaggagacgcagtgaaggaagacgtggtgcccggggcctgtgcggcaggagcggctgctgcagcgggcgtggagtccacggaggctgaggatgcagaggctgacttctggccgtgggacggggagctcaacgctgacgacgccatcctacgggagcttctggacgagagccagaaggtgatggtgaccgtcggggaggacgggctgctggacaccgtcgccaggcccgagtccctgcagcaggcccggctgtacgagaacctgcccccggctgcgctacggaagctgctgcgcgcggagcccgagcggtaccgccactgctctttcgtgccagagaccttcgagcgggcgtcagccatcccgctggacgatgcctcctcgggccccatccaggtcaggggccgcctggactgtgggatggccttcgccggggatgaggtgctggtgcagctcctttcgggagacaaggcgcccgaggggcggcttcggggccgcgtgctgggcgtgctgaagaggaagaggcacgagctggcgtttgtgtgccgcatggacacgtgggacccgcgcatcatggtccccatcaatggctccgtgaccaagatcttcgtggccgagctgaaggacccatcgcaggtccccatctacagcctccggaagggccggctgcagcgtgtggggcttgagaggctcaccgccgaggcccggcacagccggctcttctgggtccaaattgtcctgtggcggcaaggcttctactacccgctgggcatcgtccgggaggtgctgcctgaggccagcacctgggagcagggcctccgcatcctcggcctggagtacagcttgagggtgcccccgtcggaccaggccaccatcaccaaggtgctgcagaaataccacacggagcttggccgggttgccggccgccgagaggactgccgcgccttcttgaccttcactgtggacccccagggcgcctgcaacctcgatgatgccctcagtgtccgagacctgggtcccaggtgcgaggtggctgtgcacatcactgatgtggccagcttcgtgcccagggacggggtgctggacgtggaggcgcgaaggcagggcgctgcgttctatgcccccggcagggagccagtgcccatgctgccggccagcctctgccaggacgtcctcagcctcctgcctggccgggaccgcctggccatctccctgttcctcaccatggagaaggccagtggccagctgaagagcctgcgctttgcaccctccgtggtccagtctgaccgccagctgtcctacgaggaggcggaggaggtgatcaggcagcacccgggtgccggccgtgagctgccggcccgcctggactccgtggacgcctgcgtcgtggccgcgtgctacttctctcggctgctgcgccggcaccgcctgcggtccgactgcttctatgagcagccggacgaggacggcaccctgggcttccgcgcggcccacatcatggtgaaggagtacatgattcagtttaataggctcgtggctgagttcctggtgggcagcgagtgcacgcggacggtcacgcctctgcggtggcagccagcaccccgcagccagcagctcaaggccctgtgtgagaagcatggggaccgggtgcccctgtcactgcacctcggccaccacctgcacggcggcgggggcagtccccccgacacgcggctgcacctcctggcctccctctggaagcaggtccagtttgctgcccgcacccaggactacgaacagatggtggacttggtcaccacggacgacatgcacccattcctggctcctgcaggccgcgacctccgcaaggccctggagcgctcggcgttcggccgctgcgcccggggccaccagcagcagggcggccactactcgctgcaggtggactggtacacgtgggccacctcgcccatccgcaggtacctggacgtggtgttgcagcggcagatcctgctggcgctgggccatgggggctctgcctactctgccagggacatcgatgggctctgccaggccttcagcctccagcacgcacttgcccagagctatcagcggcgggcgcgcagcctgcacctggccgtgcagctcaaggcccagcctctggacaagctgggcttcgtggtggacgtggaggcgggctcccgctgcttccggctgctcttccccagcaaccgggagacgctgcctgacccctgccccgtcccctacggctccctgcagctggccgagcacccccacgccctggcaggccggccgggcctgcggctcctgtggcggcgccgtgtctactcagcgcagggatccagcccgcccctgccactgcctggcactgtgccggacccacacaccctggccgtggagacggccctgtggaagcagctgctggagctggtggagctgcagcgctggccggaggcggctgctctcatccaggagaagggcgaggcgtcccagcggcgggagctggtgcaggtgcagcggagccactgtggccatttcctggaggtggcccgggagctgggcagtggggacaccctgcaggtgcagctcggcaccagcctgcagcacggcttcctggtaccgagccctcagctctggacggtggcaccgggcttcagcctctgcctggagcacgtggagcggcccggagactgcttctcaggccgtgtgtaccgggccccgagggaccggtaccgcgacgtggatgagtacgcctgcgtgtgggaaccattctgcgccctggagtcggccaccggcgcggttgccgagaatgactccgtcacacttcagcacctgagtgtctcctgggaggcgtcacggacgccgcaggggcagctgcagggcgccttccgcctggaggccgccttcctcgaggagaactgtgccgacatcaacttcagctgctgctacctctgcatccggctcgaggggctgccggctcccacggccagcccacgccctgggcccagcagcctcggccctggcctgaatgttgaccccggcacgtatacctgggtggcccacgggcagacgcaggactgggaccaggagcgccgggcagaccggcaggaggctcccagacgggtgcacctcttcgtccaccacatgggcatggagaaggttccggaagaggtgctgaggccgggcaccctgttcaccgttgagctgctgcccaagcagcttcctgatctccgcaaggaggaagccgtgcgtggactagaggaggcgtccccgctggtcaccagcatcgcactgggccggcctgtcccgcagcccctctgcagagtgatccccagcaggttcctggagcggcagacctacaacatccccggaggccgccacaagctgaaccccagccagaacgtggcggtcagggaggctctggagaagcctttcacggtcattcagggcccaccaggtacagggaagacgatcgtgggcctccacatcgtattctggtttcataaatcaaaccaggagcaggtgcagcccggaggccccccccgtggggagaagcggctggggggtccctgcatcttgtactgcggcccctccaacaagtcggtggatgtcctggcaggactgctcctgagaaggatggagctgaagcccctccgtgtgtacagtgagcaggctgaggccagcgagttcccagtgccgcgtgtgggcagcaggaagctgctcaggaagagcccccgggaggggaggccgaaccagagcctcaggagcatcaccctgcaccaccggatccggcaggcccccaacccttactcgtcggaaatcaaggcctttgacacccggctgcagagaggggagctcttctccagggaggacctggtctggtacaagaaggtcttgtgggaggctcggaagttcgagctggaccggcatgaggtcatcctctgcacctgctcctgtgcagcctctgccagcctcaaaatcctggacgtgaggcagatccttgttgacgaggcaggcatggccacggaacctgaaaccctcatccccctggtgcagttcccacaggccgagaaggtggttcttctcggagaccacaagcagctgcggcctgtggtcaagaatgagcggctgcaaaacctgggtctggaccggtctctgttcgagcggtaccacgaggacgcacatatgctggacactcagtaccgcatgcatgagggcatctgtgccttcccctctgtggcgttctacaagagcaagctgaagacgtggcagggcctgaggaggccgcccagtgtcctgggccacgctggcaaggagagctgccctgtcatctttggccacgtgcagggccacgagcggagcctgctggtgtccacggacgaagggaatgagaactccaaggccaacctggaggaggtggctgaggtggtccgtatcaccaagcagctgaccctggggaggaccgtagagccccaggacatcgccgtcctcacgccctacaacgcgcaggcctctgagatcagcaaggcccttcggcgagagggcatcgccggggtggccgtgtcctccatcaccaagagccaggggagcgagtggcgctatgtgctggtgagcaccgtccgcacctgtgccaagagcgacctggaccagcggcccaccaagagctggctcaagaagtttctgggcttcgttgtggaccccaaccaagtgaatgtggctgtcacgcgggcccaggaggggctctgcctgatcggagaccacctccttctgcgctgctgccccctctggcgtagcctcctggacttctgcgaggctcagcagaccctcgtgcctgccggccaggtgcgcgtctgcaggaggccaactatgccttcctgaagagccctctccacctgcaaggtgccaggactgggagggaaagtccagggcccccccaccctccccaccaccctccgccatcagcctgcctgggccagcctgcctcctggcctcaggatctccctggggcaggaagtgggtggacttggaggaggaacggcaagggccggtccccacactcttgctcctcctgggcatctggggacaggaacacctctcagggtggccaagaggggcttccttgggaccagtgcaaggaagttctgctgtccctgggaagtctcagaaccaggaaggaaaccctgtggaggctgccctttgacctttggacgccacctgtaatcactctggatggtgtctgtggagttcaggtttattttctatttaaatgaactaaaagccagcatcctgccgggcgtggtggctcacgcccataatccagcactttgggaagccgaggcgggcagatcacctgaggtcaggagttcgagaccatcctggccaacatggtgaaaccccgtctccactaaaaatacaaaattagctgggcgtggtggcgggcgcctgtaatcccagctacttgggaggctgaggcaggagaatcgcttgactccaggaggcgcaggctgcagtgagctctgatggtaccactgcactccagcctgggtgacagagcgagaccctgtcttaaaaaaaaaaacaaaacaaaaccagcatctgttactggaacagagacctcagcccaagctcaggacaaggaggcctccctgggagagggggcctttctcccaccatcaccgcctgtgtccttcaggggctgctggagggcagcccaaagccaggggcccaccccgccccaccccaccccaccccaccctctgaaatgtgaaaagcctgcactcttcctgtgggctgcgcagtgggctcgggggttggggggtgccggggcgatgcttccaccctggactgagtgttcggggcagcctgctcggctgtatgtttctcgcacgctcacccgcttcagtgcggctctgtccctgctgccgcctccagtcctgagggaggggcttgccccaccttctacattccaatttttatatctttgaattatgtgattagatattaatttaatgataaaaccactctgaaagctcttctcaaaaaaaaaaaaaaa

SEQ ID NO: 2060 - DNA, 7507 bp, Homo sapiens
tgctcacttctgacagccagacaagggctgtgctcaggggcagctcggctgggcacacagtaggtgctttagcggacagcactgaggcccccagcaagaagcccatgagctcctccccctcccgcagtgccgccgacatctacatccgggagtatttccacagccacgtcagcggcggccaccccgaggccactcctctccgtgtgatgtacacggaccggccgctgagccagacggacccagtcacgctgcagtactgttgcctgaccgacgaccgccaggctttccgcccgcccacacgggcagagctggcgcggcaccgcgtggtggtcaccaccacctcccaggcccgtgagctcagggtgccggtcggcttcttctcccacattctcatcgatgaggcggcccagatgctggagtgcgaggccctcaccccgctggcctacgcctcgcacggcacccgcctcgtgctggcgggcgaccacatgcaggtcacaccccggctgttcagtgtggccagggcccgggcggccgagcacacgctgctgcaccgcctcttcctgtgctaccagcaggagactcacgaggtggcgcggcagagccgcctggtcttccacgagaactaccgctgcacggacgccattgtcagcttcatctcgcggcacttctacgtggccaagggcaaccccatccacgccaggggcaaggttccgccccacccccggcactacccgctcatgttctgccacgtggcgggcaacccagaccgggacatgtccatggcgtcctggctgaatctggctgagattgcgcaggtcgtcgagaaggtgcaggaggcctacaacacctggcccagctgctggggcggccgcgagcagaggtgcatctgtgtcgtttcccacggtgcccaggtcagtgcactgaggcaggagctgaggaggcgggacctaggccaggtgtctgtcggcagttttgagatcctgccagggcggcagttccgggtcgtggtgctcagcactgtgcacacctgccagagcctgctcagccctggggcactggcccctgagttcttcaccgacgcccgcgtgctcaacaccgtcctgacccgcgcccagtcccagctggtggtagtgggggacgccgtggccctctgctccttcggggcctgcggcaagctctgggagagcttcatccgtgagtgcgtggagcggcacagtgtctgccccgagggcctgtccatggagcaggtcgagcagggtgtggcgcagagacggcgctggcctccccgaggcacacaggctggggcagcggggaactgggaggctgccccagagccagtaggggacctggccgaggagcaggcggctgtggtgacggccatggtgaaggcagagccgggagatgaggctctgagcccagcatcccgtgacatcacggcaaccacagcgcagacggaggctgcggcagcaccagcaggagacgcagtgaaggaagacgtggtgcccggggcctgtgcggcaggagcggctgctgcagcgggcgtggagtccacggaggctgaggatgcagaggctgacttctggccgtgggacggggagctcaacgctgacgacgccatcctacgggagcttctggacgagagccagaaggtgatggtgaccgtcggggaggacgggctgctggacactgtcgccaggcccgagtccctgcagcaggcccggctgtacgagaacctgcccccggctgcgctacggaagctgctgcacgcggagcccgagcggtaccgccactgctctttcgtgccagagaccttcgagcgggcgtcagccatcccgctggacgatgcctcctcgggccccatccaggtcaggggccgcctggactgtgggatggccttcgccggggatgaggtgctggtgcagctcctttcgggagacaaggcgcccgaggggcggcttcggggccgcgtgctgggcgtgctgaagaggaagaggcacgagctggcgtttgtgtgccgcatggacacgtgggacccgcgcatcatggtccccatcaatggctccgtgaccaagatcttcgtggccgagctgaaggacccatcgcaggtccccatctacagcctccggaagggccggctgcagcgtgtggggcttgagaggctcaccgccgaggcccggcacagccggctcttctgggtccaaattgtcctgtggcggcaaggcttctactacccgctgggcatcgtccgggaggtgctgcctgaggccagcacctgggagcagggcctccgcatcctcggcctggagtacagcttgagggtgcccccgtcggaccaggccaccatcaccaaggtgctgcagaaataccacacggagcttggccgggttgccggccgccgagaggactgccgcgccttcttgaccttcactgtggacccccagggcgcctgcaacctcgatgatgccctcagtgtccgagacctgggtcccaggtgcgaggtggctgtgcacatcactgatgtggccagcttcgtgcccagggacggggtgctggacgtggaggcgcgaaggcagggcgctgcgttctatgcccccggcagggagccagtgcccatgctgccggccagcctctgccaggacgtcctcagcctcctgcctggccgggaccgcctggccatctccctgttcctcaccatggagaaggccagtggccagctgaagagcctgcgctttgcaccctccgtggtccagtctgaccgccagctgtcctacgaggaggcggaggaggtgatcaggcagcacccgggtgccggccgtgagctgccggcccgcctggactccgtggacgcctgcgtcgtggccgcgtgctacttctctcggctgctgcgccggcaccgcctgcggtccgactgcttctatgagcagccggacgaggacggcaccctgggcttccgcgcggcccacatcatggtgaaggagtacatgattcagtttaataggctcgtggctgagttcctggtgggcagcgagtgcacgcggacggtcacgcctctgcggtggcagccagcaccccgcagccagcagctcaaggccctgtgtgagaagcatggggaccgggtgcccctgtcactgcacctcggccaccacctgcacggcggcgggggcagtccccccgacacgcggctgcacctcctggcctccctctggaagcaggtccagtttgctgcccgcacccaggactacgaacagatggtggacttggtcaccacggacgacatgcacccattcctggctcctgcaggccgcgacctccgcaaggccctggagcgctcggcgttcggccgctgcgcccggggccaccagcagcagggcggccactactcgctgcaggtggactggtacacgtgggccacctcgcccatccgcaggtacctggacgtggtgttgcagcggcagatcctgctggcgctgggccatgggggctctgcctactctgccagggacatcgatgggctctgccaggccttcagcctccagcacgcacttgcccagagctatcagcggcgggcgcgcagcctgcacctggccgtgcagctcaaggcccagcctctggacaagctgggcttcgtggtggacgtggaggcgggctcccgctgcttccggctgctcttccccagcaaccgggagacgctgcctgacccctgccccgtcccctacggctccctgcagctggccgagcacccccacgccctggcaggccggccgggcctgcggctcctgtggcggcgccgtgtctactcagcgcagggatccagcccgcccctgccactgcctggcactgtgccggacccacacaccctggccgtggagacggccctgtggaagcagctgctggagctggtggagctgcagcgctggccggaggcggctgctctcatccaggagaagggcgaggcgtcccagcggcgggagctggtgcaggtgcagcggagccactgtggccatttcctggaggtggcccgggagctgggcagtggggacaccctgcaggtgcagctcggcaccagcctgcagcacggcttcctggtaccgagccctcagctctggacggtggcaccgggcttcagcctctgcctggagcacgtggagcggcccggagactgcttctcaggccgtgtgtaccgggccccgagggaccggtaccgcgacgtggatgagtacgcctgcgtgtgggaaccattctgcgccctggagtcggccaccggcgcggttgccgagaatgactccgtcacacttcagcacctgagtgtctcctgggaggcgtcacggacgccgcaggggcagctgcagggcgccttccgcctggaggccgccttcctcgaggagaactgtgccgacatcaacttcagctgctgctacctctgcatccggctcgaggggctgccggctcccacggccagcccacgccctgggcccagcagcctcggccctggcctgaatgttgaccccggcacgtatacctgggtggcccacgggcagacgcaggactgggaccaggagcgccgggcagaccggcaggaggctcccagacgggtgcacctcttcgtccaccacatgggcatggagaaggttccggaagaggtgctgaggccgggcaccctgttcaccgttgagctgctgcccaagcagcttcctgatctccgcaaggaggaagccgtgcgtggactagaggaggcgtccccgctggtcaccagcatcgcactgggccggcctgtcccgcagcccctctgcagagtgatccccagcaggttcctggagcggcagacctacaacatccccggaggccgccacaagctgaaccccagccagaacgtggcggtcagggaggctctggagaagcctttcacggtcattcagggcccaccaggtacagggaagacgatcgtgggcctccacatcgtattctggtttcataaatcaaaccaggagcaggtgcagcccggaggccccccccgtggggagaagcggctggggggtccctgcatcttgtactgcggcccctccaacaagtcggtggatgtcctggcaggactgctcctgagaaggatggagctgaagcccctccgtgtgtacagtgagcaggctgaggccagcgagttcccagtgccgcgtgtgggcagcaggaagctgctcaggaagagcccccgggaggggaggccgaaccagagcctcaggagcatcaccctgcaccaccggatccggcaggcccccaacccttactcgtcggaaatcaaggcctttgacacccggctgcagagaggggagctcttctccagggaggacctggtctggtacaagaaggtcttgtgggaggctcggaagttcgagctggaccggcatgaggtcatcctctgcacctgctcctgtgcagcctctgccagcctcaaaatcctggacgtgaggcagatccttgttgacgaggcaggcatggccacggaacctgaaaccctcatccccctggtgcagttcccacaggccgagaaggtggttcttctcggagaccacaagcagctgcggcctgtggtcaagaatgagcggctgcaaaacctgggtctggaccggtctctgttcgagcggtaccacgaggacgcacatatgctggacactcagtaccgcatgcatgagggcatctgtgccttcccctctgtggcgttctacaagagcaagctgaagacgtggcagggcctgaggaggccgcccagtgtcctgggccacgctggcaaggagagctgccctgtcatctttggccacgtgcagggccacgagcggagcctgctggtgtccacggacgaagggaatgagaactccaaggccaacctggaggaggtggctgaggtggtccgtatcaccaagcagctgaccctggggaggaccgtagagccccaggacatcgccgtcctcacgccctacaacgcgcaggcctctgagatcagcaaggcccttcggcgagagggcatcgccggggtggccgtgtcctccatcaccaagagccaggggagcgagtggcgctatgtgctggtgagcaccgtccgcacctgtgccaagagcgacctggaccagcggcccaccaagagctggctcaagaagtttctgggcttcgttgtggaccccaaccaagtgaatgtggctgtcacgcgggcccaggaggggctctgcctgatcggagaccacctccttctgcgctgctgccccctctggcgtagcctcctggacttctgcgaggctcagcagaccctcgtgcctgccggccaggtgcgcgtctgcaggaggccaactatgccttcctgaagagccctctccacctgcaaggtgccaggactgggagggaaagtccagggcccccccaccctccccaccaccctccgccatcagcctgcctgggccagcctgcctcctggcctcaggatctccctggggcaggaagtgggtggacttggaggaggaacggcaagggccggtccccacactcttgctcctcctgggcatctggggacaggaacacctctcagggtggccaagaggggcttccttgggaccagtgcaaggaagttctgctgtccctgggaagtctcagaaccaggaaggaaaccctgtggaggctgccctttgacctttggacgccacctgtaatcactctggatggtgtctgtggagttcaggtttattttctatttaaatgaactaaaagccagcatcctgccgggcgtggtggctcacgcccataatccagcactttgggaagccgaggcgggcagatcacctgaggtcaggagttcgagaccatcctggccaacatggtgaaaccccgtctccactaaaaatacaaaattagctgggcgtggtggcgggcgcctgtaatcccagctacttgggaggctgaggcaggagaatcgcttgactccaggaggcgcaggctgcagtgagctctgatggtaccactgcactccagcctgggtgacagagcgagaccctgtcttaaaaaaaaaaacaaaacaaaaccagcatctgttactggaacagagacctcagcccaagctcaggacaaggaggcctccctgggagagggggcctttctcccaccatcaccgcctgtgtccttcaggggctgctggagggcagcccaaagccaggggcccaccccgccccaccccaccccaccccaccctctgaaatgtgaaaagcctgcactcttcctgtgggctgcgcagtgggctcgggggttggggggtgccggggcgatgcttccaccctggactgagtgttcggggcagcctgctcggctgtatgtttctcgcacgctcacccgcttcagtgcggctctgtccctgctgccgcctccagtcctgagggaggggcttgccccaccttctacattccaatttttatatctttgaattatgtgattagatattaatttaatgataaaaccactctgaaagctcttctca

SEQ ID NO: 2061 - DNA, 777 bp, Homo sapiens
catgctgttctgacagtttgagattacttattgtcttttctgggaagacaaaaacatgtcggagactgctccacttgctcctaccattcctgcacccgcagaaaaaacacctgtgaagaaaaaggcgaagaaggcaggcgcaactgctgggaaacgcaaagcatccggacccccagtatctgagcttatcaccaaggcagtggcagcttctaaggagcgcagcggcgtttctctggccgcgcttaagaaagcgcttgcggctgctggctacgatgtagaaaaaaacaacagccgtatcaagcttggcctcaagagcttggtgagcaaaggtactctggtgcagaccaaaggtaccggtgcttctggctccttcaaactcaacaagaaagcggcttccggggaaggcaaacccaaggccaaaaaggctggcgcagccaagcctaggaagcctgctggggcagccaagaagcccaagaaggtggctggcgccgctaccccgaagaaaagcatcaaaaagactcctaagaaggtaaagaagccagcaaccgctgctgggaccaagaaagtggccaagagtgcgaaaaaggtgaaaacacctcagccaaaaaaagctgccaagagtccagctaaggccaaagcccctaagcccaaggcggccaagcctaagtcggggaagccgaaggttacaaaggcaaagaaggcagctccgaagaaaaagtgaaactggcgggacgttcccctttgaaaattttaaacggctcttttcagagccaccca

SEQ ID NO: 2062 - DNA, 2898 bp, Homo sapiens
agcaacatgcccgcagagaattcttccggaggcggtcacagacatctccgtgacgcagaacgagttagagcgtcccttggggtttccatggtgctgcccttagcctgcagtatctccacttcctctcccgcctgagcgccgggaacggaaaagcaggcggccggtcccagctgcgacgtagacgccgcgtgggggtggggttgggcgagtaggtgacgctctaggcgagctcgttggcctctctatggtgccgagcgcgcccgttcggacgttgcccctttaatcggcagagggcggtgcccaggaggtcccgcgagagctgcggggggcgggggggcggtgccgaggctgggggccggtggcggatggagcccgcgatggagccggagactctggaggcgcgaatcaatagagccacgaaccccctgaacaaggagctcgactgggccagcatcaacggcttctgcgagcagctcaacgaggactttgaggggcctccactcgccacccggctgctggcccacaagatccagtccccacaggagtgggaggcgatccaggccttgacggtgctggaaacatgcatgaagagctgcggcaagcggttccacgacgaagtgggcaagttccgctttctcaacgagctcatcaaggtcgtgtctcccaagtatctgggctctcggacatcggagaaggtgaagaacaagatcttggagctcctctacagctggacagtgggcctgcccgaggaggtgaaaatcgcagaggcctaccagatgctaaagaagcaggggattgtaaagtccgaccccaagcttccagatgacactacctttccccttcctcctccacggccgaagaatgtgatctttgaagatgaggagaaatccaagatgctggcccgcctgctgaagagctcccatcccgaagacctccgcgcagccaataagctcatcaaagagatggtgcaggaggaccagaagcggatggagaagatctcgaagagggtgaatgccatcgaggaggtgaacaacaatgtgaaactgctcacggagatggtgatgagccacagccagggcggcgcagcagctggcagcagcgaggacctcatgaaggaactgtaccagcgctgtgagcggatgcggcccacgctcttccgactggcgagtgacacagaggacaatgatgaggccttaggcctcagtgaccccacacccccttcaggcccaagcctggatggtaccggatggaacagcttccagtcgtcggatgccactgagcccccagcccctgctctggcccaggcccccagtatggaaagccgacccccagcgcagacatccctgccagcaagcagcggtctggacgacctagacctcctggggaagaccctcctgcagcagtcgctgcccccggaatcccagcaagtgcggtgggagaagcagcagccaaccccccggctcacactccgggacctgcagaataagagcagcagctgcagctcccccagctccagcgccaccagccttctccacaccgtgtccccagagccccccaggcctccgcagcagcccgtaccaaccgagctctcactggccagcatcactgtgcccctggagtccatcaaacccagcaacatcctgcccgtgactgtgtatgaccagcacggcttccgcatcctcttccattttgcccgggacccactgccagggcgctccgacgtgctggtggtggtggtttccatgctgagcaccgccccccagcccatccgcaacatcgtgttccagtcagctgtccccaaggttatgaaggtgaagctgcagccaccctcgggcacggagctgccagcttttaaccccatcgtccacccctcagcaatcacccaggtcctgctgcttgccaacccccagaaggagaaggttcgcctccgctacaagctcaccttcaccatgggtgaccagacctacaacgagatgggggatgtggaccagttccccccacctgaaacctggggtagcctctagaacagaggggctggggagaggaaggggcagagggaccggtcactgtccagcctggagggaggcattggtggccaaggacaccctttgttgcccatggccattcacccccaggcctggtgcttctccccacacccctgtaggcctcaagtgactcttccccctcctgctccggccccgcccctgctgagccaaacccagtaggaggctgggcctgggtttgtgccgctggggtctccatcaccgggacctggagagggaggggctgtgtagccttggaagaacttgggtcatggggaggaagcacagctgttggggaagggccaggacctcaggcccagccccaaccccagctggggtggggtcttccccacctgtctcttatgccttatgggaaggcccagccataactcgggggccatgctggagctggggaccagcttaggcctcctccataggaacccagtgactggggggtgacgcctacacccccagctatttgcactctggtgtgtggtttgactctgcttttcttccggattggccctgtggtcacagcctcagggggccaggctgggggaacctcacctggcccgtactcctgggggtttccctttgccattgggccccctgagggactgtgggggctcaagggtaatgccagaggcccatggccccagcgaggggctgtggggcacctagagttctcggtgtgtctccttcattcattggcctctgctggggcctcctatgggtgtcttacgtctgtccatccatctgtccgtggtcagaagtggggtcagtgtgtgagtgagagcaggagtatttatgaaaataaaacgtcgtttttcctggaaaaaaaaaaaaaaaaaaaaaa

SEQ ID NO: 2063 - DNA, 1723 bp, Homo sapiens
agcaacatgcccgcagagaattcttccggaggcggtcacagacatctccgtgacgcagaacgagttagagcgtcccttggggtttccatggtgctgcccttagcctgcagtatctccacttcctctcccgcctgagcgccgggaacggaaaagcaggcggccggtcccagctgcgacgtagacgccgcgtgggggtggggttgggcgagtaggtgacgctctaggcgagctcgttggcctctctatggtgccgagcgcgcccgttcggacgttgcccctttaatcggcagagggcggtgcccaggaggtcccgcgagagctgcggggggcgggggggcggtgccgaggctgggggccggtggcggatggagcccgcgatggagccggagactctggaggcgcgaatcaatagagccacgaaccccctgaacaaggagctcgactgggccagcatcaacggcttctgcgagcagctcaacgaggactttgaggggcctccactcgccacccggctgctggcccacaagatccagtccccacaggagtgggaggcgatccaggccttgacggtgagaaggggagaggccaccatccgtcccccgccatgtgacgacaccaagggaggccaagactgaggttcttggggtccataaggctcttcagagcccaagagagttgtgctaagatggcccaggatggaggtccgggcctgccccaagggtcccaccacagccagcgggctggcctcccaccccagcatccatacacgtaggcctgttgctgagggaaggccctctagggtcatctggtccaggggttctttgcttcagctgcacatcggctgcctctccaggaagcgtgttcaacacatggaatcagggctccacccagacctgccgaggccacactcctggagtatctgcatccagagatctgcacgtttgtaaagctaaggggtggtgcttgggctcaggcctgaggttttgcatctgttcaatagcagaggagagaggggtgtactgtctgtggcccccagcatgggccacataccaacccaccatggagcaaagctgattttaagtggtggtagagatacagtttctcttttaatacttacgtgtttagttgggtgcagtggcttatacctgtaatttcagcacttggggaggccaaggcaggaggcttgcttgaggcaaggagttcaaggctacagtgagctatgattgtgccactgtactccagactggacaacagagtgagaccccatctctaaataataatcattattgttacatatttgttttaacatttttttctcaagtataactagtcctatgatttcatagatgtagcttaggataaggccaaggtagatgttgcctatataaggtttttttaaaaaaggaaaaataggccgggctggtggctcacgcctgtaatcccagcactttggcaggctgaggcgggcagatcacctgagatcaggagttcaagatcagcctgaccaacatggagaagccccatgtctactaaaaataaaaaattagcgaggcgtggtgggcgggcgcctgtaatcccagctacttgggaggctgaggcagaagaatcatttgaacccaggaggcagaggttacagtgagccgagatcgtgctactgcattccaacctgggcaacaagagtgaaactctgtcccaaaaaaaaaaaaaaaaaaaaaaaaaaaaa

SEQ ID NO: 2064 - DNA, 3163 bp, Homo sapiens
agcaacatgcccgcagagaattcttccggaggcggtcacagacatctccgtgacgcagaacgagttagagcgtcccttggggtttccatggtgctgcccttagcctgcagtatctccacttcctctcccgcctgagcgccgggaacggaaaagcaggcggccggtcccagctgcgacgtagacgccgcgtgggggtggggttgggcgagtaggtgacgctctaggcgagctcgttggcctctctatggtgccgagcgcgcccgttcggacgttgcccctttaatcggcagagggcggtgcccaggaggtcccgcgagagctgcggggggcgggggggcggtgccgaggctgggggccggtggcggatggagcccgcgatggagccggagactctggaggcgcgaatcaatagagccacgaaccccctgaacaaggagctcgactgggccagcatcaacggcttctgcgagcagctcaacgaggactttgaggggcctccactcgccacccggctgctggcccacaagatccagtccccacaggagtgggaggcgatccaggccttgacggtgctggaaacatgcatgaagagctgcggcaagcggttccacgacgaagtgggcaagttccgctttctcaacgagctcatcaaggtcgtgtctcccaagtatctgggctctcggacatcggagaaggtgaagaacaagatcttggagctcctctacagctggacagtgggcctgcccgaggaggtgaaaatcgcagaggcctaccagatgctaaagaagcaggggattgtaaagtccgaccccaagcttccagatgacactacctttccccttcctcctccacggccgaagaatgtgatctttgaagatgaggagaaatccaagatgctggcccgcctgctgaagagctcccatcccgaagacctccgcgcagccaataagctcatcaaagagatggtgcaggaggaccagaagcggatggagaagatctcgaagagggtgaatgccatcgaggaggtgaacaacaatgtgaaactgctcacggagatggtgatgagccacagccagggcggcgcagcagctggcagcagcgaggacctcatgaaggaactgtaccagcgctgtgagcggatgcggcccacgctcttccgactggcgagtgacacagaggacaatgatgaggccttagcggagatcctgcaggccaatgacaacctcacccaggtgatcaacctgtataagcagctggtgcggggtgaggaggtcaacggtgatgccacagccggctccatccctgggagcacctcggccctgctggatctctcaggcctggatctcccgcctgcgggcaccacctacccagctatgcccacccgccctggcgagcaggccagccctgagcagcccagtgcctcagtttccctgcttgacgacgagctcatgtctctgggcctcagtgaccccacacccccttcaggcccaagcctggatggtaccggatggaacagcttccagtcgtcggatgccactgagcccccagcccctgctctggcccaggcccccagtatggaaagccgacccccagcgcagacatccctgccagcaagcagcggtctggacgacctagacctcctggggaagaccctcctgcagcagtcgctgcccccggaatcccagcaagtgcggtgggagaagcagcagccaaccccccggctcacactccgggacctgcagaataagagcagcagctgcagctcccccagctccagcgccaccagccttctccacaccgtgtccccagagccccccaggcctccgcagcagcccgtaccaaccgagctctcactggccagcatcactgtgcccctggagtccatcaaacccagcaacatcctgcccgtgactgtgtatgaccagcacggcttccgcatcctcttccattttgcccgggacccactgccagggcgctccgacgtgctggtggtggtggtttccatgctgagcaccgccccccagcccatccgcaacatcgtgttccagtcagctgtccccaaggttatgaaggtgaagctgcagccaccctcgggcacggagctgccagcttttaaccccatcgtccacccctcagcaatcacccaggtcctgctgcttgccaacccccagaaggagaaggttcgcctccgctacaagctcaccttcaccatgggtgaccagacctacaacgagatgggggatgtggaccagttccccccacctgaaacctggggtagcctctagaacagaggggctggggagaggaaggggcagagggaccggtcactgtccagcctggagggaggcattggtggccaaggacaccctttgttgcccatggccattcacccccaggcctggtgcttctccccacacccctgtaggcctcaagtgactcttccccctcctgctccggccccgcccctgctgagccaaacccagtaggaggctgggcctgggtttgtgccgctggggtctccatcaccgggacctggagagggaggggctgtgtagccttggaagaacttgggtcatggggaggaagcacagctgttggggaagggccaggacctcaggcccagccccaaccccagctggggtggggtcttccccacctgtctcttatgccttatgggaaggcccagccataactcgggggccatgctggagctggggaccagcttaggcctcctccataggaacccagtgactggggggtgacgcctacacccccagctatttgcactctggtgtgtggtttgactctgcttttcttccggattggccctgtggtcacagcctcagggggccaggctgggggaacctcacctggcccgtactcctgggggtttccctttgccattgggccccctgagggactgtgggggctcaagggtaatgccagaggcccatggccccagcgaggggctgtggggcacctagagttctcggtgtgtctccttcattcattggcctctgctggggcctcctatgggtgtcttacgtctgtccatccatctgtccgtggtcagaagtggggtcagtgtgtgagtgagagcaggagtatttatgaaaataaaacgtcgtttttcctggaaaaaaaaaaaaaaaaaaaaaaaaaa

SEQ ID NO: 2065 - DNA, 6830 bp, Homo sapiens
gcggggcccaggctgcggctccgctcccggccacggggggcgctgcgctgcgccggtggttggtggtggctgttggggggggtgggggggaacggcggccgcgggtggtgcggagggaggccttgcgggcggatcgggcgcttggcggcggaggtggtgggaggcggcgggcgggagcgcgggtcaggccggccccggcgatggcggacgcggcggcctccccggtgggcaagcggctgctgctgctgttcgcggacactgcggcctcagcctcggcctcggctcccgcggcggcagcggcgagcggagatccggggcctgcgctgcgcactcgagcctggcgggccggcacggtgcgggccatgagcggggcggtgccccaggacctagcgatctttgtagaatttgatggctgtaactggaagcaacactcctgggtaaaagttcatgctgaggaagttatcgtgcttctgctggaagggtctcttgtatgggcgccccgtgaggacccagtccttctccagggcattcgagtctccattgcacaatggccagccctgacttttactccccttgtagataaactgggtttgggttctgtggttccagtggaatatcttctggatcgagagcttcggttcctgtcagatgccaatgggttgcatctgtttcagatgggaacagatagccaaaaccagattcttttggaacatgctgcactgagagaaacagttaatgctttgatcagtgaccaaaagctacaagagatattcagccgaggtccctacagtgttcaaggtcacagggtcaaaatatatcagccagagggggaagaagggtggctctatggtgttgtgagccatcaggactccatcactcgtcttatggaggtgtctgtaactgagagtggtgagatcaagtcggtagatcccagactaatccatgtgatgctgatggataattcaacgcctcaaagcgaggggggtacgttaaaagcagtaaaatcttccaaaggaaagaagaagagagaaagcatagaggggaaagatggccggaggaggaaaagtgcttcggactctgggtgtgaccctgcatcaaagaaattaaaaggagacaggggtgaagtagacagtaatgggagcgatggaggtgaggcaagccgagggccctggaaaggagggaatgccagtggagagccagggctggatcagagagccaagcagccaccgtctacatttgtcccccagataaaccgcaacattcgctttgccacttacaccaaagaaaacggcaggactctggtggtgcaggatgagcctgtaggtggggacacacctgcatctttcactccatattctacagccacaggtcagacacctttggccccagaggtgggtggagccgaaaacaaagaggcaggaaaaacactggaacaagttggccagggcatagtggcttccgcagctgtggtcactaccgccagctccaccccaaacacagtgaggatctcagacactggccttgcagcagggactgtgccagaaaaacagaaaggcagccggtcgcaggcctcgggagagaattcaagaaattctattctggcctcttctggatttggagcacctctccctagttcatcgcaacctttgacttttggaagtggaaggagccagtccaatggtgttctagccacagagaacaaacctttgggcttctcttttggctgtagctctgcacaagaggcacagaaagacactgatctctccaaaaacttgttttttcaatgcatgtcccaaactttacctaccagtaactacttcactactgtttcagagagtttggctgatgattcttctagtcgggactcattcaaacaaagccttgagagcctgagctcaggcctgtgtaaaggcagatccgttcttggaacagacactaagccaggctctaaggctggcagctctgtggaccggaaagtgcctgcagagtccatgcccaccctcactccagccttcccacggagcctcctaaatgcccgtaccccagagaatcatgaaaatctatttttacagccccccaaattgtcccgagaagagccttctaatcctttcctggcatttgtggagaaagttgaacacagccctttcagtagttttgcatctcaggcatcaggtagctcctcttctgctaccactgtcacctccaaggtggcacccagctggcccgagtctcactcctctgcagattcggcatctttagcaaagaagaaacccctcttcattacaactgactcctccaagctagtatctggtgttctgggctcagctcttaccagtgggggcccaagcctctctgccatggggaatggccgctccagctcgcccaccagcagcctcactcagcccattgagatgccaactctctcctctagccccacagaggagaggccaactgtggggcctgggcagcaggacaatcccctcctcaaaacctttagtaacgtctttggcaggcactcaggcggctttctgtcctccccggcagatttttcacaggagaacaaagctccttttgaagctgtgaaaaggttctcactggatgaacgaagcttggcttgcagacaagactcggactccagcaccaacagtgacctgtcagatttgagtgactctgaggagcagctgcaggctaagacaggcctgaagggaattccagagcacctgatggggaagctgggccccaatggggagcgcagtgctgagctgttgctgggcaaaagcaaagggaagcaggcccccaagggccggcctcggactgcccccctgaaagttggccagtcagtgctgaaagatgtaagcaaagtgaagaagctgaagcaatctggagagcccttcctgcaggatgggtcatgcatcaatgtggcacctcatctgcacaagtgtcgtgaatgccgcctggagcggtaccggaagtttaaggaacaggagcaagatgattctactgtagcctgccgtttctttcacttccggaggttgatcttcactcgaaaaggggtactccgtgtggaggggtttttaagcccccagcaaagtgaccctgatgccatgaacctgtggattccctcttcctccctagcagaagggatagatctagagacctcaaaatacatcctggccaatgttggggaccagttctgccagctcgtaatgtctgagaaggaggccatgatgatggtggagccacaccagaaagtggcatggaagcgagctgtgcgtggtgtacgggagatgtgtgatgtgtgtgaaacaactctcttcaacatccactgggtttgtcgcaaatgtggatttggggtctgccttgactgttaccggctcaggaaaagccggccacgcagtgagacagaagagatgggtgatgaagaagttttctcctggttgaagtgtgcaaagggacagtcccacgaaccagagaatctcatgcccacacaaattattcctggcacagctctttacaatattggagacatggtacatgctgcccggggcaagtggggaattaaagcaaactgcccttgtatcagtcgacagaacaaatctgtattgagacctgccgtcaccaatgggatgtcacagcttcctagcataaaccctagtgcctcttctggaaacgaaactaccttctctggtggaggaggaccggcaccagtaacaactccagagccggaccatgttcccaaagccgacagcactgacatcagatctgaagagcctctgaaaacagacagttcggcatcaaatagcaatagtgaactgaaagccatcaggcctccttgccctgacacggccccaccctcctccgccctgcactggttggcagatttagcaactcagaaggctaaagaagaaacaaaagaagcagggtccctgaggtcggtgctcaataaagagtctcattcaccctttgggctggactcgttcaactccactgcaaaggtctctccgctgactccaaagctttttaacagtctgttgctgggtcccactgcctccaacaacaaaaccgaagggtctagccttcgagacctccttcactccgggccgggaaaacttcctcaaacccccttggacacaggcataccctttcccccggtcttctctacatcctcagcaggagtgaagagcaaggccagcctacccaactttcttgaccacatcattgcctcagtggtagaaaataagaaaacctcagatgcttcaaagcgggcctgcaacttgactgatacccagaaggaagtgaaggagatggtgatggggttaaatgtgctagatccccatacttctcactcctggctttgtgatgggaggcttctgtgtctccatgaccccagcaacaaaaacaattggaagatcttccgggagtgttggaagcaaggtcagccagtgctggtttcgggggtacataaaaagctcaagtctgagctctggaagccagaagcctttagccaggaatttggagaccaggatgtagacttggtgaactgcaggaactgtgctataatttccgatgtgaaagttcgggatttctgggatggtttcgagatcatatgcaaacgactacggtcagaagatgggcagccaatggtgctcaaactcaaggactggcctcctggggaagattttcgagacatgatgccaaccaggtttgaagatctgatggagaaccttcctctgccagaatataccaaacgagatggcaggctcaatctggcctctaggctacctagctactttgtaaggcctgatctgggccccaagatgtacaacgcctatgggttgataacagcagaagatagaagagttggtacaacaaatcttcacttagatgtgtctgatgctgttaatgtgatggtgtatgttgggattcccatcggggagggtgctcatgatgaagaggtactcaagacaattgacgagggagatgccgatgaggtgacgaagcagaggattcatgatggaaaagagaagccaggtgctttatggcacatctatgcagccaaggatgcagagaagatccgggagctgctccgaaaggttggagaagaacaaggccaagagaacccccctgatcatgacccaattcatgaccaaagttggtacctggaccagaccctccgtaagcgactctatgaggagtatggcgtgcaaggctgggctattgtgcagttcctaggtgatgctgttttcatacctgctggagccccacaccaggttcacaatctatacagttgcataaaagtagcagaagactttgtatctccagaacatgtaaagcactgtttccgcctgactcaggaattcaggcatctctctaacactcatacaaatcatgaggataaactgcaggtgaagaacatcatttaccatgcagtgaaagatgcggttggcaccctcaaggctcatgaatccaaactggcaaggtcctaggcatggagaaactccaagctcctctgtgaagcaggtctttcactcacaacacttaacagggaacggcagggctctttgctggagcagaggcccttcacccagagccagtgtggtcagtattccaaactctccagccactctcttctacgctgcctcaacactgaaggttgacacaggaaagtcgtactgttcacacacacagtttgagactccaagccaagagtgccacatccctatcctgtggccttttggaaatccaaattgcctgaacatggcggggctttcctgcacattctcctgatttgagattcacgggcacacctttcttttcttttcctcttgtgcctagttaagtggaaatgtgtttggagataggggaaatcacataactggtacaagtatggggtaattgcttaaacatgcctggtggaagtctgatagcgtctctgcacgtgacctctgacaaagcccatcccaggagacggggtgaagctattccccacactctcctgtgaacactggagtcttgcaagacccagggagaacccactgcttttcccaggaggctccaggattaggaaatgtgtgtatttagtgaaaaataggtttgtagtgaaatagttactatttcatgaaagtagatatttttagaatttttgaaataccacagttgttttcctggattataaggaaaggcacattacatttagtcttcctttcgatataaaactctttgaagaaatatgatttttagaaatcagctacccattatagcacaaaatcagccaaagcagaatttttaaaaattggcttttttaggattctttttctccccctcccatcttagtcttaccttgagggaacagtcatatgagaaggaactttgtcacatctaagctgtggtgtgttccccatgtgtgtgtacaacactggtgactccaggaaccattttcacctattaccagtgttccctggggactcctcttaatgtttccaaatgggaaggacagttgatttccaacatgaggttttttgttttttatccagaaatattttcagcaaaactttccaactgagtggagtctgattaaggatttatttgaaaatggtgggattcattggcccataggtacattggaaaatgtatatctctccagctgtactgtagtgccctgcaggctgtttatatgttcacagttacttttttttttttttttaaataaaagtcatttaatgtagaatacttttaatttcactttctgtattttaattttgttgaagggctgattgggatttccatgttcttattaaaaatctaacaaatctgaaaaaaaaaaaaaaaaa

SEQ ID NO: 2066 - DNA, 4467 bp, Homo sapiens
cgagactcagattgtctgaattgagctatcgcaacttaatgctaaaagctccttaaagctacagatttatgacatagttccttccaaaatattacatcataaatcattgagaagattaaaaaaaaacacttgaagaaattgtagttttaaacatctctgcatatattttggatagctactaggttactttaactgtcattaaggagcacagacttactgaagctttactggacagaatcctgggaaatcgatatcattataaggttatatttcccagttagcgggtgaagggctggagaccttattgcagtcatggctttcacaaattacagcagtctgaatcgagctcagctaacctttgaatatctgcacacaaattcgtaagtatcctctaggtgccactgaggtaaccagtaactcgttccttgatattatatggaaatcgtttccccagaaaattttgctttttcactttttgagatgtatcccactggagtgaaatgtgtcactggatatcttgagctctgtattgaagaactgagatcagtgaaatacttgttgctaatccagaagaatctgatttttgtttattggatcaaaattttctaaatgcaaactttagttatttgaagtcaatatgttgagttgtttcattcaagtgtttataggaatccaacaaatactgctctattggatcgccaaatgttggactattttagtatcaaccgtttcccctctgtagtgacaacgtcctaaacagttaggtttataacaagtgtttactttctaacaagaaaacagaagacatttaaatgacaactttcaagaagaaaatttttattttttcagaagttggcattatcttcctggcagattgctcacatccaatattatttgtatatgctaaacaggaaacggcaacttgtttatatctctatttagatagtctttccccaaaatttccacagaaacatacagtgttcatggttcttgagttcatgaaggagtaatctaatcactccaacatggtctggaatgtttcaggtttaatccatatgcccactctcttggaggctgtccagtagcgtcaaaactttagtgttttaatacattcacctgttacttttgagatgaagttcacctttcttggatcacatgcaaaggatgtttaggtctgtgaagaaaagaatttctaggccgggtgctgtggctcacgcctgtaatcccagcactttgggaggccgagaaccactcacgaattcttgtttggtgctcttgctgaactggttgataatgcaagagatgctgatgccaccagaatagatatttatgcagaaagacgagaggaccttcgaggaggatttatgctttgctttttggatgatggagcaggaatggatccaagtgatgctgccagtgtgatccagtttgggaagtcggccaagcgaacacctgagtctactcagattgggcagtacgggaatgggttaaaatcgggctcaatgcgcattgggaaggattttatcctgttcaccaagaaggaagacaccatgacgtgcctcttcctgtctcgcacgtttcatgaggaagaaggcattgatgaagtgatagtcccactgcccacctggaatgctcggacccgggaacctgtcacagacaatgtagagaaatttgccattgagacagaactcatctataagtactctccattccgcactgaggaggaagtgatgacccagtttatgaagattcctggggacagcggaacattggtgatcatcttcaatctcaaactcatggataatggagagccagaactagacataatctcaaatccaagagatatccagatggcagagacgtccccagagggcacgaagccagagcggcgctcgttccgtgcctatgccgctgtgctctatattgatccccggatgaggatcttcatccatgggcacaaggtgcagaccaagaggctctcctgctgcctgtacaagcccaggatgtacaagtacacgtcaagccgtttcaagacccgtgcggagcaggaggtgaagaaagcagagcacgtagcaaggattgctgaagagaaggcgcgggaggcagagagcaaagctcggacattagaagtacgcctaggtggagacctcacgcgggactccagggtgatgttgcgacaggtccagaacagagccatcactctgcgcagagaagccgatgtcaagaagaggatcaaggaggccaagcagcgagcacttaaagaacctaaggaactgaattttgtttttggtgtcaacattgaacaccgggatctggatggcatgttcatctacaactgtagccgactgatcaaaatgtatgagaaagtgggcccacagctggaagggggcatggcatgtggcggggttgttggggttgttgatgtgccctacctggtcctggagcctacacacaacaaacaggactttgctgatgccaaggagtaccggcacctgctccgagcaatgggggagcacctggcgcagtattggaaggatattgccatcgcccagaggggaatcatcaagttctgggatgagtttggctacctctctgccaactggaaccagcccccgtccagtgagctgcgttacaaacgccggagagctatggaaatccccaccaccatccagtgcgatttgtgtctgaaatggagaaccctccccttccagctgagttctgtggaaaaagattaccctgacacctgggtttgctccatgaaccctgatcctgaacaggaccggtgtgaggcttctgaacaaaagcagaaggttcccctgggaacattcagaaaggacatgaagacgcaggaagagaagcagaaacaactgacagagaaaattcgccagcagcaggagaagctggaggcccttcagaaaaccacacccatccgctcccaagcagacctgaagaaattgcccttggaagtgaccaccagaccttccactgaggaacctgtgcgtagacctcagcgtcctcggtcgccccctttacctgctgtgatcaggaacgcccccagcagacccccttctttgccaactcctagaccagccagccagccccgaaaggctcctgtcatcagcagtaccccaaagctccctgctttggcagcccgggaggaggccagcacatctaggctgctccagccacctgaggcaccccgaaagcctgccaacactctcgtcaagactgcatcccgacctgcccctctggtgcagcaactgtcaccatctttactgcccaactccaagagccctcgggaggttccttctcccaaagtcatcaagactccagtggtgaagaagacagagtcacccatcaaactctccccggctacccctagtcggaagcggagtgtcgcagtttctgatgaggaagaagttgaggaggaagctgagaggaggaaggagaggtgcaagcggggcagatttgttgtgaaggaggaaaagaaggactcgaatgagctctcagacagtgctggggaagaggactcggctgacctcaagagagctcagaaagataaagggctgcacgtggaggtgcgtgtgaacagggagtggtacacgggccgtgtcacagccgtggaggtgggcaagcatgtggtgcggtggaaggtgaagtttgactacgtgcccacagacacgacaccaagagaccgctgggtggagaaaggcagtgaggatgtgcggctgatgaaacccccttctccggaacatcagagccttgatacacaacaggagggcggggaggaggaggtgggccctgtggcccagcaggccatagctgtcgcagagccctccacttccgaatgcctccgcattgagcctgacaccactgccctgagcaccaatcacgagaccatcgacctgcttgtccagatcctccggaattgtttacggtacttcctgcctccaagtttccccatctccaagaagcagctgagtgctatgaattcagatgagctaatatcttttcctctgaaggagtacttcaagcaatatgaagtagggctccaaaacctgtgcaattcctaccagagccgtgctgactcccgggccaaggcctccgaggaaagcctgcgcacctccgagaggaagctccgcgagacggaggagaagctgcagaagctgaggaccaacatcgtggcactcctgcaaaaggtgcaggaggacatagacatcaacacagatgatgagctggacgcctacattgaggacctcatcaccaagggggactgaaggcaggagagagagcagctcccctgcccacctgcccctcaaccctgtagctgcagggggaggggacttcattcatgggttggtggtcgcaccttggtttgacttacacgggacatttgtgtttttggaggaaaagataccctgattctttgaatcttccttaagtttataaatatttattttttaaaag

SEQ ID NO: 2067 - DNA, 2239 bp, Homo sapiens
agtcgcaacagaagcaggtccgaggcacagcccgatcccgccatggagcagccgaggaaggcggtggtagtgacgggatttggcccttttggggaacacaccgtgaacgccagttggattgcagttcaggagctagaaaagctaggccttggcgacagcgtggacctgcatgtgtacgagattccggttgagtaccaaacagtccagagactcatccccgccctgtgggagaagcacagtccacagctggtggtgcatgtgggggtgtcaggcatggcgaccacagtcacactggagaaatgtggacacaacaagggctacaaggggctggacaactgccgcttttgccccggctcccagtgctgcgtggaggacgggcctgaaagcattgactccatcatcgacatggatgctgtgtgcaagcgagtcaccacgttgggcctggatgtgtcggtgaccatctcgcaggatgccggcagatatctctgcgactttacctactacacctctttgtaccagagtcacggtcgatcagccttcgtccacgtgcccccactggggaagccgtacaacgcggaccagctgggcagggcactgagagccatcattgaggagatgttggacctcctggagcagtcagagggcaaaatcaactattgccacaaacactgagggacgctcaggtctcctaagacctcatcctgctggggaccccacgaggggacatccaccctctggggtgtggccaggaaaagacaagctcttcagcttggggatccgatctggaagagagattctgatctgcccacctcctcttccttcttctctacaaaagctccggttgattcgagggaagtggtgaaaatttttttttctcccattttcctccctgcatctggggacacagctgccgtgaccagggaggccagcctgggaggtccagatgcccagggagaatcttggtctggtgaatccatgagctgagataccacggctggggccatatgttcacctgctttcctgtccgttggtgaaggaatttcagaattcattttatatccaagactggcttttaccaaatttaaaagcctctcaatgcgtcctcgaccttgaactgtgctcaacagcctggccctttctggggccaccctgggatatggctggctggctggctggctttctttctttctttctttctttctttctttctttctttctttctttctttctttcttgctttctttcttgctttctttcttgctttctttctttcttgctttctttcttctctctctctcttttttttttttttaaatagtgctagtttgggcacagagtaatttatattccctttggttaaaatgcaggctttttagccaacaacaaaagtgttttccccccacccccactcgcccaccagggtgatgccacttttgcctcctgccctgaaaattggacttaagatgccatgtcttggctgggattacaggcatgagccactgcacccagcccagttctttcttaaaacagctgagagttttgttttcttcagcgttcaccttccttgtctccagttccgatgctggcagtggttcctacctctgttgggtttctagatagtttgggaacggggttgatgggtttctgtgaaacacattttccaagtcttgggctttctctggaggggaaggtggatgctggcgggtgacttgcagtgggcgcctggcagtgggtgtggactgtaactgacaggtggaaatgagtaggggcactattgttccctccatgccagctttttttttgctggaaatgccccctccacacccctggtagctctgtgtcctgagaaatccagagtgtgggagacatcactgcatctgtccccccagcttctgtgaagggaagctgtggcctcttttgaatgtggggaacaactgaagactcaggggtcacccagaggtctggtggaaagcaacttcaggtttcatcttgctctattcctcaaaggtctggtctgtgggcctctgaggagaaaacaggtctagccaagacagggacaaaatggggaagggggtgtgccaggcctgaactgagctaagcacctgccccgggctccacacttccatctttcttttgtcttcatttcacctctgtgtttaaagcactgtgtgacatagctccttagagatataacctattgtctgctcattgtcaaaaaaaaaaaaaaaaaaaaaaaaaa

SEQ ID NO: 2068 - DNA, 1173 bp, Homo sapiens
caaatgggaaaaaaaaaaaaaaagggaagtagcaggtggagataatttaaatagcacagggacccctgcttaccaatccctccacagagttttgccctggagtaagcatgacatcagggtgcttgctgcttcctccagtggcccgagctctgtgtgcctttgttgaacaaggttttcgtggagctgaggtgactctcatgaacagagaatacctgtccttcatacagagaagcacccaaatgcaaacatctactttttctggtgttcaaccaggtaaacctctgtttagcaagaaacatcatccccagagtggggactgtcttgtcctttcagaagctagtaccctaagcaagactcataaggaaggtcgggcctccataggtctctgtttcttctgaacagtgatgagctaggtgcagagagagttaaaggtcctatgcagcttgacaagtgtgacccagttcccagtaaattccacttggctggggtttcagaggtgagcaagcaggctttttactcattacacaagaatctagacatccctttaattgggtggcattctgggtgctaaaaggaaggggctttgagaggcaaagatgatgggatatcataaatttttttgttccttttaatgtagcgcagctcctatacttcagatttaactttgaaatgtagcatagctaagatctggtccaaaaagatttctgatatctccatgaatcctagttagggattgataggaaaaaaaaatcttgtgccacagcttcatgctatttttaggaacctttctgaaaccagtggcagcccaagttagagcccagcattaagtccgcctctgcacatctacagttgccagcttatggtaaaagctttctgcaaagcttttctgctcctgggttaaggccttccagcatcagtcacatgtaattaacagctacattgtgtgcttactttttgctagatgtttcataaacattatctcatataaacctcacaataactaggtattattatcccgtatccctgttttacagctgtggaaagtgaagtgaaggatttttgtcatacagccagtaagtgccagaactgacttgaacctagctctctgtcttgattcaggaactactgctctttccattggtggctcctggctaatcaatgtgatagtctttg

SEQ ID NO: 2069 - DNA, 4320 bp, Homo sapiens
acagatcaacagtacaaattctgaagtttgtaaacttgctgatggtggtggtaagccatggcagatgataaagttgctatcttaacggatgatgaagaggaacagaagagaaagtatgtgcttgcagatccctttaatggtatttccagggaaccagaaccaccttcgaatgaaacaccttcctccacagaaacatctgctattcctgaggaggaaatagactggatagagaaacattgtgttaagataaacaacgatcttctaatttccaaggtcttttattttttcttttactctgcctatggctctctctatccccttttgcctgtgtattacaaacagctgggaatgtctccaagccagagtggactactagtaggtattcgttacttcattgaattctgcagtgcccccttttggggtgtagttgcagaccgctttaaaaaaggcaaaattgtcctcctcttttctcttttgtgttgggttttattcaacctgggcattggatttgtcaaacctgctaccttgagatgtgtaccaaagattcgcccaacaactcaccccaccaatgcaagtcaccagttaactatcctgccaacaaattcttcctttacctctttcctcaccatatcaccaaaaatgcgtgagaaaagaaaccttttggaaacagggctcaatgtctcagacaccgttactttgccaacagctccaaacatgaacagtgaacccactctgcagccccagacaggtgaaattactaaccgtatgatggacttgactttgaactcaagcacagcaacccctgtctccccaggaagcgtaaccaaggagacaaccactgttattgttaccaccaccaaatctttaccttctgaccaagtcatgcttgtttatgatcaacaagaagttgaagctatattcttggtgatcttggtagttgtcataataggagaatttttcagtgcctcttctgtcacaatcgtagacacggtcacactccagtatctgggaaaacacagagatcgctatgggttgcagcgcatgtggggctccctgggctggggcctggcgatgctgtctgtgggcatcgggatcgactacacccacatcgaagtgctcatcgatggaaaggggtgtaagccccccgagtacaggaattaccagatcgtcttcatcgtcttcggcgttctcatgaccatggccttgatcgttgccactcagttccggttccgctacaaccatttcaaaaacgatgattctaaagggaaagaggtggagatcccgcaggtggaaaggaacaactctacagagtcctctgaggagacaccaaccaccacaagccactcgcaggccttcaacttttgggacttaatcaagctgctctgcagcgtgcagtatggctcagtgctgtttgtggcttggttcatgggttttggatatggcttcgtgttcacctttctctactggcatttggaagacctcaatggaactacaaccctctttggggtctgttcagtcctgagtcatgtgtctgagctgacagcatatttttttagtcacaagcttattgaattgatcggccacatcagggttctgtacattggcctggcctgcaatacggctcgctatatttatatttcctacctggagaatgcctggactgttctccccatggaagttcttcaaggagtgacacacgcggccatctgggcagcatgcatttcttacctcagtgcagccgttccccctgagctgaggacatctgctcagggcatcctgcagggccttcacctgggtttgggaagaggatgtggtgccatgatcggaggcgtgttagtcaattattttggggctgctgcaaccttccgaggaattggcatggcctgcttggtgatcctactgctctttgccctgatccagtggctggcagtgccagatgaggaagaagacaagacaatgttggcagaaagaattcctgttccctccagtcccgttcctatagcaaccatcgacttggtacagcaacagacagaagatgtcatgccacgcattgagcccagacttccacccaagaaaactaagcaccaggaagaacaggaagatgtgaacaaaccagcctggggagtcagctcttctccctgggtgacctttgtctatgcactctaccaaattaaagagatgatgcaactcacaagagacaaccgtgcttctgagatacagcctttacaggggaccaatgagaatagggaaaattctcctgctggtagagcccagcctgtcccatgtgagactcactctgacccatctagaaaccagccatcccctgacgcagcagcatctcagacgcagaccagccccgctcaccccagtgtggacccgtgcacagaggagagtgaagagcagcaggctcagctggccgcgggaggacactgagggcatcctgctcatctcacaccctgcatggaatcaggctcctcagccaggacacagggtgaggccccccagccaggatatgcctcccctggaggagcacagcactgcatatgcttctaaatatctaaactcattaacatggaaacacacacacaggagctacagtacatattggcaggaaaaggtaaactttcgtaatctcattggaattacaacagggaaatggagttcaatgaggactttcagttctttgcttggttaggttaaggatgatagaatttctctgccagtgcagtaagagttgaaaccggcagttacactaagtaagtggagggaatgaaagtgtttcgaggtgaatgtggatataatttccctcttctgattatttattcttatttggttcctaacacaaactgggaagagatagaattcatctatactttcttttttcttggagagaaccgtttaaaaaattacaagatatatttaaaaagtaaccagataaaagtagcacatgtgcttttgttaaaaataaagttaaaagttaaagttaaaaaatgaagttaaaagtttcatcagaaactttacatatctttagcaaatatatttttatatgtgtatggcatataatggaaataattctttgagcaacagaagctattattaactactgcaagctaagccgagcttaaaaatgccttttgttttaaatgggctttgagaaaaaaaacagaaacaagcgattatttcaaatcaaccaaccaactcagtatcctgtgttttgatagacaagagtttactaaatatattgatactgtaaatagcctctctcgctatttactatcttatagtaattcaggctctaattagctgagggaatgaaacacacaaaaatcactgaattcctaagagttccttaaataagcagtactagttacaaatcacagtataagatttaagtgcctgggggaaggatacaatttttagaaattacatattgggtcagttttgttttgtttttggtgaggaaaaggtggtaaataggaaaccatgaatgggaaggatggcaataagtagcaactatactttccaatgactaaagaaagaaaatctcagtatattcgttctcatgaagacacagtcagacactggacaatgtaatgtatgcaactgcaaacgttacaactgcagccagaacaatggctgggtggatcgcacgtaaagcttgccactaaaaatcaaagcagaggttaacaggaaacctggggggagtgtggaaaagggaaaactgttttagctgaataaaggtgaattatataatttataatagctgtggatgagcacaggagagagaggaaagaaaagaacagtcgaaatgagcaactcaccttaccctctgaccctgattagacaggatcaattgtaaagtgagggcttctccatgacaccatagttctgcccaatactgcatttgggataagaaattctacacttggatgtctcgcttcacaataaaacacagcttaaaaataaaataactgaaagaaatagaattcagcaaatagttattttttgcacttgaactgaaacgtactgtactgtaaattatgactcattttaagtgacctttaaaatcagatgtatttattatgcttgtgtaattatagaaataaagaaatgggtgacaggcttaacctcacctatgaatgtacagtatgtggatttgtgaaactgactgtaggaagtcaaaaacttgtactgtatcttgtgtttacagttctgatttattcctttgaaaagcctgctgttttggaaatgcacagttgacatgttgaaataaaaatgaataccatttttaaaaaaaaaaaaaaaaaaaaaaaaaaaaaa

SEQ ID NO: 2070 - DNA, 3603 bp, Homo sapiens
atgcgaccggactgcaattcccagaagccgtcgcaggccctcagcatccgggacactagcagcaaggatccctggccggacatagaaccacaactcccagcaacccctgctgccgtgtggggggtcttcacgttctcgtggcgcggcgcaggcgcactgggtcctcggcgcggaccgcgcagactgaataataaaaggggagcggcgaagaggcaggaagacaagaccatgtcgaagggccccgggcccggcggctccgcagcttcctcggcgcccccggccgctaccgctcaggtgctgcaggcacagcccgagaaaccgcagcactacacgtacctgaaagaattccgcacagagcagtgcccactctttgtgcaacacaaatgcacgcagcatcggccctacacctgcttccactggcacttcgtgaaccagcggcgccgccggtccatccgccgtcgggacggcaccttcaattacagccctgacgtctactgcaccaagtacgacgaggctacaggcctctgcccggagggcgacgagtgcccattcctgcacagaaccacaggggacactgagcgcaggtaccaccttcgttactacaaaactggaatctgcatccacgagacagactcgaaaggcaactgcaccaaaaacggcctgcactgcgcttttgcccacgggccccatgacctccgctcccctgtctacgacatcagggagcttcaggccatggaggccttgcagaatggccagaccacggtagaggggagcatagagggccagtcggctggggctgcgagccatgccatgatagaaaagatcctcagcgaggagcctcggtggcaagagactgcttatgtgctggggaactataagacggagccttgcaagaagcccccgcggctgtgccgccaaggctatgcctgtccctactaccacaacagcaaggaccggcggcggagcccccggaagcacaaatacaggtcgtctccatgtccaaacgtcaagcacggggatgagtggggagaccctggcaagtgtgagaacggagacgcctgccagtactgccacacccgcaccgagcagcagttccaccccgagatctacaagtccaccaagtgcaacgacatgcagcagtcgggcagctgtccccgaggacccttctgcgcctttgcccacgtagaacagccacccctgagtgacgacctgcagccttcctcagctgtgtccagccccacccagccaggtcctgtcctgtacatgccatctgccgccggagactcggtgcctgtgagcccctccagcccgcatgcccctgacctcagtgccctcctctgtagaaacagcagcctaggcagcccgtctaacctctgcggctccccaccgggctccatcaggaagcccccaaacctggagggcatcgtcttccctggggagtctggcctggcccctggcagctataagaaggctcccggcttcgagagggaagaccaggtgggagccgagtacctgaaaaatttcaaatgccaggccaaattaaaaccccactcattagagcccaggagtcaagagcagcctctgcttcagcccaaacaggacatgctgggcatcctccccgcaggcagccccctgacctcaagcatctcttctagtatcacctccagcctggcagctaccccccctagcccagtgggcaccagcagcgtccccggcatgaatgcaaacgctctgcccttctaccccaccagcgacacggtagagtcagtcatagagtctgctttggatgacctggacctgaatgagtttggcgtggccgccctggagaagactttcgataacagcacagtgccccacccaggaagcatcaccatcggcggcagcttgctgcagagctctgcacccgtgaacatccccggctccttgggcagctctgcctccttccactcagcatccccgtcccctcccgtcagcctctcctcgcatttcctgcagcagccccagggccacctgagtcagtcggaaaacacatttttgggaacctcagcatcacatggatctttgggtctgaacgggatgaacagcagcatctgggagcattttgcctctggaagcttctccccgggcacttcccccgctttcctatcagggccaggggctgccgagctggcccgacttcggcaagagctggatgaagccaacagcaccatcaagcagtgggaggagtcctggaagcaggccaagcaggcttgtgatgcctggaagaaagaggcggaggaggctggtgagcgggccagtgcggcgggcgccgagtgcgagctggcccgggagcagcgggatgcactggaggtgcaggtgaagaagctccaggaggagctggagcggctacacgcggggcctgagccccaggccctgcccgccttctccgacctggaggcgctctcactctccaccctctactccctccagaaacaactgcgggcccacctggaacaagtggacaaggccgtgttccacatgcagtcggtgaaatgccttaagtgtcaggaacagaagcgggcagtgctgccgtgccaacacgctgcgctgtgtgagctctgcgctgagggcagcgagtgccccatctgccagcctggccgggcccacaccctccagtcgtgaccctgcaggcctggcccagcctggcccagatcttctcacctaggactttttaaagtatatatatatatatgaatatatatatatatgtgtatgtatgtatgtatatgtatatgattatgtatatgtatacatttccgtatgtatgtatatgtatacatttccgtatgtgtgcaggtatgcgtggtggtgtggacagtgtctgtgtgtatatctgtacatagatatagacacacactttaaaagacttaccaagcactttttaaaagaagaaactattttgcagtcctcccctacccactccctgcccttcccactgcagagatgacatcccctcttctcccactggccttttggcagagaatctggttctgtctcttttttaatgtaggaactaactatttttaacttcttcctggggcctgagcagggaagggtgggactggaaggcactaaggggaagggagaagccctcagggcaggccctgctccccctacctccttgccagggcaagggtggagtgtggaagacgtggggggcccaggccctgccctcctacccggaggggctccgtttgcattccttggtgctctctgagtgcagctggtgtcccgccctgttctgggcggacgcctgtgtgcgtgtgtgtgtgcctgtccagtgtatattgtgtcttagcttccattttaaaaattgttctgtacagagagagatgcagcaggggcgggagggcagagtgggcggaggggagcagccgcacccccagcaccgggtgtctgcggtaggaacaagagggctgagagggtctggtcctggcccaggctcccccttgggctcagcacgaaagggctttcaatgaattaagtgaaaactttttccttttttacaaaaatgcaaaaatcaacaaagctccaaacctattggaaataaaatatgaacttgca

SEQ ID NO: 2071 - DNA, 3603 bp, Homo sapiens
atgcgaccggactgcaattcccagaagccgtcgcaggccctcagcatccgggacactagcagcaaggatccctggccggacatagaaccacaactcccagcaacccctgctgccgtgtggggggtcttcacgttctcgtggcgcggcgcaggcgcactgggtcctcggcgcggaccgcgcagactgaataataaaaggggagcggcgaagaggcaggaagacaagaccatgtcgaagggccccgggcccggcggctccgcagcttcctcggcgcccccggccgctaccgctcaggtgctgcaggcacagcccgagaaaccgcagcactacacgtacctgaaagaattccgcacagagcagtgcccactctttgtgcaacacaaatgcacgcagcatcggccctacacctgcttccactggcacttcgtgaaccagcggcgccgccggtccatccgccgtcgggacggcaccttcaattacagccctgacgtctactgcaccaagtacgacgaggctacaggcctctgcccggagggcgacgagtgcccattcctgcacagaaccacaggggacactgagcgcaggtaccaccttcgttactacaaaactggaatctgcatccacgagacagactcgaaaggcaactgcaccaaaaacggcctgcactgcgcttttgcccacgggccccatgacctccgctcccctgtctacgacatcagggagcttcaggccatggaggccttgcagaatggccagaccacggtagaggggagcatagagggccagtcggctggggctgcgagccatgccatgatagaaaagatcctcagcgaggagcctcggtggcaagagactgcttatgtgctggggaactataagacggagccttgcaagaagcccccgcggctgtgccgccaaggctatgcctgtccctactaccacaacagcaaggaccggcggcggagcccccggaagcacaaatacaggtcgtctccatgtccaaacgtcaagcacggggatgagtggggagaccctggcaagtgtgagaacggagacgcctgccagtactgccacacccgcaccgagcagcagttccaccccgagatctacaagtccaccaagtgcaacgacatgcagcagtcgggcagctgtccccgaggacccttctgcgcctttgcccacgtagaacagccacccctgagtgacgacctgcagccttcctcagctgtgtccagccccacccagccaggtcctgtcctgtacatgccatctgccgccggagactcggtgcctgtgagcccctccagcccgcatgcccctgacctcagtgccctcctctgtagaaacagcagcctaggcagcccgtctaacctctgcggctccccaccgggctccatcaggaagcccccaaacctggagggcatcgtcttccctggggagtctggcctggcccctggcagctataagaaggctcccggcttcgagagggaagaccaggtgggagccgagtacctgaaaaatttcaaatgccaggccaaattaaaaccccactcattagagcccaggagtcaagagcagcctctgcttcagcccaaacaggacatgctgggcatcctccccgcaggcagccccctgacctcaagcatctcttctagtatcacctccagcctggcagctaccccccctagcccagtgggcaccagcagcgtccccggcatgaatgcaaacgctctgcccttctaccccaccagcgacacggtagagtcagtcatagagtctgctttggatgacctggacctgaatgagtttggcgtggccgccctggagaagactttcgataacagcacagtgccccacccaggaagcatcaccatcggcggcagcttgctgcagagctctgcgcccgtgaacatccccggctccttgggcagctctgcctccttccactcagcatccccgtcccctcccgtcagcctctcctcgcatttcctgcagcagccccagggccacctgagtcagtcggaaaacacatttttgggaacctcagcatcacatggatctttgggtctgaacgggatgaacagcagcatctgggagcattttgcctctggaagcttctccccgggcacttcccccgctttcctatcagggccaggggctgccgagctggcccgacttcggcaagagctggatgaagccaacagcaccatcaagcagtgggaggagtcctggaagcaggccaagcaggcttgtgatgcctggaagaaagaggcggaggaggctggtgagcgggccagtgcggcgggcgccgagtgcgagctggcccgggagcagcgggatgcactggaggtgcaggtgaagaagctccaggaggagctggagcggctacacgcggggcctgagccccaggccctgcccgccttctccgacctggaggcgctctcactctccaccctctactccctccagaaacaactgcgggcccacctggaacaagtggacaaggccgtgttccacatgcagtcggtgaaatgccttaagtgtcaggaacagaagcgggcagtgctgccgtgccaacacgctgcgctgtgtgagctctgcgctgagggcagcgagtgccccatctgccagcctggccgggcccacaccctccagtcgtgaccctgcaggcctggcccagcctggcccagatcttctcacctaggactttttaaagtatatatatatatatgaatatatatatatatgtgtatgtatgtatgtatatgtatatgattatgtatatgtatacatttccgtatgtatgtatatgtatacatttccgtatgtgtgcaggtatgcgtggtggtgtggacagtgtctgtgtgtatatctgtacatagatatagacacacactttaaaagacttaccaagcactttttaaaagaagaaactattttgcagtcctcccctacccactccctgcccttcccactgcagagatgacatcccctcttctcccactggccttttggcagagaatctggttctgtctcttttttaatgtaggaactaactatttttaacttcttcctggggcctgagcagggaagggtgggactggaaggcactaaggggaagggagaagccctcagggcaggccctgctccccctacctccttgccagggcaagggtggagtgtggaagacgtggggggcccaggccctgccctcctacccggaggggctccgtttgcattccttggtgctctctgagtgcagctggtgtcccgccctgttctgggcggacgcctgtgtgcgtgtgtgtgtgcctgtccagtgtatattgtgtcttagcttccattttaaaaattgttctgtacagagagagatgcagcaggggcgggagggcagagtgggcggaggggagcagccgcacccccagcaccgggtgtctgcggtaggaacaagagggctgagagggtctggtcctggcccaggctcccccttgggctcagcacgaaagggctttcaatgaattaagtgaaaactttttccttttttacaaaaatgcaaaaatcaacaaagctccaaacctattggaaataaaatatgaacttgca

SEQ ID NO: 2072 - DNA, 2689 bp, Homo sapiens
cggaggagcagcgagtcaagatgagagttcagccgcggcggcagcagcagcagactggaaaagtaagaagagctttcctgcctttttaattaccaaactactctcagttttcaatgaatcagttcaaagaaagaatgcagtctttctatacctgactcaagaatgaacaatccgtcagaaaccagtaaaccatctatggagagtggagatggcaacacaggcacacaaaccaatggtctggactttcagaagcagcctgtgcctgtaggaggagcaatctcaacagcccaggcgcaggctttccttggacatctccatcaggtccaactcgctggaacaagtttacaggctgctgctcagtctttaaatgtacagtctaaatctaatgaagaatcgggggattcgcagcagccaagccagccttcccagcagccttcagtgcaggcagccattccccagacccagcttatgctagctggaggacagataactgggcttactttgacgcctgcccagcaacagttactactccagcaggcacaggcacaggcacagctgctggctgctgcagtgcagcagcactccgccagccagcagcacagtgctgctggagccaccatctccgcctctgctgccacgcccatgacgcagatccccctgtctcagcccatacagatcgcacaggatcttcaacaactgcaacagcttcaacagcagaatctcaacctgcaacagtttgtgttggtgcatccaaccaccaatttgcagccagcgcagtttatcatctcacagacgccccagggccagcagggtctcctgcaagcgcaaaatcttctaacgcaactacctcagcaaagccaagccaacctcctacagtcgcagccaagcatcaccctcacctcccagccagcaaccccaacacgcacaatagcagcaaccccaattcagacacttccacagagccagtcaacaccaaagcgaattgatactcccagcttggaggagcccagtgaccttgaggagcttgagcagtttgccaagaccttcaaacaaagacgaatcaaacttggattcactcagggtgatgttgggctcgctatggggaaactatatggaaatgacttcagccaaactaccatctctcgatttgaagccttgaacctcagctttaagaacatgtgcaagttgaagccacttttagagaagtggctaaatgatgcagagaacctctcatctgattcgtccctctccagcccaagtgccctgaattctccaggaattgagggcttgagccgtaggaggaagaaacgcaccagcatagagaccaacatccgtgtggccttagagaagagtttcttggagaatcaaaagcctacctcggaagagatcactatgattgctgatcagctcaatatggaaaaagaggtgattcgtgtttggttctgtaaccgccgccagaaagaaaaaagaatcaacccaccaagcagtggtgggaccagcagctcacctattaaagcaattttccccagcccaacttcactggtggcgaccacaccaagccttgtgactagcagtgcagcaactaccctcacagtcagccctgtcctccctctgaccagtgctgctgtgacgaatctttcagttacaggcacttcagacaccacctccaacaacacagcaaccgtgatttccacagcgcctccagcttcctcagcagtcacgtccccctctctgagtccctccccttctgcctcagcctccacctccgaggcatccagtgccagtgagaccagcacaacacagaccacctccactcctttgtcctcccctcttgggaccagccaggtgatggtgacagcatcaggtttgcaaacagcagcagctgctgcccttcaaggagctgcacagttgccagcaaatgccagtcttgctgccatggcagctgctgcaggactaaacccaagcctgatggcaccctcacagtttgcggctggaggtgccttactcagtctgaatccagggaccctgagcggtgctctcagcccagctctaatgagcaacagtacactggcaactattcaagctcttgcttctggtggctctcttccaataacatcacttgatgcaactgggaacctggtatttgccaatgcgggaggagcccccaacatcgtgactgcccctctgttcctgaaccctcagaacctctctctgctcaccagcaaccctgttagcttggtctctgccgccgcagcatctgcagggaactctgcacctgtagccagccttcacgccacctccacctctgctgagtccatccagaactctctcttcacagtggcctctgccagcggggctgcgtccaccaccaccaccgcctccaaggcacagtgagctgggcagagctgggctgccagaagcctttttcactctgcagtgtgattggactgccagccaggttaataaactgaaaaatgtgattggcttcctctcgccgtgttgtgagggcaaaggagagaagggagaaaaaaaaaaaaaaaccacacacacccatacacacataccagaaaaagaaagaaaggatggagacggaacatttgcctaattttgtaataaaacactgtcttttcaggattgcttcatggattggagaactttctaaccaaaaattaaaaaaaaaaaaaaaaaa

SEQ ID NO: 2073 - DNA, 2527 bp, Homo sapiens
gcgccccggccgggccactgggccacaggccacgcggccacgcagtccgagcgggagccgagccgggcggggcgagggcagctccgcctggctcccaccatgagtgctgagcttaacgtgcctatcgacccctctgctcctgcctgccctgagcccggccataagggcatggattaccgggactgggtccgccgcagctacctggaactggtcacctctaaccaccactcggtacaggccctgtcgtggcggaagctctacctgagcagggccaagctgaaggcctccagcaggacctccgccctcctctccggctttgccatggtggccatggtggaggtgcagctggagacgcagtaccagtacccgcggccgctgctgattgccttcagcgcctgcaccacggtgctggtggccgtgcacctgttcgccctcctcatcagcacctgcatcctgcccaatgtggaggccgtgagcaacatccacaacctgaactccatcagcgagtccccgcatgagcgcatgcacccctacatcgagctggcctggggcttctccaccgtgcttggcatcctactcttcctggccgaggtggtgctgctctgctggatcaagttcctccccgtggatgcccggcgccagcctggccccccacctggccctgggagtcacacgggctggcaggccgccctggtgtccaccatcatcatggtgcccgtgggcctcatcttcgtggtcttcaccatccacttctaccgctccctggtgcgccacaaaacggagcgccacaaccgcgagatcgaggagctccacaagctcaaggtccagctggacgggcatgagcgcagcctgcaggtcttgtgaggggccgagggccggggctgggagcggccctgtgcccgggagtccgcagaggcggggatttgtcagatgcagacattttgcaaggctgccgggtagttcaagaccaaagttttcctcttgtcttaataccataaggactggatgacttctcctgagatagaaccgtttggttcaatgagggactgtgttgctaagagcgttgggggcaaagccaggctggttccttggcctcggggtttcctgggtcggggacacggtgaagaggctccagcgggacctgcccatcagtcctgggccaggaggggctccaagcagcacccagcggtccgggggagtctcagacccggcatgcgtggctggcagacctgggagagccagggcagggttttgcgttcagagaaggattgccccagagacccgtggtggacttcatgggtgctgagtggcccgtgtgacagtgatgacacgaaggcttcggcgtttgagtgggtgcaggtgcacgccagggcttggtgcttccctgcctggccctggagggagctgggtggcctggcttcaggggaagacaggagccaggactcacgtcagcccagcaggtgtggggggtgctgcagccctcggcagtggggtcaggccctgggggatgtttccaatggtgggcagcctggccaggccggagaagacatgttcacgggcatctatcagatgcccccttgaggaggctgagttatttgagggctgctgcaaagtacgctaggctcaaattctcttttcccagccagagccctggccacacggactcagaggggccaccggggtggggaaaggacccctccccgacccccgcagccactggcctccagctctcggccacagaatggcctctaaggctgactcagccgctcccttgggctgtggcagcaggaggcgggggctctggctcaggccccggagcctgtgcagcttgcccatggccctaggcagcgaggggacagcctgggggacttcctgcctaggcaaggtcattggccgggcctggcctgtggatagtggggccaggggccggcccaggccaaatgagtgccctccttgttatgacaccaagtgactacaagggaggcaagacccctccaggcctcccagccgacactgggtcccaccacacacagtgactgtgccgtgcagtgcaggttctggccttttccttgaaggcatctggtaaacccgaagccacgctctcgggccgcacatgcacgccgcagcaccagctgccctgagctgcttgtacaaccaaacacctttcccctcttctccagctgtaacctggagagtcagccatgccttgtcttttgttctcatgaatagtcactggggccgggcgcagtgactcacgcctgtaatcccagcactttgggaggcctaggtgggcggatcacttgaggtcaggagttcgagaccagcctggccaacatggtgaaaccctgtctctactaaaaaaatacagaaaattagctgggcgtggtggcgggcgcctgtagccccagctacttgggaggctgaggcgggagaatggcaatggcgtgaacccgggaggcagagcttgcagtgagctgagatggcgccactgcactccagcctgggcgacagagccagactcaatctc

SEQ ID NO: 2074 - DNA, 418 bp, Homo sapiens
gcctgtcgacgtgttcttccggtggcggacggcggattagccttcgcggggcaaaatggagctcgaggccatgagcagatataccagcccagtgaacccagctgtcttcccccatctgaccgtggtgcttttggccattggcatgttcttcaccgcctggttcttcgtttacgaggtcacctctaccaagtacactcgtgatatctataaagagctcctcatctccttagtggcctcactcttcatgggctttggagtcctcttcctgctgctctgggttggcatctacgtgtgagcacccaagggtaacaaccagatggcttcactgaaacctgcttttgtaaattacttttttttactgttgctggaagtgtcccacctgctgctcataataaatgcagatgtatacaaaaaaaaa

SEQ ID NO: 2075 - DNA, 3701 bp, Homo sapiens
gcttcccggaagtggcggcgcggtcagggctggccttggcttcagctgcggttttggggtcccggactctgggatcggcggcgctatgagttctttcgaggggcagatggccgagtatccaactatctccatagaccgcttcgatagggagaacctgagggcccgcgcctacttcctgtcccactgccacaaagatcacatgaaaggattaagagcccctaccttgaaaagaaggttggagtgcagcttgaaggtttatctatactgttcacctgtgactaaggagttgttgttaacgagcccgaaatacagattttggaagaaacgaattatatctattgaaatcgagactcctacccagatatctttagtggatgaagcatcaggagagaaggaagagattgttgtgactctcttaccagctggtcactgtccgggatcagttatgtttttatttcagggcaataatggaactgtcctgtacacaggagacttcagattggcgcaaggagaagctgctagaatggagcttctgcactccgggggcagagtcaaagacatccaaagtgtatatttggatactacgttctgtgatccaagattttaccaaattccaagtcgggaggagtgtttaagtggagtcttagagctggtccgaagctggatcactcggagcccgtaccatgttgtgtggctgaactgcaaagcggcttatggctatgaatatctgttcaccaaccttagtgaagaattaggagtccaggttcatgtgaataagctagacatgtttaggaacatgcctgagatccttcatcatctcacaacagaccgcaacactcagatccatgcatgccggcatcccaaggcagaggaatattttcagtggagcaaattaccctgtggaattacttccagaaatagaattccactccacataatcagcattaagccatccaccatgtggtttggagaaaggagcagaaaaacaaatgtaattgtgaggactggagagagttcatacagagcttgtttttcttttcactcctcctacagtgagattaaagatttcttgagctacctctgtcctgtgaacgcatatccaaatgtcattccagttggcacaactatggataaagttgtcgaaatcttaaagcctttatgccggtcttcccaaagtacggagccaaagtataaaccactgggaaaactgaagagagctagaacagttcaccgagactcagaggaggaagatgactatctctttgatgatcctctgccaatacctttaaggcacaaagttccatacccggaaacttttcaccctgaggtattttcaatgactgcagtatcagaaaagcagcctgaaaaactgagacaaaccccaggatgctgcagagcagagtgtatgcagagctctcgtttcacaaactttgtagattgtgaagaatccaacagtgaaagtgaagaagaagtaggaatcccagcttcactgcaaggagatctgggctctgtacttcacctgcaaaaggctgatggggatgtaccccagtgggaagtattctttaaaagaaatgatgaaatcacagatgagagtttggaaaacttcccttcctccacagtggcagggggatctcagtcaccaaagcttttcagtgactctgatggagaatcaactcacatctcctcccagaattcttcccagtcaacacacataacagaacaaggaagtcaaggctgggacagccaatctgatactgttttgttatcttcccaagagagaaacagtggggatattacttccttggacaaagctgactacagaccaacaatcaaagagaatattcctgcctctctcatggaacaaaatgtaatttgcccaaaggatacttactctgatttgaaaagcagagataaagatgtgacaatagttcctagtactggagaaccaactactctaagcagtgagacacatatacccgaggaaaaaagtttgctaaatcttagcacaaatgcagattcccagagctcttctgattttgaagttccctcaactccagaagctgagttacctaaacgagagcatttacaatatttatatgagaagctggcaactggtgagagtatagcagtcaaaaaaagaaaatgctcactcttagatacctaagaattcaaagcgtttcaacctagagcaaccactaaaaaacctgcacagagatgacagtcaatattacaatagagaaaatacagtacttaaaaatgttcaaataacctggttgggtgtggtggctcacacttgtaatcccagcactttgaggtgggcaatggcttgagcccaggagttcgacaccagcctggccaacacagtgaaatgtgtctctacttacaaaaaaaaaaaaaaaaaaaaaagccaggcatggtggtgggctactctggaggcccttgaggatcacttgagcccaggagattgaggctgcagtgagccatgactgtgccactgcacctctagtctgggtgacagagcaagaccctgtttaaaaaagaaaaaggccaggcacggtggctcatgcctgtaatcccagctacgcaggaggccaaggcaggagaatcacttgaacctgggaggtggtggttgcagtgagctgagattgtgtcattgcactccagcctgggcaacaagagcaaaactctgtctcaaaaaaaaaaaaaaaaaaaaagaaaaaaaaatggtagaactaaacccatacgtatcaatgattacattaaatgtaaatggtctaagtgcatcaatgacaagagacacggaaaaaaccaacataacccagtgatctgctgtctataaagaaagtcaattcaagtgattgataggttaaaaggatggaaaaaccatgtaaacaattaaaaatggagtggttatatggacagtttcctaatgataaaaggtctagttcaccaagaagacaaaataatcctaaacgtatatgcacctaacagctccaaaaatttatgaagctagaacagctgaaaagagacaaactaatgcacaattacagctagggattaatttaacatccctccttagtaacagaactagtatatacacattaatcagtaagaatatagaactgaaaatcataagccgactggattaaattgacatttatagaacacaccaccccaaactagcagaatgtatctcctgaagtacacatggaacattcagcatgatcatatctttgctcataaacacacctgatttaaattgacaaacttggatctagtatgataaactgatggctatagacaaaatcagcaccttatttatccccaaagatgttaagtcacttaaccttgatgtgaatacggtggccaaattagaagcggacaattagaatataaaagaaaatgctcaagaattaaatggtggccaggcacagtaactcctgcctgcaatcccagtactttgggaggctcgcttgagctcagggttttgagtccagcctgggcaacacacagggagaccctgtctccacaaaatgttagccagacatggtggtgtgcacctgtagtcctcgctacttggaaggcttaggtggcaggatggattgagcccaggaggttgaaactgcagtgagctgattgtgcccagcctgggcaacaaagcaagaccccatctcaagaaaaataaattaaaaaaaactaaa

SEQ ID NO: 2076 - DNA, 3786 bp, Homo sapiens
gcttcccggaagtggcggcgcggtcagggctggccttggcttcagctgcggttttggggtcccggactctgggatcggcggcgctatgagttctttcgaggggcagatggccgagtatccaactatctccatagaccgcttcgatagggagaacctgagggcccgcgcctacttcctgtcccactgccacaaagatcacatgaaaggattaagagcccctaccttgaaaagaaggttggagtgcagatgaggaaactgaggaaccagagaggttaaattagttgcccagtgtcacacagccagtaagtggcaggaccaggattccagccagcttgaaggtttatctatactgttcacctgtgactaaggagttgttgttaacgagcccgaaatacagattttggaagaaacgaattatatctattgaaatcgagactcctacccagatatctttagtggatgaagcatcaggagagaaggaagagattgttgtgactctcttaccagctggtcactgtccgggatcagttatgtttttatttcagggcaataatggaactgtcctgtacacaggagacttcagattggcgcaaggagaagctgctagaatggagcttctgcactccgggggcagagtcaaagacatccaaagtgtatatttggatactacgttctgtgatccaagattttaccaaattccaagtcgggaggagtgtttaagtggagtcttagagctggtccgaagctggatcactcggagcccgtaccatgttgtgtggctgaactgcaaagcggcttatggctatgaatatctgttcaccaaccttagtgaagaattaggagtccaggttcatgtgaataagctagacatgtttaggaacatgcctgagatccttcatcatctcacaacagaccgcaacactcagatccatgcatgccggcatcccaaggcagaggaatattttcagtggagcaaattaccctgtggaattacttccagaaatagaattccactccacataatcagcattaagccatccaccatgtggtttggagaaaggagcagaaaaacaaatgtaattgtgaggactggagagagttcatacagagcttgtttttcttttcactcctcctacagtgagattaaagatttcttgagctacctctgtcctgtgaacgcatatccaaatgtcattccagttggcacaactatggataaagttgtcgaaatcttaaagcctttatgccggtcttcccaaagtacggagccaaagtataaaccactgggaaaactgaagagagctagaacagttcaccgagactcagaggaggaagatgactatctctttgatgatcctctgccaatacctttaaggcacaaagttccatacccggaaacttttcaccctgaggtattttcaatgactgcagtatcagaaaagcagcctgaaaaactgagacaaaccccaggatgctgcagagcagagtgtatgcagagctctcgtttcacaaactttgtagattgtgaagaatccaacagtgaaagtgaagaagaagtaggaatcccagcttcactgcaaggagatctgggctctgtacttcacctgcaaaaggctgatggggatgtaccccagtgggaagtattctttaaaagaaatgatgaaatcacagatgagagtttggaaaacttcccttcctccacagtggcagggggatctcagtcaccaaagcttttcagtgactctgatggagaatcaactcacatctcctcccagaattcttcccagtcaacacacataacagaacaaggaagtcaaggctgggacagccaatctgatactgttttgttatcttcccaagagagaaacagtggggatattacttccttggacaaagctgactacagaccaacaatcaaagagaatattcctgcctctctcatggaacaaaatgtaatttgcccaaaggatacttactctgatttgaaaagcagagataaagatgtgacaatagttcctagtactggagaaccaactactctaagcagtgagacacatatacccgaggaaaaaagtttgctaaatcttagcacaaatgcagattcccagagctcttctgattttgaagttccctcaactccagaagctgagttacctaaacgagagcatttacaatatttatatgagaagctggcaactggtgagagtatagcagtcaaaaaaagaaaatgctcactcttagatacctaagaattcaaagcgtttcaacctagagcaaccactaaaaaacctgcacagagatgacagtcaatattacaatagagaaaatacagtacttaaaaatgttcaaataacctggttgggtgtggtggctcacacttgtaatcccagcactttgaggtgggcaatggcttgagcccaggagttcgacaccagcctggccaacacagtgaaatgtgtctctacttacaaaaaaaaaaaaaaaaaaaaaagccaggcatggtggtgggctactctggaggcccttgaggatcacttgagcccaggagattgaggctgcagtgagccatgactgtgccactgcacctctagtctgggtgacagagcaagaccctgtttaaaaaagaaaaaggccaggcacggtggctcatgcctgtaatcccagctacgcaggaggccaaggcaggagaatcacttgaacctgggaggtggtggttgcagtgagctgagattgtgtcattgcactccagcctgggcaacaagagcaaaactctgtctcaaaaaaaaaaaaaaaaaaaaagaaaaaaaaatggtagaactaaacccatacgtatcaatgattacattaaatgtaaatggtctaagtgcatcaatgacaagagacacggaaaaaaccaacataacccagtgatctgctgtctataaagaaagtcaattcaagtgattgataggttaaaaggatggaaaaaccatgtaaacaattaaaaatggagtggttatatggacagtttcctaatgataaaaggtctagttcaccaagaagacaaaataatcctaaacgtatatgcacctaacagctccaaaaatttatgaagctagaacagctgaaaagagacaaactaatgcacaattacagctagggattaatttaacatccctccttagtaacagaactagtatatacacattaatcagtaagaatatagaactgaaaatcataagccgactggattaaattgacatttatagaacacaccaccccaaactagcagaatgtatctcctgaagtacacatggaacattcagcatgatcatatctttgctcataaacacacctgatttaaattgacaaacttggatctagtatgataaactgatggctatagacaaaatcagcaccttatttatccccaaagatgttaagtcacttaaccttgatgtgaatacggtggccaaattagaagcggacaattagaatataaaagaaaatgctcaagaattaaatggtggccaggcacagtaactcctgcctgcaatcccagtactttgggaggctcgcttgagctcagggttttgagtccagcctgggcaacacacagggagaccctgtctccacaaaatgttagccagacatggtggtgtgcacctgtagtcctcgctacttggaaggcttaggtggcaggatggattgagcccaggaggttgaaactgcagtgagctgattgtgcccagcctgggcaacaaagcaagaccccatctcaagaaaaataaattaaaaaaaactaaa

SEQ ID NO: 2077 - DNA, 4108 bp, Homo sapiens
gcttcccggaagtggcggcgcggtcagggctggccttggcttcagctgcggttttggggtcccggactctgggatcggcggcgctatgagttctttcgaggggcagatggccgagtatccaactatctccatagaccgcttcgatagggagaacctgagggcccgcgcctacttcctgtcccactgccacaaagatcacatgaaaggattaagagcccctaccttgaaaagaaggttggagtgcagatgaggaaactgaggaaccagagaggttaaattagttgcccagtgtcacacagccagtaagtggcaggaccaggattccagccagcttgaaggtttatctatactgttcacctgtgactaaggagttgttgttaacgagcccgaaatacagattttggaagaaacgaattagcagtcacaacagcagggttgttcctgttgtctctggcattcagcttgaagttactacaggtcagcccggccagcagtcaggaaggaaagctggaagagaagtggaggggaacagagacaaactggaaggcagaatggcccactaggacagaccgaaacccacttctgtctctcacttcctctggcctcaatagtgctggtctcccgctttggctctgaagcacatgcacctgccccaggactcggaggagctgcacacgggcacccagcagaagctgatgttgctgcggccctgccccagactctgagttaagccagaagatatctattgaaatcgagactcctacccagatatctttagtggatgaagcatcaggagagaaggaagagattgttgtgactctcttaccagctggtcactgtccgggatcagttatgtttttatttcagggcaataatggaactgtcctgtacacaggagacttcagattggcgcaaggagaagctgctagaatggagcttctgcactccgggggcagagtcaaagacatccaaagtgtatatttggatactacgttctgtgatccaagattttaccaaattccaagtcgggaggagtgtttaagtggagtcttagagctggtccgaagctggatcactcggagcccgtaccatgttgtgtggctgaactgcaaagcggcttatggctatgaatatctgttcaccaaccttagtgaagaattaggagtccaggttcatgtgaataagctagacatgtttaggaacatgcctgagatccttcatcatctcacaacagaccgcaacactcagatccatgcatgccggcatcccaaggcagaggaatattttcagtggagcaaattaccctgtggaattacttccagaaatagaattccactccacataatcagcattaagccatccaccatgtggtttggagaaaggagcagaaaaacaaatgtaattgtgaggactggagagagttcatacagagcttgtttttcttttcactcctcctacagtgagattaaagatttcttgagctacctctgtcctgtgaacgcatatccaaatgtcattccagttggcacaactatggataaagttgtcgaaatcttaaagcctttatgccggtcttcccaaagtacggagccaaagtataaaccactgggaaaactgaagagagctagaacagttcaccgagactcagaggaggaagatgactatctctttgatgatcctctgccaatacctttaaggcacaaagttccatacccggaaacttttcaccctgaggtattttcaatgactgcagtatcagaaaagcagcctgaaaaactgagacaaaccccaggatgctgcagagcagagtgtatgcagagctctcgtttcacaaactttgtagattgtgaagaatccaacagtgaaagtgaagaagaagtaggaatcccagcttcactgcaaggagatctgggctctgtacttcacctgcaaaaggctgatggggatgtaccccagtgggaagtattctttaaaagaaatgatgaaatcacagatgagagtttggaaaacttcccttcctccacagtggcagggggatctcagtcaccaaagcttttcagtgactctgatggagaatcaactcacatctcctcccagaattcttcccagtcaacacacataacagaacaaggaagtcaaggctgggacagccaatctgatactgttttgttatcttcccaagagagaaacagtggggatattacttccttggacaaagctgactacagaccaacaatcaaagagaatattcctgcctctctcatggaacaaaatgtaatttgcccaaaggatacttactctgatttgaaaagcagagataaagatgtgacaatagttcctagtactggagaaccaactactctaagcagtgagacacatatacccgaggaaaaaagtttgctaaatcttagcacaaatgcagattcccagagctcttctgattttgaagttccctcaactccagaagctgagttacctaaacgagagcatttacaatatttatatgagaagctggcaactggtgagagtatagcagtcaaaaaaagaaaatgctcactcttagatacctaagaattcaaagcgtttcaacctagagcaaccactaaaaaacctgcacagagatgacagtcaatattacaatagagaaaatacagtacttaaaaatgttcaaataacctggttgggtgtggtggctcacacttgtaatcccagcactttgaggtgggcaatggcttgagcccaggagttcgacaccagcctggccaacacagtgaaatgtgtctctacttacaaaaaaaaaaaaaaaaaaaaaagccaggcatggtggtgggctactctggaggcccttgaggatcacttgagcccaggagattgaggctgcagtgagccatgactgtgccactgcacctctagtctgggtgacagagcaagaccctgtttaaaaaagaaaaaggccaggcacggtggctcatgcctgtaatcccagctacgcaggaggccaaggcaggagaatcacttgaacctgggaggtggtggttgcagtgagctgagattgtgtcattgcactccagcctgggcaacaagagcaaaactctgtctcaaaaaaaaaaaaaaaaaaaaagaaaaaaaaatggtagaactaaacccatacgtatcaatgattacattaaatgtaaatggtctaagtgcatcaatgacaagagacacggaaaaaaccaacataacccagtgatctgctgtctataaagaaagtcaattcaagtgattgataggttaaaaggatggaaaaaccatgtaaacaattaaaaatggagtggttatatggacagtttcctaatgataaaaggtctagttcaccaagaagacaaaataatcctaaacgtatatgcacctaacagctccaaaaatttatgaagctagaacagctgaaaagagacaaactaatgcacaattacagctagggattaatttaacatccctccttagtaacagaactagtatatacacattaatcagtaagaatatagaactgaaaatcataagccgactggattaaattgacatttatagaacacaccaccccaaactagcagaatgtatctcctgaagtacacatggaacattcagcatgatcatatctttgctcataaacacacctgatttaaattgacaaacttggatctagtatgataaactgatggctatagacaaaatcagcaccttatttatccccaaagatgttaagtcacttaaccttgatgtgaatacggtggccaaattagaagcggacaattagaatataaaagaaaatgctcaagaattaaatggtggccaggcacagtaactcctgcctgcaatcccagtactttgggaggctcgcttgagctcagggttttgagtccagcctgggcaacacacagggagaccctgtctccacaaaatgttagccagacatggtggtgtgcacctgtagtcctcgctacttggaaggcttaggtggcaggatggattgagcccaggaggttgaaactgcagtgagctgattgtgcccagcctgggcaacaaagcaagaccccatctcaagaaaaataaattaaaaaaaactaaa

SEQ ID NO: 2078 - DNA, 3645 bp, Homo sapiens
gcttcccggaagtggcggcgcggtcagggctggccttggcttcagctgcggttttggggtcccggactctgggatcggcggcgctatgagttctttcgaggggcagatggccgagtatccaactatctccatagaccgcttcgatagggagaacctgagggcccgcgcctacttcctgtcccactgccacaaagatcacatgaaaggattaagagcccctaccttgaaaagaaggttggagtgcagcttgaaggtttatctatactgttcacctgtgactaaggagttgttgttaacgagcccgaaatacagattttggaagaaacgaattatatctattgaaatcgagactcctacccagatatctttagtggatgaagcatcaggagaggtttttatttcagggcaataatggaactgtcctgtacacaggagacttcagattggcgcaaggagaagctgctagaatggagcttctgcactccgggggcagagtcaaagacatccaaagtgtatatttggatactacgttctgtgatccaagattttaccaaattccaagtcgggaggagtgtttaagtggagtcttagagctggtccgaagctggatcactcggagcccgtaccatgttgtgtggctgaactgcaaagcggcttatggctatgaatatctgttcaccaaccttagtgaagaattaggagtccaggttcatgtgaataagctagacatgtttaggaacatgcctgagatccttcatcatctcacaacagaccgcaacactcagatccatgcatgccggcatcccaaggcagaggaatattttcagtggagcaaattaccctgtggaattacttccagaaatagaattccactccacataatcagcattaagccatccaccatgtggtttggagaaaggagcagaaaaacaaatgtaattgtgaggactggagagagttcatacagagcttgtttttcttttcactcctcctacagtgagattaaagatttcttgagctacctctgtcctgtgaacgcatatccaaatgtcattccagttggcacaactatggataaagttgtcgaaatcttaaagcctttatgccggtcttcccaaagtacggagccaaagtataaaccactgggaaaactgaagagagctagaacagttcaccgagactcagaggaggaagatgactatctctttgatgatcctctgccaatacctttaaggcacaaagttccatacccggaaacttttcaccctgaggtattttcaatgactgcagtatcagaaaagcagcctgaaaaactgagacaaaccccaggatgctgcagagcagagtgtatgcagagctctcgtttcacaaactttgtagattgtgaagaatccaacagtgaaagtgaagaagaagtaggaatcccagcttcactgcaaggagatctgggctctgtacttcacctgcaaaaggctgatggggatgtaccccagtgggaagtattctttaaaagaaatgatgaaatcacagatgagagtttggaaaacttcccttcctccacagtggcagggggatctcagtcaccaaagcttttcagtgactctgatggagaatcaactcacatctcctcccagaattcttcccagtcaacacacataacagaacaaggaagtcaaggctgggacagccaatctgatactgttttgttatcttcccaagagagaaacagtggggatattacttccttggacaaagctgactacagaccaacaatcaaagagaatattcctgcctctctcatggaacaaaatgtaatttgcccaaaggatacttactctgatttgaaaagcagagataaagatgtgacaatagttcctagtactggagaaccaactactctaagcagtgagacacatatacccgaggaaaaaagtttgctaaatcttagcacaaatgcagattcccagagctcttctgattttgaagttccctcaactccagaagctgagttacctaaacgagagcatttacaatatttatatgagaagctggcaactggtgagagtatagcagtcaaaaaaagaaaatgctcactcttagatacctaagaattcaaagcgtttcaacctagagcaaccactaaaaaacctgcacagagatgacagtcaatattacaatagagaaaatacagtacttaaaaatgttcaaataacctggttgggtgtggtggctcacacttgtaatcccagcactttgaggtgggcaatggcttgagcccaggagttcgacaccagcctggccaacacagtgaaatgtgtctctacttacaaaaaaaaaaaaaaaaaaaaaagccaggcatggtggtgggctactctggaggcccttgaggatcacttgagcccaggagattgaggctgcagtgagccatgactgtgccactgcacctctagtctgggtgacagagcaagaccctgtttaaaaaagaaaaaggccaggcacggtggctcatgcctgtaatcccagctacgcaggaggccaaggcaggagaatcacttgaacctgggaggtggtggttgcagtgagctgagattgtgtcattgcactccagcctgggcaacaagagcaaaactctgtctcaaaaaaaaaaaaaaaaaaaaagaaaaaaaaatggtagaactaaacccatacgtatcaatgattacattaaatgtaaatggtctaagtgcatcaatgacaagagacacggaaaaaaccaacataacccagtgatctgctgtctataaagaaagtcaattcaagtgattgataggttaaaaggatggaaaaaccatgtaaacaattaaaaatggagtggttatatggacagtttcctaatgataaaaggtctagttcaccaagaagacaaaataatcctaaacgtatatgcacctaacagctccaaaaatttatgaagctagaacagctgaaaagagacaaactaatgcacaattacagctagggattaatttaacatccctccttagtaacagaactagtatatacacattaatcagtaagaatatagaactgaaaatcataagccgactggattaaattgacatttatagaacacaccaccccaaactagcagaatgtatctcctgaagtacacatggaacattcagcatgatcatatctttgctcataaacacacctgatttaaattgacaaacttggatctagtatgataaactgatggctatagacaaaatcagcaccttatttatccccaaagatgttaagtcacttaaccttgatgtgaatacggtggccaaattagaagcggacaattagaatataaaagaaaatgctcaagaattaaatggtggccaggcacagtaactcctgcctgcaatcccagtactttgggaggctcgcttgagctcagggttttgagtccagcctgggcaacacacagggagaccctgtctccacaaaatgttagccagacatggtggtgtgcacctgtagtcctcgctacttggaaggcttaggtggcaggatggattgagcccaggaggttgaaactgcagtgagctgattgtgcccagcctgggcaacaaagcaagaccccatctcaagaaaaataaattaaaaaaaactaaa

SEQ ID NO: 2079 - DNA, 4206 bp, Homo sapiens
tcagtcttatacttccacttaagtcttctcgccggatgctttttcctccttgcttttgccggaaaggagagagatacatgtgaaggatatctgtcctcgttgcttcccctgccctctcaaaagtttaacttctgtgggaatgtgtatcttccttttctggaccatttgacagtcccgccccagccgccgtgtgatttagcaaccggtatcatattcagatcaaatcttaaaaaaaaaaagtcacctacagaactacagaattgttctctcccgctcaagaagggcaagtggactttggcgttaagatgcaggggggtgaaccagtgtccacaatgaaagtctcggagagcgaaggaaagctggagggccaggccacagcggtgaccccgaacaagaacagcagctgtggaggtggaatcagtagcagcagcagcagccgcggtggcagtgcaaaaggctggcagtacagtgatcacatggaaaatgtgtatggctatttaatgaagtataccaaccttgtcactgggtggcagtacaggttttttgttttaaacaatgaagctgggctgttggagtactttgtgaatgaacagtctagaaatcagaaacctagaggaactttgcagcttgcaggagctgtaatatcacccagtgatgaggattctcacaccttcactgtaaacgctgccagtggggaacaatataaactcagagctacagatgcaaaagagcgacagcactgggttagcagacttcagatatgtacacagcatcatactgaagctattggaaagaataatcctcctctgaagtcacggagcttctcacttgcatctagtagtaattctcctatatcgcagaggagaccaagtcaaaatgccatttctttttttaatgttggacattccaaactgcaatcactgagcaaaagaactaatttacctccagaccatcttgtggaagtcagagaaatgatgtctcatgctgaaggacaacaaagagacttaattagacgaattgaatgccttcctacttctggccatcttagttccttggaccaggatctcttaatgctcaaagctacttccatggcaactatgaactgcttaaatgactgctttcatattctccagttacagcatgcatcacatcagaagggctcattgccttcaggaacgacaatcgagtggttagaaccaaagatatctttatcaaaccactataaaaatggagctgaccagccctttgcaactgatcagagtaagccggtggcagtcccagaagagcagcctgttgcagaatctggactattagcgagggagcctgaagaaataaatgcagatgatgagatagaggatacatgtgaccacaaagaggatgacctgggagctgtagaagaacaacgtagtgtcatcctacatctcttgtcacagcttaagctgggcatggatttaacaagagtggtgcttcctacatttatcctagagaagcgttccttgctggaaatgtatgcagactttatgtctcatccagacctatttatagccatcactaatggagccacagctgaggacagaatgattcgctttgttgagtactaccttacctcatttcatgaaggccgtaagggagccattgctaaaaaaccatacaatcctatcattggagaaacatttcactgttcctggaagatgccaaaaagcgaggtagcatccagtgtttttagcagttcttccacccagggagtcacaaatcatgctcctttatcgggggagtctttgacccaggtgggatcagactgttacacagtcagatttgttgctgagcaggtttctcatcatcctccagtctcaggattttatgcagaatgtacagagaggaagatgtgtgtaaatgcgcatgtctggactaagagcaagttcttaggcatgtcaataggcgtgacaatggttggagaaggtatccttagtctgttggagcatggagaagagtacacattttctctaccctgtgcatatgctcggtcaattttgactgttccttgggtagaactgggtggcaaagtcagtgtcaactgtgcaaaaactggatattcagccagcatcacttttcataccaagccattttatggtggcaaactgcatcgggttacagctgaagtaaagcacaacatcaccaacactgtggtatgcagagtgcaaggggaatggaatagtgttcttgagttcacatatagcaatggagagacaaagtatgtggacttgactaaattggcagtgacgaagaaaagagtgagacctctggagaagcaggatccatttgaatccaggcgattgtggaaaaatgtgacagactcgctgagagaatctgaaattgataaggccacagagcataagcataccctggaagaacgtcagaggactgaagaaaggcatcgtactgaaacaggcacaccttggaaaaccaaatattttattaaagagggagatggctgggtttatcataaaccactttggaaaataattccaacaacacaaccagcagagtgacacatactatctaaaactcgaccaaatgaggttcttctctgtttaccctaaatcctcccagaatggagtcattgcactgagtgacctgcttcctgattgcgcagactgaaactagctaaacctgaatgtacctactagggcaccataatactgcagcaagaccaaagtggtaaagaaacacagtggaccttttaccaacctgttcatgtgatgtgagcaataccatcttaaaacttgttacctgaatcagtagatgaatcttttatccagttcttgctcctaaagttaagtttgaatcccctatttttgcacaggggcagcagatacacacaacaatgagaactcagtgactttgatttctttgtagtgaaaagtgaagtctccgtttcagagtttgtgtctttctttctgtccataactgaagtattcactactcttgtaaaccaaccaagaggaggagaaagatgacccagaagtggattcagccattgtgcctgaaatcagtgtttaaaaaaaaaaatcaaccaggttgtggtaacaaggcattctatttcttcaaaaagactgtatgcctgtgtctgaggaacttacctattatccacctctgttggaactctcttttaaaaagtacatttatagattgatcagaattataaccatggagaattttttcttctgagcattttaatatacttgaaaacaacattgacttgaaaaatttcagaacatttttcagtacctagttttattaaatattacacttgagagacactttttaaaaatgtgttaatgtcaatatgatgagattttagcctttctccagaactaaggcattaaagaaaatagcaaatattaaaaaataaaactgttacttttttccttctttcttttcacctttaggttaatatccagtattatgtgttatccctttggataagtatgctttattttacctctgttaaaaattaaaataaatgattctattcatatttgtcagtaattcaaaacttatatgtgtaactgaacgcgcatgtaaggtatggttttatttattttttttttttttgaggaaatttaaatgctaaagaaacaacgaaatgaaaaggtatcaggaaaaaaagatcaggaagttgtattcaggtacaaatctttttttaaataagtattttgttgaggttgaagaattgctggcaattaaaagaatagagctaattatggctttcatcattcattcatgtatttattgagcacctacttattatggtgctcaacacttgttactgcaagctaccttaatttcccaagagtggtgccttactctgttttttctgatatggtcttccaatcagtgtgtgtaacatacctgttgtttatcagccattgtaggtggctgtgtctgttgcatcatcataagaagtttaagctttgtgctctgataaattgtgttctgttaaagaggttagtaggatgaaaacagcaaaacaataattttttcaacaaattgtaaattataagaaaaagagttggtttgtgtacaacaattttaatgattcccttgttcatttttgctgtgaaatgcactgaaaaaaatcctcaaaatgagttatagttcctgtgttgggaaaattgacaaataataaaactagagaacaaacaa

SEQ ID NO: 2080 - DNA, 1085 bp, Homo sapiens
gggctagcggcctgggttgggctttgtagctgctccgcaggcccagcccgggccgcgctcgcagagtcctaggcggtgcgcggcctcctgcctcctccctcctcggcggtcgcggcccgccggcctccgcggtgcctgccttcgctctcaggttgaggagctcaagcttgggaaaatggtgtgcattccttgtatcgtcattccagttctgctctggatctacaaaaaattcctggagccatatatataccctctggtttcccccttcgttagtcgtatatggcctaagaaagcaatacaagaatccaatgatacaaacaaaggcaaagtaaactttaagggtgcagacatgaatggattaccaacaaaaggaccaacagaaatctgtgataaaaagaaagactaaagaaattttcctaaaggaccccatcatttaaaaaatggacctgataatatgaagcatcttccttgtaattgtctctgacctttttatctgagaccggaattcaggataggagtctagatatttacctgatactaatcaggaaatatatgatatccgtatttaaaatgtagttagttatatttaatgacctcattcctaagttcctttttcgttaatgtagctttcatttctgttattgctgtttgaataatatgattaaatagaaggtttgtgccagtagacattatgttactaaatcagcactttaaaatctttggttctctaattcatatgaatttgctgtttgctctaatttctttgggctcttctaatttgagtggagtacaattttgttgtgaaacagtccagtgaaactgtgcagggaaatgaaggtagaattttgggaggtaataatgatgtgaaacataaagatttaataattactgtccaacacagtggagcagcttgtccacaaatatagtaattactatttattgctctaaggaagattaaaaaaagatagggaaaagggggaaacttctttgaaaaatgaaacatctgttacattaatgtctaattataaaattttaatccttactgcatttcttctgttcctacaaatgtattaaacattcagttt

SEQ ID NO: 2081 - DNA, 3642 bp, Homo sapiens
ggcacgagctttggctggctagggaggggatgcaatgatataaacatttatcccctgatacctcatgttaaaatctgatgcccactgtgggacgtggggcctaatggccaccatttgggtcatggtgaccaatcttttatgaatagagagatactgccctctcttgggaatgaatgaattgttgctttattattttccaagagagctagttgttaaaaagaccctggcaacttcctactctctctgttcctctgttaccatgtgttctctgcatataccagctcacctttgtcttctgccatgagtggaagcagcctgaggccctcactaaatgcgcaaacatttccagacatcagaatcttgagccacatgaaccttgtttatataaattagtcagtctcagacatttctttatagcaacacaaaatggaaaaagataacactcgcatcacaggtatgtgtctctggcagctagccaccgttcttaagatatccaggatccactcagccaagagtcttctcatcagtactctaaagacacttatcactcaagagagtctaaggtttttaggagaaaccagggacaaagtctaaatgtttttgtgataactcagattgcccacttttctttgaccacatatcttttacaggaaaaaggattgtaacagtaaagaggtattggcatattatcagagtctcatccattcattcaaaattaggccagtttatcatcctcttgtatgaatatgtctcccagaatgaaatcactcagctttgctgacaacactcaatcttaccaggttccaaaaacaagaatggtctcagggacatacagcttcactcttttaggcatccagtataattgacctaagtgacaatatcttctcttgctcacaccacctttgaggagttaagctaatattgaatttttctcattatataaccctttgatttattcacttgccctcagccactattcctccctctgtccctttatatcagttgtttccaggtttgggagtgacattaggtttgtctgctgggctggcctagactgcaggcagcaatagtattctagcatgtcttccctcagtctagtcttgatcatagagggtaggttatataggtaaggaactagtgggggctatcaagaccaccaggctatataactctacttactgttaatcctaacttttccagatgaaatgaatacttgagaattcttacataaaggtataaaaatatagttatggtttttggcttagggataattcctgtttctggcacttttatttacatccctattcctggtactatggcataacatatgaaaaaataaatttgaggtgaagtgtagtctttattccagcatcctctcctcttcagaagaattgtatgtatcgtcataacagcatcgtcctgatccatcaggtaaaagagaggatgctacctagtggagttattcttgcagccccactcatgttgacagcgagcacattcatgaagatataaaagccagtccttcatgtttatattgcccaacaattagattggcagtttttagacaaacaatgtttcaattgaccatttcaattttctatcaaattttcccctgaggaggacatgtccctctgcattgttggccatttgaggctgtaaagtgtgttttcttgtgtaaagaagtgtgactcggcagtccaaattggtgcaatctcttcttttctggttcttgtatagcccttgaagcattgacatctacccctggttgagcatagcccaatccagagtcagtgattttcctgtcaagatccattggcagctcctttggggttgctggcatcattctggcttgccaggtattatgatcaaagccttcccactagagaatctgtcacatctccatctgctgcctctgtctgttttcttgaccaacagtgaaaaaagagattatgagaaataagataaattaccaaaattgtgaacaaaagagagattatcactaatgacccttaggaagttaaaaaacattataagtgaatactctgaaaaacctgaagccaataagttagaccacttggataaaaaggaccaattcgtgcagagatagaaattgccaaaactgacccaaattaactggaaaacctgaagagaactgtgaactaagtcagaaattgaaaaaccttctcaaaaagaaatgccaaagcccagatatcttcactggtgaattctatcaaatattttgaaagctctttcagacaagaagagaggagggaagactttccagcccatttacagaactggcattaccctcatatcaaagtcacagcaagactcacaggaaaagagtgccatacaccagtgtcaccaataaacataaatgaaaacatccttaacaaacattggcagataatacaaagccacataaaaaaggattacactccatgaccaatgggattcatcccaggaacatatggttggattaacatttgaaaatcagttcatggaatgcactgtattaatggaaaaaaagacataattatctcaaaagatgcaggagaaacagttgacaaaaatgttaacatcactcatgttcataagtttcaacaaaataggaatggaggagaccttcttcactctgataaagggcgtctataaaaaacccacagctaaaatcaaacttaatgaagaaagactgaagactgaatgcttttctcctaagatggggatcaatgcaaggatgtccaatcccaccacttttatttaatattatactggagattgtatccagtgcaataaggcagaaaattaaaaattaaaggcatccagataaaaaggaaaacatacaattctattcacagataacatgaccctgtctgtagaattcacaagcagataaaaactggctagcactaataaatgaatccagaagggcccataggatatcaaatcaatataaaaattaattattaacatatttctctatagaagcaatgaaaatctcaactttcctatcacagtagttaccagaagagcgaaataggaataaatttaggaagacagcagtgtttgttcactgaaaataaaaaaacattcctcagagaaattaaaggtctaaataaatggagagatgcgagttggaaagctcgataatactgttaagatggcagttctcccccagtagatctataggttcaacacaatccctatcaaaatcccagcaggattttatagaaaattgacaaaataggccgggcgcggtggctcatgccggtaatcccagcactttgggaggctgaggcgggcggatcatgagatcaggagatccagaccatcctggctaacacggtgaaaccccgtctctactaaaaatacaaaaaattagccgggcgtggtggcaggctcctcgggaggctgaggcagaaaaatggcatgaacccggtaggcagaagttgcagtgagcggagatcgtgccactgcactccagcctgggtgacagagcgagactccgtctcaaaaaaaaaaaaaaaaaaaaagaaaagaaaaaaagaaaagaaaattgacaaaataatcctaaaaatgtatatgaaaatgcagaggatgcagaagggccaacacaaatttggaaaaaaaaaaaaaaaaaaa

SEQ ID NO: 2082 - DNA, 2374 bp, Homo sapiens
gtcatgcagtgcgccggagaactgtgctctttgaggccgacgctaggggcccggaaggaaactgcgaggcgaaggtgaccggggaccgagcatttcagatctgctcggtagacctggtgcaccaccaccatgttggctgcaaggctggtgtgtctccggacactaccttctagggttttccacccagctttcaccaaggcctcccctgttgtgaagaattccatcacgaagaatcaatggctgttaacacctagcagggaatatgccaccaaaacaagaattgggatccggcgtgggagaactggccaagaactcaaagaggcagcattggaaccatcgatggaaaaaatatttaaaattgatcagatgggaagatggtttgttgctggaggggctgctgttggtcttggagcattgtgctactatggcttgggactgtctaatgagattggagctattgaaaaggctgtaatttggcctcagtatgtcaaggatagaattcattccacctatatgtacttagcagggagtattggtttaacagctttgtctgccatagcaatcagcagaacgcctgttctcatgaacttcatgatgagaggctcttgggtgacaattggtgtgacctttgcagccatggttggagctggaatgctggtacgatcaataccatatgaccagagcccaggcccaaagcatcttgcttggttgctacattctggtgtgatgggtgcagtggtggctcctctgacaatattagggggtcctcttctcatcagagctgcatggtacacagctggcattgtgggaggcctctccactgtggccatgtgtgcgcccagtgaaaagtttctgaacatgggtgcacccctgggagtgggcctgggtctcgtctttgtgtcctcattgggatctatgtttcttccacctaccaccgtggctggtgccactctttactcagtggcaatgtacggtggattagttcttttcagcatgttccttctgtatgatacccagaaagtatcaagcgtgcagaagtatcaccaatgtatggagttcaaaaatatgatcccattaactcgatgctgagtatctacatggatacattaaatatatttatgcgagttgcaactatgctggcaactggaggcaacagaaagaaatgaagtgactcagcttctggcttctctgctacatcaaatatcttgtttaatggggcagatatgcattaaatagtttgtacaagcagctttcgttgaagtttagaagataagaaacatgtcatcatatttaaatgttccggtaatgtgatgcctcaggtctgcctttttttctggagaataaatgcagtaatcctctcccaaataagcacacacattttcaattctcatgtttgagtgattttaaaatgttttggtgaatgtgaaaactaaagtttgtgtcatgagaatgtaagtcttttttctactttaaaatttagtaggttcactgagtaactaaaatttagcaaacctgtgtttgcatatttttttggagtgcagaatattgtaattaatgtcataagtgatttggagctttggtaaagggaccagagagaaggagtcacctgcagtcttttgtttttttaaatacttagaacttagcacttgtgttattgattagtgaggagccagtaagaaacatctgggtatttggaaacaagtggtcattgttacattcatctgctgaacttaacaaaactgttcatcctgaaacaggcacaggtgatgcattctcctgctgttgcttctcagtgctctctttccaatatagatgtggtcatgtttgacttgtacagaatgttaatcatacagagaatccttgatggaattatatatgtgtgttttacttttgaatgttacaaaaggaaataactttaaaactattctcaagagaaaatattcaaagcatgaaatatgttgctttttccagaatacaaacagtatactcatgaattgctaagtgtttttttatttttgcatatttattgaactgtctaattgaatacagcttgctcttgtcacctcttcaagctttcaagcctttatagaaaagcttctttgtggcttacactggaaattatgaaagcagtttttctcctaagacttttggtttctcgcattgcctctcagactaagcactaaaaagcaaagcaaaacagaactagttctgtcttaatgaaatatatcaacccaaaagtgtaatgaggaaaatgcttcattagtttcccctagcagacttttacttctcttacactgctacaccattactttcttgagacatttgtaagtcctttgatacagaagagttatatttaggaggctttaatgaaggg

SEQ ID NO: 2083 - DNA, 2392 bp, Homo sapiens
gcggagcgcgcgctcccagcgaaagcagcagggcagggatctgcgttggaggaagggactgctctggtgctagaatgctgtgcgtcggaaggctgggcggcttgggagccagagcagcagctctgccgccccgccgggcgggccggggaagcctcgaagccgggatccgggcccgaagggtcagcaccagctggtctcccgtgggcgccgccttcaatgtcaagccccagggcagccgcttggacctgttcggcgagcgggcgcgtctttttggagttcctgagctgagtgccccagaaggatttcatattgcacaagaaaaagccttgagaaagacagaattgcttgtggaccgtgcatgttccaccccacctgggccccagaccgtgctgatcttcgatgagctctcggattccttatgcagagtggccgacttggctgattttgtgaaaatcgctcaccctgagccagcattcagagaagctgcggaagaagcttgtagaagtattggcaccatggtagagaagttgaacacaaatgtggatttatatcaaagtttgcaaaaattactagctgataaaaaacttgtggattcccttgatccagaaacaaggcgagtggctgaactgtttatgtttgattttgaaattagtggaatccatctagacaaacaaaagcgtaaaagagcagtggacctcaatgttaaaatcttggatttgagtagtacatttcttatgggaaccaattttcccaacaagattgagaagcatctcttaccagaacacattcgtcgtaactttacatctgctggggatcatatcataattgatggtctccacgcagaatcaccagatgacttggtgcgagaagctgcttataaaatttttctttatcccaatgctggtcaattgaaatgtttagaagaattgctcagcagcagagatcttctggcaaagttggtggggtattccacgttttctcacagggctctccaaggaacgatagctaaaaatccagagactgtcatgcagttccttgaaaaactatctgacaaactttctgaaagaactctgaaagattttgagatgatacgagggatgaaaatgaaactgaatgctcaaaattccgaagtaatgccctgggaccccccttactacagtggtgtgattcgtgcagaaaggtataatattgagcccagcctatattgcccgtttttctctcttggagcatgcatggaaggcctgaatattttgcttaacagactgttggggatttcattatatgcagagcagcctgcaaaaggagaggtgtggagcgaagatgtccgaaaactggctgttgttcatgaatctgaaggattgttggggtacatttactgtgatttttttcagcgagcagacaaaccacatcaggattgccatttcactatccgtggaggcagactaaaggaagatggagactatcaactcccacttgtagttcttatgctgaatcttccccgttcctcaaggagttctccaactttgctaactcctggcatgatggaaaatcttttccatgaaatgggacatgccatgcattcaatgctaggacgtactcgttaccaacacgtcactgggaccaggtgccctactgattttgctgaggttccttctattctgatggagtactttgcaaatgattatcgagtagttaaccaatttgccagacattatcagactggacagccactgccaaaaaatatggtgtctcgtctttgtgaatctaaaaaggtttgtgctgcagctgatatgcaacttcaggtcttttatgccactctggatcaaatctaccatgggaagcatcccctgaggaattcaaccacagacattctcaaggaaacacaagagaaattctatggcctaccatatgttccaaatactgcctggcagctgcgattcagccacctcgtggggtatggtgctagatattactcttacctcatgtccagagcggtcgcctccatggtttggaaggagtgttttctacaggatcctttcaacagggctgccggggagcgctatcgcagggagatgctggcccacggtggaggcagggagcccatgctcatggttgaaggtatgcttcagaagtgtccttctgttgatgacttcgtaagtgccctcgtttccgacttggatctggacttcgaaactttcctcatggattctgaataaaagaaacactctacacctctaatcaaggtcatgtagtaatgactttgttataaatgctacagctgtgagagcttgtttctgattgtttcattgttcgcttctgtaattctgaaaaactttaaactggtagaacttggaataaataatttgttttaattaaaaaaaaaaaaaaaaaa

SEQ ID NO: 2084 - DNA, 1407 bp, Homo sapiens
ctctccccggcccgatccgcccgccggctccccctcccccgatccctcgggtcccgggatgggggggcggtgaggcaggcacagccccccgcccccatggccgcccgtcggagccagaggcggagggggcgccggggggagccgggcaccgccctgctggtcccgctcgcgctgggcctgggcctggcgctggcctgcctcggcctcctgctggccgtggtcagtttggggagccgggcatcgctgtccgcccaggagcctgcccaggaggagctggtggcagaggaggaccaggacccgtcggaactgaatccccagacagaagaaagccaggatcctgcgcctttcctgaaccgactagttcggcctcgcagaagtgcacctaaaggccggaaaacacgggctcgaagagcgatcgcagcccattatgaagttcatccacgacctggacaggacggagcgcaggcaggtgtggacgggacagtgagtggctgggaggaagccagaatcaacagctccagccctctgcgctacaaccgccagatcggggagtttatagtcacccgggctgggctctactacctgtactgtcaggtgcactttgatgaggggaaggctgtctacctgaagctggacttgctggtggatggtgtgctggccctgcgctgcctggaggaattctcagccactgcggcgagttccctcgggccccagctccgcctctgccaggtgtctgggctgttggccctgcggccagggtcctccctgcggatccgcaccctcccctgggcccatctcaaggctgcccccttcctcacctacttcggactcttccaggttcactgaggggccctggtctccccgcagtcgtcccaggctgccggctcccctcgacagctctctgggcacccggtcccctctgccccaccctcagccgctctttgctccagacctgcccctccctctagaggctgcctgggcctgttcacgtgttttccatcccacataaatacagtattcccactcttatcttacaactcccccaccgcccactctccacctcactagctccccaatccctgaccctttgaggcccccagtgatctcgactcccccctggccacagacccccagggcattgtgttcactgtactctgtgggcaaggatgggtccagaagaccccacttcaggcactaagaggggctggacctggcggcaggaagccaaagagactgggcctaggccaggagttcccaaatgtgaggggcgagaaacaagacaagctcctcccttgagaattccctgtggatttttaaaacagatattatttttattattattgtgacaaaatgttgataaatggatattaaatagaataagtcataaaaaaaaaaaaaaaaaaaaaa

SEQ ID NO: 2085 - DNA, 1642 bp, Homo sapiens
ctctccccggcccgatccgcccgccggctccccctcccccgatccctcgggtcccgggatgggggggcggtgaggcaggcacagccccccgcccccatggccgcccgtcggagccagaggcggagggggcgccggggggagccgggcaccgccctgctggtcccgctcgcgctgggcctgggcctggcgctggcctgcctcggcctcctgctggccgtggtcagtttggggagccgggcatcgctgtccgcccaggagcctgcccaggaggagctggtggcagaggaggaccaggacccgtcggaactgaatccccagacagaagaaagccaggatcctgcgcctttcctgaaccgactagttcggcctcgcagaagtgcacctaaaggccggaaaacacgggctcgaagagcgatcgcagcccattatgaagttcatccacgacctggacaggacggagcgcaggcagatggaggttacacaacttgtctgaggccatgagatactaagtggtggagccaagatttgaacccagctagaatgtgcctgtgtactggacatggtctgcatgaaaggcgaggtggctggtgcaggggtgaggggtccatgcaggggccacatccaaaaaggggagagggaagtttccagaaagaagagaggacacatctcccaccattaccagagggtcaaaggagaacaagagaccaggtgtggacgggacagtgagtggctgggaggaagccagaatcaacagctccagccctctgcgctacaaccgccagatcggggagtttatagtcacccgggctgggctctactacctgtactgtcaggtgcactttgatgaggggaaggctgtctacctgaagctggacttgctggtggatggtgtgctggccctgcgctgcctggaggaattctcagccactgcggcgagttccctcgggccccagctccgcctctgccaggtgtctgggctgttggccctgcggccagggtcctccctgcggatccgcaccctcccctgggcccatctcaaggctgcccccttcctcacctacttcggactcttccaggttcactgaggggccctggtctccccgcagtcgtcccaggctgccggctcccctcgacagctctctgggcacccggtcccctctgccccaccctcagccgctctttgctccagacctgcccctccctctagaggctgcctgggcctgttcacgtgttttccatcccacataaatacagtattcccactcttatcttacaactcccccaccgcccactctccacctcactagctccccaatccctgaccctttgaggcccccagtgatctcgactcccccctggccacagacccccagggcattgtgttcactgtactctgtgggcaaggatgggtccagaagaccccacttcaggcactaagaggggctggacctggcggcaggaagccaaagagactgggcctaggccaggagttcccaaatgtgaggggcgagaaacaagacaagctcctcccttgagaattccctgtggatttttaaaacagatattatttttattattattgtgacaaaatgttgataaatggatattaaatagaataagtcataaaaaaaaaaaaaaaaaa

SEQ ID NO: 2086 - DNA, 993 bp, Homo sapiens
gcggtggcgcgagttggactgtgaagaaacatggcggccgcgacgttgacttcgaaattgtactccctgctgttccgcaggacctccaccttcgccctcaccatcatcgtgggcgtcatgttcttcgagcgcgccttcgatcaaggcgcggacgctatctacgaccacatcaacgagggggtgagggcctgtgccatccctgaccttggacccgcctgaggggtgacagtggagtagagaagctgtggaaacacatcaagcacaagtatgagaacaagtagttccttggaggcccccatccaggccagaaggaccaggtccacccagcagctgtttgcccagagctggagcctcagcttgaagatgatgctcaaggtactcttcatggaccaccattcgctgttggcaagaaacggctttacttacaaaacagactctttaccttctgctgtgtttgaagtatgtttagtcagcatgctcaggaaataaatgtgaattgcccttgagacctgcttctacattggttgctttgttaactctacctgatcttcacttgtcagtaatttgagaccacttcaaagccctctgcaaacaccccaaaggcagaatctgctattttgagttttccattaacttccaaagaattctggttttcaaaacaggagccagagttggagatattacagtcaactttggcttctaagccagtaattccattcttaaatacctcactgtcttggccatggggaagcactatggcctcagctgggggaaagaccctggcctaggggtcttagccactccccaccctagggtatagttcaggggtatccaatcctttggcttccctgggccatgttggaagaattgtcttgggccacacataaaatacagtaaccatagctgatgagctaaaacaaaaaacaatggtttgtgcaaaaatctcataatgttttaataaagttgaagaatttgaaaaaaaaaaaaaaaaaa

SEQ ID NO: 2087 - DNA, 934 bp, Homo sapiens
gcggtggcgcgagttggactgtgaagaaacatggcggccgcgacgttgacttcgaaattgtactccctgctgttccgcaggacctccaccttcgccctcaccatcatcgtgggcgtcatgttcttcgagcgcgccttcgatcaaggcgcggacgctatctacgaccacatcaacgaggggaagctgtggaaacacatcaagcacaagtatgagaacaagtagttccttggaggcccccatccaggccagaaggaccaggtccacccagcagctgtttgcccagagctggagcctcagcttgaagatgatgctcaaggtactcttcatggaccaccattcgctgttggcaagaaacggctttacttacaaaacagactctttaccttctgctgtgtttgaagtatgtttagtcagcatgctcaggaaataaatgtgaattgcccttgagacctgcttctacattggttgctttgttaactctacctgatcttcacttgtcagtaatttgagaccacttcaaagccctctgcaaacaccccaaaggcagaatctgctattttgagttttccattaacttccaaagaattctggttttcaaaacaggagccagagttggagatattacagtcaactttggcttctaagccagtaattccattcttaaatacctcactgtcttggccatggggaagcactatggcctcagctgggggaaagaccctggcctaggggtcttagccactccccaccctagggtatagttcaggggtatccaatcctttggcttccctgggccatgttggaagaattgtcttgggccacacataaaatacagtaaccatagctgatgagctaaaacaaaaaacaatggtttgtgcaaaaatctcataatgttttaataaagttgaagaatttgaaaaaaaaaaaaaaaaaa

SEQ ID NO: 2088 - DNA, 4255 bp, Homo sapiens
gaggcaatcgtccggtgtgtgagcccgggagccggaggtgtagcggcagagacattgttcttgccggctccctacggtgccgtgtgtgcgtgagagaagaccagtctttcctctagcatttgacattgtgcagcaaagaaatggttatggagaagcccagtccgctgcttgtagggcgggagtttgtgaggcaatattatactttgctgaataaagctccggaatatttacacaggttttatggcaggaattcttcctatgttcatggtggagtagatgctagtggaaagccccaggaagctgtttatggccaaaatgatatacaccacaaagtattatctctgaacttcagtgaatgtcatactaaaattcgtcatgtggatgctcatgcaaccttgagtgatggagtagttgtccaggtcatgggtttgctgtctaacagtggacaaccagaaagaaagtttatgcaaacctttgttctggctcctgaaggatctgttccaaataaattttatgttcacaatgatatgtttcgttatgaagatgaagtgtttggtgattctgagcctgaacttgatgaagaatcagaagatgaagtagaagaggaacaagaagaaagacaaccatctcctgaacctgtgcaagaaaatgctaacagtggttactatgaagctcaccctgtgactaatggcatagaggagcctttggaagaatcctctcatgaacctgaacctgagccagaatctgaaacaaagactgaagagctgaaaccacaagtggaggagaagaacttagaagaactagaggagaaatctactactcctcctccggcagaacctgtttctctgccacaagaaccaccaaaggctttctcctgggcttcagtgaccagtaaaaacctgcctcctagtggtactgtttcttcctctggaattccaccccatgttaaagcaccagtctcacagccaagagtcgaagctaaaccagaagttcaatctcagccacctcgtgtgcgtgaacaacgacctagagaacgacctggttttcctcctagaggaccaagaccaggcagaggagatatggaacagaatgactctgacaaccgtagaataattcgctatccagatagtcatcaactttttgttggtaacttgccacatgatattgatgaaaatgagctaaaggaattcttcatgagttttggaaacgttgtggaacttcgcatcaataccaagggtgttgggggaaagcttccaaattttggttttgtggtttttgatgactctgaaccagttcagagaatcttaattgcaaaaccgattatgtttcgaggggaagtacgtttaaatgtggaagagaaaaaaacaagagctgcaagagagcgagaaaccagaggtggtggtgatgatcgcagggatattaggcgcaatgatcgaggtcccggtggtccacgtggaattgtgggtggtggaatgatgcgtgatcgtgatggaagaggacctcctccaaggggtggcatggcacagaaacttggctctggaagaggaaccgggcaaatggagggccgcttcacaggacagcgtcgctgaagctccactgttggcaaagtcttggcagtggtacattattcatcgtgtttgcattcttgttaattttttttttggctttggaatgtgacacagcctttttgatcatttctttgatgtgaaaagcatctttggttatcagttaaattgaggtggacattatttccccaatttcacaacaggattcacattgttaatttataaatctagacttggagaattaaggactgagaaatgaccatatcttaaactatctacgacaaagtgaacttaaaaggacatgcccactgaattcaggtcctttgagtaaaaaaaaaatcttctgctgcacattttgtttaagtgttactgtttctgcctgttaatgctgggaacacaaatagtgcaatttgtgcaattggagaatcttgccttttttcttggctccccccaaaaatacaaaccaacagaaacttgttatgcactcatcaaaatgtactaatgggtactctgaactcattaacattgacatctgcaacaggaggcaacagggaaaaaatctcatcttcttttccagtagaaaatagtttgtgaaatgatgagggcattttatctgcttgctgtgaccagcgtgtgtacacataaaccttaacaagactacaagtatattccagaaggaaatcattttagttatgaactaaataataaaaattagaacttcaaatgcgatggtcttgactattagaccagatttagtagctccatatctaagatttttctacctgcccctcttcagtacagggatggctggctgctcaacacactcctcctccccttttttcctttctttaagctgtgtacagtgaaaattgtctttactgtatttttgttctctggtaatgtaataagcatgatggtgccttctattaatacatcattccagtcttgctggtaattttgtacagtatagtgtatgaattgctgtgctgcaaagccaaacagctgcaaaatgttgaaaaatcatcgaaatgtataaaaattgcagtatctttaaaatcagtaaaatggactagcatattatttatcttgttcttcagttaacaactttgtgttctctgtgggagggagggagtcctgtgtgtttgtggggagagggaaggaggaagtcagttatttgagtaagcctctagttgacttttctcttagcctgaatgtggacgttgaaacatatcacttcagggcttggaaaagtcagtcaacttgacgtacatttttagtgacattttaaaagcagtcagattctataaatggcaagtaagcctgaagtgaggatactgcaattttcggagaaaagaacagcagctctttaagtgtttgcattttctatttggggggcagggaactgtcattcattttgcacaattcttgaactgatgtcagcacccgagtggctcctgaatttaagtctgggacgacatcttttatttttacatgaatctttaaacaattctgtgagcaaagtttgtagctgctggattattgtctgtctttatagcaagttccagtaaaccacaagtatggcaaagcttatccaattttatgcttggagcagtcagtacataccagtttctgatgtttcaggcaggagtggggtaaataagtgtgaccacttaaagctgctcgttagcatggaagacttctccattctatctttgtaaaacagacaagatatgcacttgacatagtagcaaattggttctgaattatgcaactgtttgctatttagtaaactagcaaatgatgcatgtattttgtttttcatgtactgggcaatatgagtaaaatctgtccctttttccccctttgaatgaggtcttccatgtttgagggaaagtcttgcactattgcatatattttggggacacagattttcatagtttccatttttggggggcttaaggattttttttttttctgtttgaaacagttttatactttctgatatagtacttgaaattcttaccagaaaattactttggagttttgaagcctttattaatactacttttaaagaagcagttgttttattgtcaatgttttttttcccccaagcatattttcttgtatttctgtttccatatatatatatatatataatttccaattcaggatattgccctgccatccatgaaaactgttctggcaccaaaagtaatgacaaatgttaagtgtaataatagaaaagtagagcaaagagccattcagcttcagtctttacataccatgaataaaacattaaaacatcatatggagaagtttacatggtgattgttcacctgcagtactgtggagttttaacattttgtcctcttttcagtgaaacagagtaaaaatattcatctaccattactgttatttgctgattttgttttattttttgatggtaatattctatccttatgacactattgcaaccaaattggctttaccatcttggctttagtaggtatagaagacaatggattaccatctttattgctgtaatgtgttaagcattatatgctagtagaatctagtttaattgtttcaggtggaaagtattctttgagtttccatattgaatgtgtttggactaaacaaacaataaactactgatgtctgcagcatttaaaaaaaaaaaaaaaaaaaaa

SEQ ID NO: 2089 - DNA, 4254 bp, Homo sapiens
gggggcgggacgtccgtggtccttgtcgcacgtcgcagcgcctggcgcccgggaagaggtggttgtgaggcagacgaactcgcggctctccggcttccgaggcttccgagttgtcggaggaagggggcggcgagcaataagaacccgccgcacccggtcctcagcgactcttctgacctccgcgcgacgtacccgccgccgccgttggctggagcatttgacattgtgcagcaaagaaatggttatggagaagcccagtccgctgcttgtagggcgggagtttgtgaggcaatattatactttgctgaataaagctccggaatatttacacaggttttatggcaggaattcttcctatgttcatggtggagtagatgctagtggaaagccccaggaagctgtttatggccaaaatgatatacaccacaaagtattatctctgaacttcagtgaatgtcatactaaaattcgtcatgtggatgctcatgcaaccttgagtgatggagtagttgtccaggtcatgggtttgctgtctaacagtggacaaccagaaagaaagtttatgcaaacctttgttctggctcctgaaggatctgttccaaataaattttatgttcacaatgatatgtttcgttatgaagatgaagtgtttggtgattctgagcctgaacttgatgaagaatcagaagatgaagtagaagaggaacaagaagaaagacaaccatctcctgaacctgtgcaagaaaatgctaacagtggttactatgaagctcaccctgtgactaatggcatagaggagcctttggaagaatcctctcatgaacctgaacctgagccagaatctgaaacaaagactgaagagctgaaaccacaagtggaggagaagaacttagaagaactagaggagaaatctactactcctcctccggcagaacctgtttctctgccacaagaaccaccaaagccaagagtcgaagctaaaccagaagttcaatctcagccacctcgtgtgcgtgaacaacgacctagagaacgacctggttttcctcctagaggaccaagaccaggcagaggagatatggaacagaatgactctgacaaccgtagaataattcgctatccagatagtcatcaactttttgttggtaacttgccacatgatattgatgaaaatgagctaaaggaattcttcatgagttttggaaacgttgtggaacttcgcatcaataccaagggtgttgggggaaagcttccaaattttggttttgtggtttttgatgactctgaaccagttcagagaatcttaattgcaaaaccgattatgtttcgaggggaagtacgtttaaatgtggaagagaaaaaaacaagagctgcaagagagcgagaaaccagaggtggtggtgatgatcgcagggatattaggcgcaatgatcgaggtcccggtggtccacgtggaattgtgggtggtggaatgatgcgtgatcgtgatggaagaggacctcctccaaggggtggcatggcacagaaacttggctctggaagaggaaccgggcaaatggagggccgcttcacaggacagcgtcgctgaagctccactgttggcaaagtcttggcagtggtacattattcatcgtgtttgcattcttgttaattttttttttggctttggaatgtgacacagcctttttgatcatttctttgatgtgaaaagcatctttggttatcagttaaattgaggtggacattatttccccaatttcacaacaggattcacattgttaatttataaatctagacttggagaattaaggactgagaaatgaccatatcttaaactatctacgacaaagtgaacttaaaaggacatgcccactgaattcaggtcctttgagtaaaaaaaaaatcttctgctgcacattttgtttaagtgttactgtttctgcctgttaatgctgggaacacaaatagtgcaatttgtgcaattggagaatcttgccttttttcttggctccccccaaaaatacaaaccaacagaaacttgttatgcactcatcaaaatgtactaatgggtactctgaactcattaacattgacatctgcaacaggaggcaacagggaaaaaatctcatcttcttttccagtagaaaatagtttgtgaaatgatgagggcattttatctgcttgctgtgaccagcgtgtgtacacataaaccttaacaagactacaagtatattccagaaggaaatcattttagttatgaactaaataataaaaattagaacttcaaatgcgatggtcttgactattagaccagatttagtagctccatatctaagatttttctacctgcccctcttcagtacagggatggctggctgctcaacacactcctcctccccttttttcctttctttaagctgtgtacagtgaaaattgtctttactgtatttttgttctctggtaatgtaataagcatgatggtgccttctattaatacatcattccagtcttgctggtaattttgtacagtatagtgtatgaattgctgtgctgcaaagccaaacagctgcaaaatgttgaaaaatcatcgaaatgtataaaaattgcagtatctttaaaatcagtaaaatggactagcatattatttatcttgttcttcagttaacaactttgtgttctctgtgggagggagggagtcctgtgtgtttgtggggagagggaaggaggaagtcagttatttgagtaagcctctagttgacttttctcttagcctgaatgtggacgttgaaacatatcacttcagggcttggaaaagtcagtcaacttgacgtacatttttagtgacattttaaaagcagtcagattctataaatggcaagtaagcctgaagtgaggatactgcaattttcggagaaaagaacagcagctctttaagtgtttgcattttctatttggggggcagggaactgtcattcattttgcacaattcttgaactgatgtcagcacccgagtggctcctgaatttaagtctgggacgacatcttttatttttacatgaatctttaaacaattctgtgagcaaagtttgtagctgctggattattgtctgtctttatagcaagttccagtaaaccacaagtatggcaaagcttatccaattttatgcttggagcagtcagtacataccagtttctgatgtttcaggcaggagtggggtaaataagtgtgaccacttaaagctgctcgttagcatggaagacttctccattctatctttgtaaaacagacaagatatgcacttgacatagtagcaaattggttctgaattatgcaactgtttgctatttagtaaactagcaaatgatgcatgtattttgtttttcatgtactgggcaatatgagtaaaatctgtccctttttccccctttgaatgaggtcttccatgtttgagggaaagtcttgcactattgcatatattttggggacacagattttcatagtttccatttttggggggcttaaggattttttttttttctgtttgaaacagttttatactttctgatatagtacttgaaattcttaccagaaaattactttggagttttgaagcctttattaatactacttttaaagaagcagttgttttattgtcaatgttttttttcccccaagcatattttcttgtatttctgtttccatatatatatatatatataatttccaattcaggatattgccctgccatccatgaaaactgttctggcaccaaaagtaatgacaaatgttaagtgtaataatagaaaagtagagcaaagagccattcagcttcagtctttacataccatgaataaaacattaaaacatcatatggagaagtttacatggtgattgttcacctgcagtactgtggagttttaacattttgtcctcttttcagtgaaacagagtaaaaatattcatctaccattactgttatttgctgattttgttttattttttgatggtaatattctatccttatgacactattgcaaccaaattggctttaccatcttggctttagtaggtatagaagacaatggattaccatctttattgctgtaatgtgttaagcattatatgctagtagaatctagtttaattgtttcaggtggaaagtattctttgagtttccatattgaatgtgtttggactaaacaaacaataaactactgatgtctgcagcatttaaaaaaaaaaaaaaaaaaaaa

SEQ ID NO: 2090 - DNA, 4353 bp, Homo sapiens
gggggcgggacgtccgtggtccttgtcgcacgtcgcagcgcctggcgcccgggaagaggtggttgtgaggcagacgaactcgcggctctccggcttccgaggcttccgagttgtcggaggaagggggcggcgagcaataagaacccgccgcacccggtcctcagcgactcttctgacctccgcgcgacgtacccgccgccgccgttggctggagcatttgacattgtgcagcaaagaaatggttatggagaagcccagtccgctgcttgtagggcgggagtttgtgaggcaatattatactttgctgaataaagctccggaatatttacacaggttttatggcaggaattcttcctatgttcatggtggagtagatgctagtggaaagccccaggaagctgtttatggccaaaatgatatacaccacaaagtattatctctgaacttcagtgaatgtcatactaaaattcgtcatgtggatgctcatgcaaccttgagtgatggagtagttgtccaggtcatgggtttgctgtctaacagtggacaaccagaaagaaagtttatgcaaacctttgttctggctcctgaaggatctgttccaaataaattttatgttcacaatgatatgtttcgttatgaagatgaagtgtttggtgattctgagcctgaacttgatgaagaatcagaagatgaagtagaagaggaacaagaagaaagacaaccatctcctgaacctgtgcaagaaaatgctaacagtggttactatgaagctcaccctgtgactaatggcatagaggagcctttggaagaatcctctcatgaacctgaacctgagccagaatctgaaacaaagactgaagagctgaaaccacaagtggaggagaagaacttagaagaactagaggagaaatctactactcctcctccggcagaacctgtttctctgccacaagaaccaccaaaggctttctcctgggcttcagtgaccagtaaaaacctgcctcctagtggtactgtttcttcctctggaattccaccccatgttaaagcaccagtctcacagccaagagtcgaagctaaaccagaagttcaatctcagccacctcgtgtgcgtgaacaacgacctagagaacgacctggttttcctcctagaggaccaagaccaggcagaggagatatggaacagaatgactctgacaaccgtagaataattcgctatccagatagtcatcaactttttgttggtaacttgccacatgatattgatgaaaatgagctaaaggaattcttcatgagttttggaaacgttgtggaacttcgcatcaataccaagggtgttgggggaaagcttccaaattttggttttgtggtttttgatgactctgaaccagttcagagaatcttaattgcaaaaccgattatgtttcgaggggaagtacgtttaaatgtggaagagaaaaaaacaagagctgcaagagagcgagaaaccagaggtggtggtgatgatcgcagggatattaggcgcaatgatcgaggtcccggtggtccacgtggaattgtgggtggtggaatgatgcgtgatcgtgatggaagaggacctcctccaaggggtggcatggcacagaaacttggctctggaagaggaaccgggcaaatggagggccgcttcacaggacagcgtcgctgaagctccactgttggcaaagtcttggcagtggtacattattcatcgtgtttgcattcttgttaattttttttttggctttggaatgtgacacagcctttttgatcatttctttgatgtgaaaagcatctttggttatcagttaaattgaggtggacattatttccccaatttcacaacaggattcacattgttaatttataaatctagacttggagaattaaggactgagaaatgaccatatcttaaactatctacgacaaagtgaacttaaaaggacatgcccactgaattcaggtcctttgagtaaaaaaaaaatcttctgctgcacattttgtttaagtgttactgtttctgcctgttaatgctgggaacacaaatagtgcaatttgtgcaattggagaatcttgccttttttcttggctccccccaaaaatacaaaccaacagaaacttgttatgcactcatcaaaatgtactaatgggtactctgaactcattaacattgacatctgcaacaggaggcaacagggaaaaaatctcatcttcttttccagtagaaaatagtttgtgaaatgatgagggcattttatctgcttgctgtgaccagcgtgtgtacacataaaccttaacaagactacaagtatattccagaaggaaatcattttagttatgaactaaataataaaaattagaacttcaaatgcgatggtcttgactattagaccagatttagtagctccatatctaagatttttctacctgcccctcttcagtacagggatggctggctgctcaacacactcctcctccccttttttcctttctttaagctgtgtacagtgaaaattgtctttactgtatttttgttctctggtaatgtaataagcatgatggtgccttctattaatacatcattccagtcttgctggtaattttgtacagtatagtgtatgaattgctgtgctgcaaagccaaacagctgcaaaatgttgaaaaatcatcgaaatgtataaaaattgcagtatctttaaaatcagtaaaatggactagcatattatttatcttgttcttcagttaacaactttgtgttctctgtgggagggagggagtcctgtgtgtttgtggggagagggaaggaggaagtcagttatttgagtaagcctctagttgacttttctcttagcctgaatgtggacgttgaaacatatcacttcagggcttggaaaagtcagtcaacttgacgtacatttttagtgacattttaaaagcagtcagattctataaatggcaagtaagcctgaagtgaggatactgcaattttcggagaaaagaacagcagctctttaagtgtttgcattttctatttggggggcagggaactgtcattcattttgcacaattcttgaactgatgtcagcacccgagtggctcctgaatttaagtctgggacgacatcttttatttttacatgaatctttaaacaattctgtgagcaaagtttgtagctgctggattattgtctgtctttatagcaagttccagtaaaccacaagtatggcaaagcttatccaattttatgcttggagcagtcagtacataccagtttctgatgtttcaggcaggagtggggtaaataagtgtgaccacttaaagctgctcgttagcatggaagacttctccattctatctttgtaaaacagacaagatatgcacttgacatagtagcaaattggttctgaattatgcaactgtttgctatttagtaaactagcaaatgatgcatgtattttgtttttcatgtactgggcaatatgagtaaaatctgtccctttttccccctttgaatgaggtcttccatgtttgagggaaagtcttgcactattgcatatattttggggacacagattttcatagtttccatttttggggggcttaaggattttttttttttctgtttgaaacagttttatactttctgatatagtacttgaaattcttaccagaaaattactttggagttttgaagcctttattaatactacttttaaagaagcagttgttttattgtcaatgttttttttcccccaagcatattttcttgtatttctgtttccatatatatatatatatataatttccaattcaggatattgccctgccatccatgaaaactgttctggcaccaaaagtaatgacaaatgttaagtgtaataatagaaaagtagagcaaagagccattcagcttcagtctttacataccatgaataaaacattaaaacatcatatggagaagtttacatggtgattgttcacctgcagtactgtggagttttaacattttgtcctcttttcagtgaaacagagtaaaaatattcatctaccattactgttatttgctgattttgttttattttttgatggtaatattctatccttatgacactattgcaaccaaattggctttaccatcttggctttagtaggtatagaagacaatggattaccatctttattgctgtaatgtgttaagcattatatgctagtagaatctagtttaattgtttcaggtggaaagtattctttgagtttccatattgaatgtgtttggactaaacaaacaataaactactgatgtctgcagcatttaaaaaaaaaaaaaaaaaaaaa

SEQ ID NO: 2091 - DNA, 2340 bp, Homo sapiens
gctgagcaggagatgggaattgaaacctgcgcagaggcggctgtgcagggtgagagtggagccgaaaccacagaaagtgaagtttgcttcaacgtcttgtcccggcaggccactcagatgtgagagtgaggaagtgggatggggcctgaccggaaggaggtgcccctgagccgaggaacgcaggcggtggtcgtggggaagggaagaggagccccgggagacgacagcagcatgggtgggcggccttcgagccctctggacaagcagcagcggcagcacctaaggggtcaggtggacaccctgctgaggaacttcctgccttgctaccgtgggcagctggcagcgtctgtcctgcggcagatctctcgagagctgggccctcaggagccgaccggaagccagttgctacgcagcaaaaagctgccccgagtccgtgagcaccgaggacccctgacccagcttcggggccacccaccccggtggcagccgatcttctgtgttctgcgtggggacggccgcctagagtggttcagccacaaggaggaatatgaaaacgggggccactgccttggctcaacagccctgacaggatacacgctcctgacttcccagcgagaatatctccgccttttggatgctctctgccctgaatccttgggagaccatactcaggaagagcctgactccctcttggaagtgcctgtgagcttcccgctgttcctgcagcaccccttccgccggcacctctgcttctctgcagccaccagggaggcacagcatgcctggaggctggccctgcagggtggcatccggcttcagggcacagtcctgcagcgaagccaggcccctgctgcccgggccttcctggacgccgtccgactctaccggcagcaccaaggccactttggcgacgacgacgtgaccctaggctcagacgccgaggtgctgaccgcggtgctgatgcgggagcaacttcccgcgctgcgagcccagacccttcctggcctgcggggggcaggccgcgcccgcgcctgggcctggaccgagcttctagacgccgttcacgcagctgtcctggccggggcctccgccgggctctgcgccttccagcccgaaaaggacgagctgcttgcgtcgctggagaagacgatccgcccggacgtggaccagctgctgcggcagcgggcgcgtgtggcggggcggctgaggacggatatcaggggaccgctcgagtcgtgcctgcgccgggaggtggacccgcagctgccccgggtcgtgcagaccctgctgcgcaccgtggaagcctcgctcgaggcggtgcggaccctcctggctcaaggcatggaccgactgtcccaccgcctgcgccagagcccctcaggcacgcggctgcgcagggaggtttactcatttggggagatgccgtgggacttggcgctgatgcagacatgctaccgtgaggccgagcggagccgggggcgcttggggcagctggcagcaccgtttggctttctggggatgcagagcctcgtgtttggggcccaagatcttgcacagcagctcatggctgacgccgtggccaccttcctgcagctggctgaccagtgtctgacgacggccctcaactgtgaccaggctgcccagaggctggagagagtcagggggcgcgtgctgaagaaattcaaatcggacagcgggttggcgcagaggaggttcatccgaggctggggtctctgcatctttttaccttttgtgctgagccaactcgagccaggctgcaaaaaggagctgcctgagttcgagggggatgtccttgccgtgggcagccaggctctgaccactgagggcatctatgaggacgtcatccgggggtgcttgctgcagaggattgaccaagaattgaaaaagacccttggtgccaatgatgtatcctgcactctggacggctgcttggaggtcccatgggaacaggagggagcagctccaaatcttaacttggtgtcaagtttcctggctgggagacaagcttttaccgacttcctctgcttgccagcaaagtcatctgctaactggatattggcagcttctctgctgtcttgcagctgcttccggagtgggttccacagggattcccgtgtgttcttggttcagcttgcagagggactttcacactccctggagaccgtttcctcccattctgtctggagttttcggcctaccccaagacaatgagatattcctgccctttcctcctatttccctccaacccccccttccgaaatacatttgctcaatcatttgcacttcataggccaaaaaaaaaaaaaaaaaaaaaaaaaa

SEQ ID NO: 2092 - DNA, 2382 bp, Homo sapiens
agtaccgctgcggccgggggattgggccggggtctccaccgccgaccgaggggagcggcgtccgctcggccctgctttttgcgacctgccgtcagccccacgtcgccggcctggaggggcgaagaggacgaggggcgcaaggcttcctccggggacattggctccctggattatcaagcagtttgtagttgacattgaatccaggctgaggatggaaggtgtggaacttaaagaagaatggcaagatgaagattttccgatacctttaccagaagatgatagtattgaagcagatatactagctataactggaccagaggaccagcctggctcactagaagttaatggaaataaagtgagaaagaaactaatggctccagacattagcctgacactggatcctagtgatggctctgtattgtcagatgatttggatgaaagtggggagattgacttagatggcttagacacaccgtcagagaatagtaatgagtttgagtgggaagatgatcttccaaaacccaagactactgaagtaattaggaaaggctcaattactgaatacacagcagcagaggaaaaagaagatggacgacgctggcgtatgttcaggattggagaacaggaccacagggttgatatgaaggcaattgaaccctataaaaaagttatcagccatgggggatattatggggatggattaaatgccattgttgtatttgctgtctgtttcatgcctgaaagtagtcagcctaactatagatacctgatggacaatctttttaaatatgttattggcactttggagctattagtagcagaaaactacatgatagtttatttaaatggtgcaacaactcgaagaaaaatgcccagtctgggatggctcaggaaatgttatcagcaaattgatagaaggttacggaaaaatctaaaatccctaatcattgtacatccttcttggtttatcagaacacttctggctgttacaagaccatttattagctcgaaattcagccaaaaaattagatacgtgtttaatttggcagaactagcagaacttgtccccatggaatacgttggcataccagaatgcataaaacaagttgatcaagaacttaatggaaaacaagatgaaccgaaaaatgaacagtaagtttggcatctagtccaaacaagactgaagaatgtgctgatggagcagtgctgtttctgcattcataatgcatttattggcccatatttttatgtaacctgttacaaaatagacttgactttttcataatggacttttgtattatacaagggactgttcactgctgtactggtttgcaaatttcttgaatttagctctttaatagctaactgtattattatcgttttatattttatattgctaaatagagaaccacactttatataaagtagtttttgcatttgtttattgaatgatgcatcttcttcggtgaaatatttatatgcataaatggcaaaggaaagaaataatatatatttttatgtcattgagcaatattttttcaatgtgtacctgtcttatggaagaaatatgcaggtatataagaccacgattttctaagctgccatataagaatttttgtttttgtaaatggttaaatacatttcctgggtaacttaggaaattaagctttttcataaggcaacagatggtaaactgattgtcatgaatacccaaagatcatgtatataatcgaagtgtattagtaccatcccaaggtttttttctcatttaacatatttgtttcataattcagcaagtacagatgcaagcgcattgcacactttttcctttctaaacttaaagacaagtcaaaaagccattcttagaactagaggatttaagcagggtcggaattacgggtttgtatatatgtatatactcgtttgtatatatgtatatactgggacattttatcttctggcccaaagtcagaactttataaaaatcttgagtttgttcacttaatgtgaaataagctatgtgtccagggtattgctcccctgagtgtatatgagtgctgagtagtattgcagagaatgtgatgagttatcactgtcacaactttttctatagaaaacaggggctgcttttaaactctcactatgggacactttaccaaaatacttccatatcaattatttgaacccggtagtttgtttgacctagttagattgtggtgtttattcaagtttgaaatcatgtttgacaatactgtaaattaggttaattttgaagtcttagcatcatcatattgtgctgttttggataacacgtttgttcaagaacatttaaactgtttctttggtgtcctttacattgaaataaattgtgtttgtgcctcc

SEQ ID NO: 2093 - DNA, 2159 bp, Homo sapiens
tctttccgtcccgggcagccagcgccagtcggagccagcgcgagcgccgccgccatcactgccgctgccaagtcctccacccgctgcccccgccatgtctgctaccgctgccacggccccccctgctgccccggctggggagggtggtccccctgcaccccctccaaacctcaccagtaacaggagactgcagcagacccaggcccaggtggatgaggtggtggacatcatgagggtgaacgtggacaaggtcctggagcgagaccagaagctgtcggagctggacgaccgtgcagatgcactccaggcgggggcctcccagtttgaaacaagcgcagccaagctcaagcgcaaatactggtggaaaaacctcaagatgatgatcatcttgggagtgatttgcgccatcatcctcatcatcatcatagtttacttcagctcttaaatccccgaggagtctgccctgcctagagaagggcctctcccccaaccctcagccgttcctccacctctcagccatatctttcagccccccctcccctggatccgtgtgtgtgtgtgtccgtgtgtgtgtccccctgtaaatagccagctgttatttatacatatataatattatatatatttggtctgtttgtagttttattactagatgatttttccggttgtccttaacaccccttcctgaggttcccttcacccctctctcttgccttccttccctttccctttcttcctgactagccccaagtcccttcatttgcatctgctatgcaatagtccctctcctttccttcttcttccctcagatttagctgatccttcctcccaccctggccttcctttcctctttcctcctcactctccccgtcatgctccctctgccccgccctcaaaaaaaaaaaaaaaaaaaaaaaaaaaaaaaaccaccagcacctgtccaggcttccttaggtacatcttctttgtatccattgggaggctctgagactggccccacttggtcctaaaaatcccaaggtctttgggagcgtccagcatgttaattagcgtatcattacatactgctatccctttccatttctttttgttccatcactcttctctcaacctgtgtttctttttttactgaggagttagtccccattagttcttgtatcacattttcatttgcacgacattactcgcaggtggtggggagcctgggcttttggggaaccaggctgctctggtccccagcattgcctcctcctagcccctctagtccagtttgcctcccttaccctcattttccaaacctcttgtaccctcctctccctcccccagtggtatgtaagtgtcttgaagttcagtatgttatgatggaccaataattctgcccttcgggtttctccctacattcctgctccccagttttcatgtggggtactcaactgacattcccatggggtttccctcccatctgcctgatccacctcctcctcccaccacaagatcaattgttggccacaattgatctcttgtagaggggtggctaccagtgtgtgtgtgggggtcatcactgccttggggaggagtggggcagggcagagaatccccccaattcctgcctgaaatctctggcctcacccctgctgggggttggactgaaaaccctcctccccaatttggggggtgttgccccatcactgcccagctcctctgactgccccccctgaatttagggtgggggtactagtcactgccaatgtgtgtatgggacttgctggaaaacggggatgcttgcccctctccaggactattgagcccagagagagctgtcctctcattgggtgaactgattgaggaagggtctattgtctttttaaatggcacaattttaagggtttgagggtacagtcccttaacctgccacgggagggggcccccaaactttcttcccccccacacttctggttttctgtgtggagggggagcagggatatctaagctgtggtgtgaaagggtaggagagatgctggaggtgggggtgctgtgttctagaccccccatattatcccagtgtcccctgcccccctcttcccccaccccatgcccccaattctgtggcgcatccagattgtgaaaatgtacaataaatgtgtaatgagtaaccaggt

SEQ ID NO: 2094 - DNA, 8699 bp, Homo sapiens
cagccccggcaggatggcggcggacacgcaggtttccgagacactaaagcgttttgcagggaaggtgacaacagccagtgtaaaggaacggagagaaatcctcagtgaacttgggaagtgtgttgctggaaaagatcttccagagggagcagtgaaggggctctgcaaattgttctgcttgactctgcatcgatatagagatgcagcctcccgcagggccttgcaggcagccatccagcagttggctgaggcccagccagaagccactgctaagaaccttctacactctctgcagtcttctggtataggctccaaagcaggtgttcccagtaagagcagtggctctgccgccttgctggccttgacctggacctgcctcctggtgcgcattgtctttccatcgagagccaagcgacaaggagacatctggaacaaactggtggaagtgcagtgcctgctcttgctggaggtgctgggtggctcccacaagcacgccgtggatggtgctgtgaagaaactcacgaagctgtggaaagagaaccccgggctggtggaacagtacttgtcagccattctcagcctagagcccaaccagaactatgctggcatgctggggctgctggtgcagttctgcacgagtcacaaggagatggacgtggtcagtcagcacaagagcgccctactggacttttacatgaagaacatcctgatgagcaaagtcaagcctccgaagtacctgttggatagctgtgcccctctgctccgatacctgtcccactcagaatttaaggatctgatactgcccaccatacagaagtccttactgaggagtccagagaatgttattgaaactatttctagtctgctggcatcagtgacgcttgacctcagccagtatgccatggacatcgtgaaaggactggctggtcacctgaaatccaacagtccccgcctgatggatgaagctgtgctggcactgcggaacctggcacgccagtgcagtgactcttcggccatggaatccctgaccaagcacctatttgctatcctcggaggctcggaaggaaaactaactgttgtagcccagaagatgagcgtcctctcagggattgggagcgtcagtcatcacgtggtgtctggaccttccagtcaggtcctgaatgggatcgtggctgagctgttcatcccgttccttcagcaggaagttcatgaagggaccttggtacacgctgtctcagtcctggctctctggtgtaaccgattcactatggaagtgcccaagaagctcactgaatggttcaaaaaagctttcagccttaaaacctccacatctgcggtgaggcatgcctacctgcagtgcatgttggcctcttaccggggtgacacgctgttgcaggccctggacttactgcccttgctcatccagacagtggagaaggcagcctcccaaagcactcaggttcccaccatcactgaaggggttgccgcagccttgttgctcttaaagttgtcagtggctgactcacaggctgaggccaaactgagcagtttctggcagttgattgtggatgagaaaaagcaggttttcacttctgagaaattcctggtcatggcttcagaggatgccctgtgtactgtgttgcatctgacagagagacttttccttgaccacccgcatagactcactggcaacaaagttcagcagtaccaccgggctctggtggcggtgctcctgagccgcacctggcacgtccgcaggcaggctcagcagacagttcggaagctgctgtcctctcttgggggctttaagctggcgcacggactcttggaggagctgaagactgtcctcagttctcacaaggtgctgcccttagaggctttggtgactgatgctggagaggtgactgaggcaggcaaggcctacgtgcctccacgggtcctgcaggaggctctgtgtgtcatctccggtgtgccagggctcaagggtgatgtcaccgacactgaacaactggcccaggaaatgctgatcatctcccaccacccatccttagttgccgtgcagtctggactttggccagcacttcttgccaggatgaagatcgatcctgaagcctttatcaccaggcacctggatcagatcattcccaggatgaccacacagagtcccctaaaccagtcctccatgaatgccatgggctccctttccgtcctgtcgccggaccgggtcctcccacagctcatcagcaccatcactgcctccgtgcagaaccctgcactgcgcctggtgacgcgggaggagtttgccattatgcagacccctgctggggagctgtatgacaaatccatcattcagagtgcccagcaggacagcataaaaaaggccaacatgaagcgagagaacaaagcttattccttcaaagagcagatcatcgagctggagctgaaggaggagataaagaagaagaaaggcatcaaagaggaggtgcagctgaccagcaagcagaaggagatgctgcaggcccagctagacagggaggcgcaggtccggaggcggctgcaggagctggatggggagctggaggcggcgcttggactgctggacatcatcctggccaagaacccgtccggcctgacccagtacatccctgttttggtcgactcttttctgcccttgctgaagtctcccctggctgctcccaggatcaagaaccccttcttgtccttggctgcctgtgtcatgccctctaggctcaaggctttgggcactttggtgagccacgtgaccctgcgcctgctgaagccagagtgtgtcctggataagtcctggtgccaggaagagctgtcggtggctgtgaagagggcggtgatgctgctgcacacccacaccatcaccagcagggtgggcaagggggagccaggtgctgcgcccttgtccgcgccagccttctccttagtcttcccgtttctgaagatggtgctgacggagatgccccaccacagtgaggaggaggaggagtggatggcccagattcttcagatcctcactgtccaagcccagctgagggcctcccccaacaccccacccgggcgggtggacgagaatggcccggagttgctgcctcgcgtggccatgctgcgtcttctgacttgggtgatcgggacgggctcgcctcgcttacaggttctggcttcagacaccctgaccaccctgtgtgccagcagcagtggtgatgatggctgtgcctttgcagagcaggaggaggtggacgtgctgctctgtgccttgcagtccccgtgtgccagcgtgcgggaaaccgtgctccgggggctgatggaactccacatggtattgccagcacctgatactgatgagaagaatggcctgaaccttctgcggagactctgggtggtcaagtttgacaaggaggaggagatccggaagctggctgagaggctctggtcaatgatgggcctagacctgcagccagacctctgctccttgctgattgacgacgtgatctatcatgaggcggctgtaaggcaggcaggggccgaagccctctcccaagcagtggcacgttaccagcggcaggcggcggaggttatgggcaggctcatggagatttaccaggaaaagctctaccggccgcccccagtgctggatgctttgggacgagttatttcagaatctcctccagatcagtgggaagccaggtgtggcttggcgttggccctcaacaagctctcccagtatttggacagctctcaggtgaagccactctttcagttttttgtccctgatgccctcaatgaccgacacccagatgtccggaagtgcatgttggatgcagccctcgcaacgctcaacactcatgggaaggagaacgtcaactcgctgttgccagtattcgaggagttcctgaagaacgcgcccaatgatgccagctatgatgctgtgcgacagagtgtggtggtcctgatgggctctctggccaagcacctggacaagagtgaccccaaagtgaagcccattgttgccaagctcatcgctgccctctccaccccctcccagcaggtccaggagtccgtagccagctgcttgccaccccttgtgccagccatcaaggaggatgctggagggatgatccagaggcttatgcagcagctgctggagtcagacaagtacgcagagcgcaaaggggccgcctatggcctggcgggcctggtgaagggcctgggcatcctctcgctgaagcaacaggagatgatggcggcactgactgatgccatccaagataagaagaacttccgccggcgagagggagccctctttgccttcgagatgctctgcaccatgctggggaaactttttgagccgtatgtggttcacgtgctgccccatctgctcctgtgctttggggatggaaaccagtatgtgcgtgaggctgcagatgactgtgccaaggctgtgatgagcaacttgagtgctcacggggtgaagctggtgctcccctccttactggctgccctggaggaggaatcgtggcggaccaaagctgggtcagtggagcttcttggggcaatggcgtactgtgctcctaagcagctgtcatcctgtctacccaacattgtgcccaagcttacggaggtgctgaccgactcccatgtcaaagtccagaaggctggacagcaggcgctcaggcagatcggctccgttatcaggaacccggagatcctggccattgctccagtcctcctggatgccctgacggatccctccaggaagacccagaagtgcttgcagaccctgctggacaccaagtttgtccacttcattgatgccccatccctggccctcatcatgcccattgtccagagagccttccaggaccgttccacggacacgcggaagatggcagcccagattattggcaacatgtactccctgacagaccagaaggacttggctccgtacctgcccagcgtgacgcctggcctgaaagcatcgcttttggaccctgtgcctgaggtgcggaccgtatctgcaaaggcccttggggccatggtgaagggcatgggggagtcgtgctttgaggacttgctgccgtggctgatggagacactgacctatgagcagagctctgtggatcgctcaggcgctgcacaggggttggctgaggtcatggccggtttgggggtggagaagttggagaagttgatgccagaaatcgtggctacagccagcaaagtggacattgcaccccatgtccgagatggctacattatgatgtttaactacctgcccatcacctttggagacaagtttactccttatgtggggcccatcatcccctgtatcctcaaagctcttgctgatgagaatgagtttgtgcgtgacaccgccctgcgcgcgggccagcgggttatctccatgtacgctgagacagccatcgccctgctgctgccccagctagagcaaggcctctttgatgacctttggagaatcaggttcagctctgttcagctccttggggatctcctgtttcacatctcaggagtcactgggaagatgaccacagaaactgcctctgaggatgataactttggaactgcccagtccaacaaggcgatcatcactgccctgggggtagagcggcggaaccgggtgttggcagggctgtacatgggccgctcagacacccagctggtggtgcggcaggcgtccctgcatgtctggaagattgttgtctccaataccccccgcaccttgcgtgagatcctacccactctctttgggctcctgctgggtttcctggccagcacgtgtgcagataagagaacgattgcagcgagaacattgggagatcttgtgcggaagttaggggagaaaatcctccccgagatcatccccatccttgaggaaggcctgaggtctcagaagagcgatgagaggcagggtgtgtgcattggcctaagtgagatcatgaagtccaccagccgggatgccgtgctgtatttctctgaatccctcgtgcccacggcaaggaaggctttgtgtgacccactggaggaggtcagagaggcggcagccaagactttcgagcagctgcattccaccatcggccaccaggctctggaggacattctcccatttttactaaagcagctggatgacgaggaggtgtcagagtttgccttggatggtctgaagcaagtcatggctattaagagtcgtgtggtgctgccctaccttgtgcccaagctgacaacgccacctgtcaacacccgggtgctggctttcctttcgtcagtggctggtgatgccctcacccgtcatcttggcgtgatcctcccagcggtcatgctggccctgaaggaaaagcttgggaccccagatgagcagctggagatggccaattgtcaggctgtgatcctctccgtagaggatgacacagggcaccggatcatcatcgaggatctgctggaggccacccgcagccctgaggtgggcatgaggcaagctgctgccatcatcctcaacatctactgttcccgctcaaaggctgactacaccagccacctgcggagcctggtctcgggcctgatccgcctcttcaatgactccagccctgtggttctggaggagagctgggatgccctaaatgccatcactaagaagctggatgctggcaaccagttggcactcattgaagagctgcacaaggaaatccggctcatagggaacgagagcaaaggcgagcatgtgccaggattctgcctcccgaagaagggagtgacctccatccttccagtgttgcgggaaggagtcctgactggcagccctgagcagaaggaggaggcagccaaagccttaggcttggtaatccgcctgacctcggctgacgccctgaggccctccgtggtcagcatcactggccctctgatccgcatcctgggggacaggttcagctggaatgtgaaggcggctctgctcgagacactcagcctcttgttggctaaggttgggattgccctgaagcccttcctgccccagctgcagaccactttcaccaaagccctgcaggactccaaccggggggtgcgcctgaaggccgcagatgctctggggaagctcatttccatccacattaaggtggaccccctcttcacagagctgctcaatggcatccgcgccatggaggacccaggtgtcagggacaccatgctgcaggccctgaggtttgtgattcagggagcaggggccaaagtggatgccgtcatccggaaaaacatcgtctcactcctgctgagcatgctgggacacgatgaggacaacactcgcatctcctcagccgggtgcctaggggaactgtgtgcctttttgactgaagaggagcttagtgccgttctacagcagtgcttgctggcggacgtgtccggcattgactggatggttcggcacgggcggagcctggcactttccgtggctgtgaatgtggctcctggcagactttgtgccggcagatatagcagtgatgttcaggaaatgatcctgagcagtgccacggcggacaggatccccattgcggtgagcggggtccggggcatgggctttctcatgagacaccacatcgagacaggcggagggcagttgccggccaaactttccagcctgttcgttaagtgtctgcagaacccatccagcgacatcaggctggtggctgagaagatgatctggtgggcaaataaggacccactgcctcccctggacccccaggccatcaagcccatcctgaaggctcttcttgacaacaccaaggataagaacaccgtggtcagggcctacagcgaccaggcaattgtcaacctcctcaagatgcggcagggtgaagaggtgtttcagtccctctccaagatcctggatgtggccagtttggaggtgctgaacgaggttaaccgaaggtccctgaagaagctggccagccaggccgactccacggagcaggtggacgacaccatcctgacatgagaggcctgggccagcagcagcattgccgctccacatctttgctcaatgttttcatttttgaaaatacatttgttccaatggggagcttggaagatggcgttcccagaaagtattttaatatcaatagaccacagccaaagccttaaatcaaacccacacacaactgaaaattgcctcctccatctctcaccttttcctgtggagaagagaaggaaaagcacacgcatgcgcctcagcaaatggcagcccaggagctgtttgtccagtttagcatggctaggtctggaactataatagcagggtcagactgtgggttcctcttctcctgtgcttgagctctggtttgagagctggcgctaccaacctttttcctatatcccgagtggggcacagacggtggatctctgcccagtgtggtgtgtctggcttggcttttcaatattgtgaggtctgaatggatctgacccctgtcagatgaaaatgattcacagctctggcagttcccaagtctggggaggggtataggtttgaaaggctgtttgaaagaggaatgtttaataaaggctttgatttaatcttgatataaacagatttttaaaaatctccacccattaaacatgaagcttcctgcatcaggaaaaaaaaaaaaaaaaaaaaaaaaaaaaaaaaa

SEQ ID NO: 2095 - DNA, 2262 bp, Homo sapiens
tgagccggccgcacgcggaggatcctaaggagcagctctgttgcgacataggccgagcagcgaggcccagctccctgaaacaacagtaacctacccctgtgggtcatcatcatgccctccgacctggccaagaagaaggcagccaaaaagaaggaggctgccaaagctcgacagcggcccagaaaaggacatgaagaaaatggagatgttgtcacagaaccacaggtggcagagaagaatgaggccaatggcagagagaccacagaagtagatttgctgaccaaggagctagaggactttgagatgaagaaagctgctgctcgagctgtcactggcgtcctggcctctcaccccaacagtactgatgttcacatcatcaacctctcacttacctttcatggtcaagagctgctcagtgacaccaaactggaattaaactcaggccgtcgttatggcctcattggtttaaatggaattggaaagtccatgctgctctctgctattgggaagcgtgaagtgcccatccctgagcacatcgacatctaccatctgactcgagagatgccccctagtgacaagacacccttgcattgtgtgatggaagtcgacacagagcgggccatgctggagaaagaggcagagcggctggctcatgaggatgcggagtgtgagaagctcatggagctctacgagcgcctggaggagctggatgccgacaaggcagagatgagggcctcgcggatcttgcatggactgggtttcacacctgccatgcagcgcaagaagctaaaagacttcagtgggggctggaggatgagggttgcccttgccagagccctctttattcggcccttcatgctgctcctggatgagcctaccaaccacctggacctagatgcttgcgtgtggttggaagaagaactaaaaacttttaagcgcatcttggtcctcgtctcccattcccaggattttctgaatggtgtctgtaccaatatcattcacatgcacaacaagaaactgaagtattatacgggtaattatgatcagtacgtgaagacgcggctagagctggaggagaaccagatgaagaggtttcactgggagcaagatcagattgcacacatgaagaactacattgcgaggtttggtcatggcagtgccaagctggcccggcaggcccagagcaaggagaagacgctacagaaaatgatggcatcaggactgacagagagggtcgtgagcgataagacactgtcattttatttcccaccatgtggcaagatccctccacctgtcattatggtgcaaaatgtgagcttcaagtatacaaaagatgggccttgcatctacaataatctagaatttggaattgaccttgacacacgagtggctctggtagggcccaatggagcagggaagtcaactcttctgaagctgctaactggagagctactacccacagatggcatgatccgaaaacactctcatgtcaagatagggcgttaccatcagcatttacaagagcagctggacttagatctctcacctttggagtacatgatgaagtgctacccagagatcaaggagaaggaagaaatgaggaagatcattgggcgatacggtctcactgggaaacaacaggtgagcccaatccggaacttgtcagacgggcagaagtgccgagtgtgtctggcctggctggcctggcagaacccccacatgctcttcctggatgaacccaccaatcacctggatatcgagaccatcgacgccctggcagatgccatcaatgagtttgagggtggtatgatgctggtcagccatgacttcagactcattcagcaggttgcacaggaaatttgggtctgtgagaagcagacaatcaccaagtggcctggagacatcctggcttacaaggagcacctcaagtccaagctggtggatgaggagccccagctcaccaagaggacccacaacgtgtgcaccctgacattggcatctctgccaaggccatgagcatcatgaactcgtttgtaaacgacgtgtttgagcagctggcgtgtgaggctgcccggctggcccagtactcgggccggaccaccctgacatcccgagaagtccagacggctgtgcgtctgctgctgcctggggagctggccaagcacgctgtgtctgagggcaccaaggctgtcaccaagtacaccagctccaagtgacccagggcctgacaaaaataaagggtgaactgttaaaaaaaaaaaa

SEQ ID NO: 2096 - DNA, 3552 bp, Homo sapiens
tgagccggccgcacgcggaggatcctaaggagcagctctgttgcgacataggccgagcagcgaggcccagctccctgaaacaacagtaacctacccctgtgggtcatcatcatgccctccgacctggccaagaagaaggcagccaaaaagaaggaggctgccaaagctcgacagcggcccagaaaaggacatgaagaaaatggagatgttgtcacagaaccacaggtggcagagaagaatgaggccaatggcagagagaccacagaagtagatttgctgaccaaggagctagaggactttgagatgaagaaagctgctgctcgagctgtcactggcgtcctggcctctcaccccaacagtactgatgttcacatcatcaacctctcacttacctttcatggtcaagagctgctcagtgacaccaaactggaattaaactcaggccgtcgttatggcctcattggtttaaatggaattggaaagtccatgctgctctctgctattgggaagcgtgaagtgcccatccctgagcacatcgacatctaccatctgactcgagagatgccccctagtgacaagacacccttgcattgtgtgatggaagtcgacacagagcgggccatgctggagaaagaggcagagcggctggctcatgaggatgcggagtgtgagaagctcatggagctctacgagcgcctggaggagctggatgccgacaaggcagagatgagggcctcgcggatcttgcatggactgggtttcacacctgccatgcagcgcaagaagctaaaagacttcagtgggggctggaggatgagggttgcccttgccagagccctctttattcggcccttcatgctgctcctggatgagcctaccaaccacctggacctagatgcttgcgtgtggttggaagaagaactaaaaacttttaagcgcatcttggtcctcgtctcccattcccaggattttctgaatggtgtctgtaccaatatcattcacatgcacaacaagaaactgaagtattatacgggtaattatgatcagtacgtgaagacgcggctagagctggaggagaaccagatgaagaggtttcactgggagcaagatcagattgcacacatgaagaactacattgcgaggtttggtcatggcagtgccaagctggcccggcaggcccagagcaaggagaagacgctacagaaaatgatggcatcaggactgacagagagggtcgtgagcgataagacactgtcattttatttcccaccatgtggcaagatccctccacctgtcattatggtgcaaaatgtgagcttcaagtatacaaaagatgggccttgcatctacaataatctagaatttggaattgaccttgacacacgagtggctctggtagggcccaatggagcagggaagtcaactcttctgaagctgctaactggagagctactacccacagatggcatgatccgaaaacactctcatgtcaagatagggcgttaccatcagcatttacaagagcagctggacttagatctctcacctttggagtacatgatgaagtgctacccagagatcaaggagaaggaagaaatgaggaagatcattgggcgatacggtctcactgggaaacaacaggtgagcccaatccggaacttgtcagacgggcagaagtgccgagtgtgtctggcctggctggcctggcagaacccccacatgctcttcctggatgaacccaccaatcacctggatatcgagaccatcgacgccctggcagatgccatcaatgagtttgagggtggtatgatgctggtcagccatgacttcagactcattcagcaggttgcacaggaaatttgggtctgtgagaagcagacaatcaccaagtggcctggagacatcctggcttacaaggagcacctcaagtccaagctggtggatgaggagccccagctcaccaagaggacccacaacgtgtgagccctctacctgggttcgggtcaggagctccatctgggaactaacagctgctaacctgaccagccgctcaggacaggaccctggggctacactcctgcattgctgcaatactgctcccccagcctctcccctgcccctcaacctgccttagctgcactctcttacctacagctggacagtacctgtctgtttcctgtcctccttccagttacatctgtccatgtctggactcggctggccgttccctccagccccttgctggttatcttactctgagtgtgatgcagtcagaggcacctgcgggttagcccaggggcccaagccctggatttggcctgcggaggagcttaggatcctcgttttctgggttttggtgatgttggaggagtaccccccagcccaccgccccgattcctttttgcttctggtttggagctccggaccaggaccttcgtcctggtcagtttttaaataattatttagcagtgtaacttttagacctgcgtgacatctacaaagcgcccaataaagaaagaggaagccacggtccctaccttccttctcgggtctctggggccttctcctccctgcagtgccaacatgcactgcccacagcaggagctggatccagcgtcagtgtgtcgatgggaactgaagactagtccataggagctggaagaactttgtccctttacttctgatttgaaattgtaccttttctcaggcctgtgattcacagactttaacatgaatcagaatcacctggagggctcatgcaatcagattgccagatctcgcctcagcgtttctggttcaataggttttgggggagaccaagaacgttaacatttctagcaagtttccaggtgatgctgttgttgctggtctagagactattttgagaaccactgtccaggagcgtggttttctgattgtgatctgaggttctgccccaactgcacagcagttgggctgcttgttaaaaatgcaggccaggtgcggtggctcacacctgtaatcccagcgctttgggaggctgaggcaggtggatcacttgagctcaggagttcaagaccagcttgggaaacatggcaaaacccgtctttatgtgcctggaatcccacctgctcaggtggctagggtggatggatcgcttgagcccaggaggtggaggttgcagtgagctgagattgcaccactgcattccagcctggatgacagagcaaaaccctgtctcaaaaaaatgcagactggccaggcacagtggctcacacctgtaatccgactgtaagctcatcaccttgggaggccactgtaggaggatcaattgagcctagaagttcaagaccagcctgggcaaagtagggagaccccttctctacaaatagtaataaaatgaaccgggcatagtagcatgtgcctgcggtcccagctgctctgataagaggaggctcacttgagcccaggaggttgaggctgcagtgagcagagcgtgccgctacactccagcctgatgacagaccgagacactgtctcaaaaaaataaaaaaattcagattgctgaaaaaa

SEQ ID NO: 2097 - DNA, 3378 bp, Homo sapiens
acagctgcaccgccgagctgcgagcggctgcgagcgagagagcgtaagagcaagagagctagagagcgagcaacgggcactcgccccacgcctcccctcagccccaccgcgcgctccgcttgcctctccaccccgcccgactctacccggcccggtccctgcgcgggcacagcccagagctctggggcggtgcaggcagcctcgggactctccggcgcgccgccgcgtccccagacaaaggcttggccggcggccccggcccgctgcgccctcgctccccgcctccccagctcttctccgctcttcccccccgcgcttggctcggcgcgctccggccggccgcaaagtttcccgggcggcagcggcggctgcgcctcgcttcagcgatggccgcggagctgagcatggggccagagctgcccaccagcccgctggccatggagtatgtcaacgacttcgacctgctcaagttcgacgtgaagaaggagccactggggcgcgcggagcgtccgggcaggccctgcacacgcctgcagccagccggctcggtgtcctccacaccgctcagcactccgtgtagctccgtgccctcgtcgcccagcttcagcccgaccgaacagaagacacacctcgaggatctgtactggatggcgagcaactaccagcagatgaaccccgaggcgctcaacctgacgcccgaggacgcggtggaagcgctcatcggctcgcacccagtgccacagccgctgcaaagcttcgacagctttcgcggcgctcaccaccaccaccatcaccaccaccctcacccgcaccacgcgtacccgggcgccggcgtggcccacgacgagctgggcccgcacgctcacccgcaccatcaccatcatcaccaagcgtcgccgccgccgtccagcgccgctagcccggcgcaacagctgcccactagccaccccgggcccgggccgcacgcgacggcctcggcgacggcggcgggcggcaacggcagcgtggaggaccgcttctccgacgaccagctcgtgtccatgtccgtgcgcgagctgaaccgccacctgcggggcttcaccaaggacgaggtgatccgcctgaagcagaagcggcggaccctgaagaaccggggctacgcccagtcttgcaggtataaacgcgtccagcagaagcaccacctggagaatgagaagacgcagctcattcagcaggtggagcagcttaagcaggaggtgtcccggctggcccgcgagagagacgcctacaaggtcaagtgcgagaaactcgccaactccggcttcagggaggcgggctccaccagcgacagcccctcctctcccgagttctttctgtgagtcgtggccggtcctggcccccgcccttgccccggcccggactccctgtcccacgtccctagtcccagactaccccggaccctgtccctgccgcggccccagccttgacctgtttgacttgagcgagagggaggaagggcgcgcgggccgcgggcgacgggcgggtgcgcgggcgggcaggggaccttggctaaggcgagagtagcgcacgccagcgccgcctcctagactcgagcagagccggagagagagacgagagggtgggaggtcccggagtaacttctctccaggctgaagggcggcgaggcatagtcccgagaagtcaccaaggccatctggagactcctggctttctgaactttgcgcgttaagccgggacagctgctttgctgcccggagagtagtccgcgccaggaagagagcaacgaggaaaggagagggactctggcgtcccggcaggcgagaggcgaggctgagcgaaagaaggaaggacagacggacctgtctgtcagagttcggagaacactggctctcagccctgagacacaggcctcagttaggacgctcggcgcccaaatctcatcagttttattgcctgctcgattatatagaaaaatacaaaaaatctgcattaaaaatattaatcctgcatgctggacatgtatggtaataatttctattttgtaccattttcttgtttaactttagcatgttgttgatcatggatcatactccccttgtttctttgggtgagaagggatcgcagtttggaaactccggcggctgcgtgcggggtttcagtcccagctgtaggcttgtaaatacccgccccgccaaaccgcatagagaacgtggcagcaagctgagggtctttgtttgggtttattattacggtatttttgtttgtaagttaaaaagaaaaaaaaaaagaaaaagttccgggcattttgcatcagaaaacaactttgtcttggggcacacttggaagttgcatgttttctttccttcccttatccccattcggtcctctttttcctctctcgctttagttttcaaccttgttggtgctgagagagagaaccgagaggtcccagtacaagggcagggcagggcagggaagctgccaagctccgcaccccagaggagtgttctggactacagccttgtcttatggtcaaattgatacccttaataagaaaggaaaggaaaggaaaacagatcctcccctctgctttttattgtaaccagaatcaccctgaggtcccttctgaaccctctgggcctgcgctaattgtaggagccacagcgctcctagggtgagaggcttagccatccctgaccctggcagtgcactggtaagcagacactgcactgaaccaactgctatgctcagaatgtaccagaaacccaaacattggcaagtaattttgcaactttcaagtgcgttctttagaccaatgcattgcgtttctttccctgcttttgagatagtaggaagagttcttggtggtgtccccccccttcaattcttcagttgtatagtagttatagggaagatatgggtgtttttctttattattacttttttttttctgcaggtcagtaaaaggatttaagttgcactgacaaaaataccaaaataaaagtgtatttttaagttcccatttgaaattgctggcgctgctggccggatgcatttttgagtttgtattagttgataaattaacagtaataacaagattgtatgaaccgcatggtgcttgcagttttaaatattgtggatatttgtcctgcatcagaaacgagctttggtttttacagattcaactgtgttgaaatcaaacctgccgcaacagaaattgtttttatttcatgtaaaataagggatcaatttcaaaccctgcttatgatatgaaaatattaaaacctagtctattgtagttttattcagactggtttctgttttttggttattaaaatggtttcctattttgcttattaaaaaaaaaaaaaaaaaaaa

SEQ ID NO: 2098 - DNA, 2635 bp, Homo sapiens
cggcgctgggggcagcgtggagccacccagtgctcggcccgccccgcaacccgccggaaccgccgcccgcagcgaggaagcgcccgcgcgggcgcaggcggccggaatggcggggcccggctggggtcccccgcgcctggacggcttcatcctcaccgagcgcctgggcagcggcacgtacgccacggtgtacaaggcctacgccaagaaggacactcgtgaagtggtagccataaagtgtgtagccaagaaaagtctgaacaaggcatcggtggagaacctcctcacggagattgagatcctcaagggcattcgacatccccacattgtgcagctgaaagactttcagtgggacagtgacaatatctacctcatcatggagttttgcgcagggggcgacctgtctcgcttcatccatacccgcaggattctgcctgagaaggtggcgcgtgtcttcatgcagcaattagctagcgccctgcaattcctgcatgaacggaatatctctcacctggatctgaagccacagaacattctactgagctccttggagaagccccacctaaaactggcagactttggtttcgcacaacacatgtccccgtgggatgagaagcacgtgctccgtggctcccccctctacatggcccccgagatggtgtgccagcggcagtatgacgcccgcgtggacctctggtccatgggggtcatcctgtatgaagccctcttcgggcagcccccctttgcctccaggtcgttctcggagctggaagagaagatccgtagcaaccgggtcatcgagctccccttgcggcccctgctctcccgagactgccgggacctactgcagcggctcctggagcgggaccccagccgtcgcatctccttccaggacttttttgcgcacccctgggtggacctggagcacatgcccagtggggagagtctggggcgagcaaccgccctggtggtgcaggctgtgaagaaagaccaggagggggattcagcagctgccttatcactctactgcaaggctctggacttctttgtacctgccctgcactatgaagtggatgcccagcggaaggaggcaattaaggcaaaggtggggcagtacgtgtcccgggctgaggagctcaaggccatcgtctcctcttccaatcaggccctgctgaggcaggggacctctgcccgagacctgctcagagagatggcccgggacaagccacgcctcctagctgccctggaagtggcttcagctgccatggccaaggaggaggccgccggcggggagcaggatgccctggacctgtaccagcacagcctgggggagctactgctgttgctggcagcggagcccccgggccggaggcgggagctgcttcacactgaggttcagaacctcatggcccgagctgaatacttgaaggagcaggtcaagatgagggaatctcgctgggaagctgacaccctggacaaagagggactgtcggaatctgttcgtagctcttgcacccttcagtgaccctagaagaatgattggacagatgtgagccatctggagcagaggggcactaacccaggctgacgccaagaatgaagtggcccactgcagccctggcgagcaggcttcttggatggacagtgctgagacccccatatcccagagtccccagcctccctcaggttactctgcaccccacagatggtttgatggctgtgctgtatactggaggggagggcaggactctgggagaacagcacttctttcatgagacctttgttactcggtggttactgggtcctgtgcctgtccgttttggggcatgcagccctctatcatttttggctccgagaagagggcaaggggcccccgcagggtacttctgtgcttgccctcgccctgccagcaggcagctgtgcccctggcctgcccttcccgggaccccttattccaactcagctcctctttgcactggaatggggcactccaacacccctcagggaccaccctccccacagtatgcactcagccccacagaacccaccagtctttctgggaactcacacctgcccgccatcttggtactttaggttaatccctcaagcatgaaagctggatcttttggggtttaagaagcccaagccttgttcctgccctggcctagggagcactcaggagggttccttggtcctcatctctcccacctccgttccctctgggccccacactagccacagcgcgggccttgtgctggagtttgagcctgggacagggagagggaggcttggagacagtctgacccagtgccctctaggccacccacttctaggcctgccctgccgccgtggagccctgggcaagctctttcccctttctgggcctgggtctccccatctcttcaatggggctgataccttcacagcccacagcatgggcacttatgaggacaaagtgaatttaacctggaaaagaatgtatttgagagtttcttttaaataatcagcgggtgttggtgatttgtagcccttctgcccttaaatgcttccttgggcaagagctgtctgtcctccctgcaggaggctgagtgtaaagagtatcattcattgtttctctattaaattattttctcta

SEQ ID NO: 2099 - DNA, 1695 bp, Homo sapiens
gcgggacggaagagggggtgaaggccagaggctcggggcttcaagaccgctgtctggagtccccctttccaggccatgtcggggcccacctggctgcccccgaagcagccggagcccgccagagcccctcaggggagggcgatcccccgcggcaccccggggccaccaccggcccacggagcagcactccagccccaccccagggtcaatttttgcccccttccatctgagcagtgttaccaggccccagggggaccggaggatcgggggccggcgtgggtggggtcccatggagtactccagcacacgcaggggctccctgcagacagggggggccttcgccctggaagcctggacgccgagatagacttgctgagcagcacgctggccgagctgaatgggggtcggggtcatgcgtcacggcgaccagaccgacaggcatatgagcccccgccacctcctgcctaccgcacgggctccctgaagccaaatccagcctcgccgctcccagcgtctccctatgggggccccactccagcctcttacactaccgccagcaccccggctggcccagccttccccgtgcaagtgaaggtggcacagccagtgaggggctgcggcccacccaggcggggagcctctcaggcctctgggcccctcccgggcccccactttcctctcccaggccgaggtgaagtctgggggcctggctataggagccagagagagccagggccaggggccaaagaggaagctgctggggtctctggccctgcaggaagaggaagaggaggcgagcacgggccccaggtgcccctgagccagcctccagaggatgagctggataggctgacgaagaagctggttcacgacatgaaccacccgcccagcggggagtactttggccagtgtggtggctgcggagaagatgtggttggggatggggctggggttgtggcctttgatcgcgtctttcacgtgggctgctttgtatgttctacatgccgggcccagcttcgcggccagcatttctacgccgtggagaggagggcatattgcgagggctgctacgtggccaccctggagaaatgtgccacgtgctcccagcccatcctggaccggatcctgcgggctatggggaaggcctaccaccctggctgcttcacctgcgtggtgtgtcaccgcggcctcgacggcatccccttcacagtggatgctacgagccagatccactgcattgaggactttcacaggaagtttgccccaagatgctcagtgtgcggtggggccataatgcctgagccaggtcaggaggagactgtgagaattgttgctctggatcgaagttttcacattggctgttacaagtgcgaggagtgtgggctgctgctctcctctgagggcgagtgtcagggctgctacccgctggatgggcacatcttgtgcaaggcctgcagcgcctggcgcatccaggagctctcagccaccgtcaccactgactgctgagtcttcctagaagtacctgctgggttctcagttccagttcccatcctttgattgatcactctccctgacatccacctgtatgactttgtcaccaaatgctgtcttctctttctccaatcaagaaataataatccctcgagtttacaaaacaaaaaaaaaaaaaaaaaaaaaaaaaaaaaaaaaaaaaaa

SEQ ID NO: 2100 - DNA, 3973 bp, Homo sapiens
cggacggggccgccccgatgggacgccgcgctccggcccctgcgcgccgctgagccgagcgccccccgctgccgagacccccgccgccaccgccagccgctgccccctcgcccccgcccgggccgggagcctcgtccccgtcccccggaaagctggatttccgaggctggaggcgcctggccggctgggtggggaccaccatgggcaacgcggccggcagcgccgagcagcccgcgggccccgccgcgccgccccccaagcagcccgcgcctcccaagcagccgatgcccgcggccggagagctggaggagaggttcaaccgcgccctgaactgcatgaacttgcccccagacaaggtccagctgctgagccagtatgacaacgagaagaagtgggagctcatctgtgatcaggagcggtttcaagtcaagaatccccccgcagcctacatccagaagctgaagagctatgtggatactggtggggtcagccgaaaggtagcagctgattggatgtccaacctggggtttaagaggcgagttcaggagtccacgcaggtgctacgggagctggagacctccctgaggaccaaccacattgggtgggtgcaggagttcctcaatgaagagaaccgtggcctggatgtgctgctcgagtacctggcctttgcccagtgctctgtcacgtatgacatggagagcacagacaacggggcttccaactcagagaaaaacaagcccctggagcagtctgtggaagacctcagcaagggtccaccctcctccgtgcccaaaagccgccacctgaccatcaagctgaccccagcccacagcaggaaggccctgcggaattcccgcatcgtcagccagaaggacgacgtccacgtctgtattatgtgcctacgcgccatcatgaactaccagtctggcttcagccttgtcatgaaccacccagcctgtgtcaatgagattgctctgagcctcaacaacaagaaccccagaaccaaggctctggtgctggagctgctggcggccgtgtgcttggtgcggggaggacatgacatcatccttgcagcctttgacaacttcaaggaggtgtgtggggagcagcaccgctttgaaaagctgatggaatatttccggaatgaggacagcaacatcgacttcatggtggcctgcatgcagttcatcaacattgtggtacattcggtggagaacatgaacttccgtgtcttcctgcaatatgagttcacccacttgggcctggacctgtacttggagaggcttcggctcaccgagagtgacaagctgcaggtgcagatccaggcgtacctggacaatatttttgatgtgggggcgctgctggaggacacagagaccaagaacgctgtgctggagcacatggaggaactgcaggagcaagtggcgctgctgacagagcggcttcgggacgcggagaacgaatccatggccaagattgcagaactggaaaaacagctaagccaggcgcgcaaggagttggagaccctgcgggagcgcttcagcgaatcgaccgccatgggcgcctccaggcgtcccccagagcctgagaaagcgcctcccgctgccccgacgcggccctcggccctggagctgaaggtggaggagctggaggagaaggggttaatccgtattctgcgggggccgggggatgctgtctccatcgagatcctccccgtcgctgtggcaactccgagcggcggtgatgctccgactccgggggtgccgaccggctcccccagcccagatctcgcacctgcagcagagccggctcccggagcagcgccaccgccgccgcccccactgcccggcctcccctccccgcaggaagccccgccctctgcgcccccacaggccccgcctctccctggcagcccggagcccccgcctgcgccgccgctgcccggagacctgccgcccccacccccgccaccgccaccacctccgggcactgacgggccggtgcctccgccgccgccgccgccgccgccgcctcccggaggtcctcctgatgccctaggaagacgcgactcagaattgggcccaggagtgaaggccaagaagcccatccagactaagttccgaatgccactcttgaactgggtggcactgaaacccagccagatcaccggcactgtcttcacagagctcaatgatgagaaggtgctgcaggagctagacatgagtgattttgaggaacagttcaagaccaagtcccaaggccccagcctggacctcagcgctctcaagagtaaggcagcccagaaggcccccagcaaggcgacactcattgaggccaaccgggccaagaacttggccatcaccctgcggaagggcaacctgggggccgagcgcatctgccaagccattgaggcgtacgacctgcaggctctgggcctggacttcctggagctgctgatgcgcttcctgcccacagagtatgagcgcagcctcatcacccgctttgagcgggagcagcggccaatggaggagctgtcagaggaggaccgcttcatgctatgcttcagccgcatcccgcgcctgccggagcgcatgaccacactcaccttcctgggcaacttcccggacacagcccagctgctcatgccgcaactgaatgccatcattgcagcctcaatgtccatcaagtcctctgacaaactccgccagatcctggagattgtcctggcctttggcaactacatgaacagtagcaagcgtggggcagcctatggcttccggctccagagcctggatgcgctgttggagatgaagtcgactgatcgcaagcagacgctgctgcactacctggtgaaggtcattgctgagaagtacccgcaactcacaggcttccacagcgacctgcacttcctggacaaggcgggctcagtgtccctggacagtgtcctggcggacgtgcgctccctgcagcgaggcctagagttgacacagagagagtttgtgcggcaggatgactgcatggtgctcaaggagttcctgagggccaactcgcccaccatggacaagctgctggcagacagcaagacggctcaggaggcctttgagtctgtggtggagtacttcggagagaaccccaagaccacatccccaggcctgttcttctccctctttagccgcttcattaaggcctacaagaaagctgagcaggaggtggaacagtggaaaaaagaagccgctgcccaggaggcaggcgctgataccccgggcaaaggggagcccccagcacccaagtcaccgccaaaggcccggcggccacagatggacctcatctctgagctgaaacggaggcagcagaaggagccactcatttatgagagcgaccgtgatggggccattgaagacatcatcacagtgatcaagacggtgcccttcacggcccgcaccggcaagcggacatcccggctcctctgtgaggccagcctgggagaagagatgcccctctagcccctcagatctgcggaaccagccctacatccgcgcagacacaggccgccgcagtgcccgtcggcgtcccccgggccccccactgcaggtcacctccgacctctcgctgtagccgctatttctgcaggtggattctgcaggggtgtggggccgtggacaggctgaggctcaaggaaggtggtcctcagctcggctggccgggcagcccctcctccgctgtggcccgcctcaaacgggctggtgcatcctcctcttggccacagagggcagcatcgcccgccccttcccccaaatgctgcttgcagcacccaccctaaagccccctccaaatagccatacttagcctcagcaggagcctggcctgtaacttataaagtgcacctcgcccccgcaagccccagccccgaggaccgtccatggaccttatttttatatgagattaataaagatgtttgcaaaaaaaaaaaaaa

SEQ ID NO: 2101 - DNA, 868 bp, Homo sapiens
tggccaattaagaagttcaggaaaggttatgggcggaagcgccgacctatcaagctgtttgacaccggaagaggacggacctaagatggcggcctccagggggctgggaatagccgctcatgtcggctaacggagcggtgtggggccgcgtgcgaagccgcctccgcgccttccccgagcggctggccgcctgcggggccgaggccgcggcgtacggcaggtgcgtgcaggcctccacggccccgggcggccgcctgagtaaggacttctgcgcgcgggagttcgaggccctgcggagctgcttcgccgctgcggtaggtgggcgcgggccccttccccccttcccagcccttcccctccaagagccagcgggccccggctttcctttgctttcccgttggttcaaggtttgagcgcctgccgcgtgctttagacgccggctgacaaaatcaccgagccatcgacgagcccgcgaaacctcggccgtcctgggcttgtccctgcatgtttgtaaagcgggactggcaccaacctcagaaaggatgggagatgtgtgcaaaaaagcgccttgtaaaacgcgccaagaagacgctggagggaggctgttaggagggactctgagcttcacacctgtctgctgccatgggtgcagagccctagtcctgatggcccctggtggcacatatcgaatgcctagggcagaaaggaagtgggaatggcgaagatgtgacattcctcggtgttagatcctgttttttcttaacaagttgaggcgtgggtagagcaggaattggttttccagcattgtgtccgtaaacctgagttagaataagatgtaacggaagccacgataaagactcggtcaaat

SEQ ID NO: 2102 - DNA, 754 bp, Homo sapiens
tggccaattaagaagttcaggaaaggttatgggcggaagcgccgacctatcaagctgtttgacaccggaagaggacggacctaagatggcggcctccagggggctgggaatagccgctcatgtcggctaacggagcggtgtggggccgcgtgcgaagccgcctccgcgccttccccgagcggctggccgcctgcggggccgaggccgcggcgtacggcaggtgcgtgcaggcctccacggccccgggcggccgcctgagtaaggacttctgcgcgcgggagttcgaggccctgcggagctgcttcgccgctgcggccaagaagacgctggagggaggctgttaggagggactctgagcttcacacctgtctgctgccatgggtgcagagccctagtcctgatggcccctggtggcacatatcgaatgcctagggcagaaaggaagtgggaatggcgaagatgtgacattcctcggtgttagatcctgttttttcttaacaagttgaggcgtgggtagagcaggaattggttttccagcattgtgtccgtaaacctgagttagaataagatgtaacggaagccacgataaagactcggtcaaatcctgcagcctggggcttactgtgtgcagactgcaacatgtgggtcttggcctctctgagatggaatggggcccagagcctttcccccaaagctggcagggctgggacttggggacaccctgcctcaaggtccccgttttaaaacactctca

SEQ ID NO: 2103 - DNA, 637 bp, Homo sapiens
tggccaattaagaagttcaggaaaggttatgggcggaagcgccgacctatcaagctgtttgacaccggaagaggacggacctaagatggcggcctccagggggctgggaatagccgctcatgtcggctaacggagcggtgtggggccgcgtgcgaagccgcctccgcgccttccccgagcggctggccgcctgcggggccgaggccgcggcgtacggcaggtgcgtgcaggcctccacggccccgggcggccgcctgagtaaggacttctgcgcgcgggagttcgaggccctgcggagctgcttcgccgctgcggccaagaagacgctggagggaggctgttaggagggactctgagcttcacacctgtctgctgccatgggtgcagagccctagtcctgatggcccctggtggcacatatcgaatgcctagggcagaaaggaagtgggaatggcgaagatgtgacattcctcggtgttagatcctgttttttcttaacaagttgaggcgtgggtagagcaggaattggttttccagcattgtgtccgtaaacctgagttagaataagatgtaacggaagccacgataaagactcggtcaaatcctgcagcctggggcttactgtaaaaaaagaaaa

SEQ ID NO: 2104 - DNA, 754 bp, Homo sapiens; identical to SEQ ID NO: 2102

SEQ ID NO: 2105 - DNA, 868 bp, Homo sapiens; identical to SEQ ID NO: 2101

SEQ ID NO: 2106 - DNA, 2282 bp, Homo sapiens
gttgtacttttagcttcccccatcctgcaaggccactcaaccatgtgctagctggagtgatctttattcacaatgtctttacaaaggctcctgcaacacagcagcaatggcaatttggcggacttctgcgctgggccagcgtatagctcttactccacactcaccggcagccttacgatggacgataatagaaggattcaaatgctagcagacacggtggctactctgcctcggggacgaaagcagcttgctttgaccagatcaagttctttaagtgacttttcctggtctcaaagaaagcttgttactgtggagaagcaggataatgaaacatttggatttgaaattcagtcttacaggccccagaatcagaatgcctgctcctcggaaatgttcactttgatatgcaaaatacaggaggacagcccagctcactgtgctggcctgcaagctggtgatgtccttgcaaatatcaatggtgtgagcacagaaggttttacctacaaacaagtcgttgacctgatcagatcgtccggaaacctgctaacgatagagactcttaatggaacaatgattctgaaaagaacggagcttgaagcaaagctgcaggttttaaagcaaactttgaaacaaaaatgggtggagtacagatctctgcagttacaggaacatcgtctgcttcatggtgatgcagctaattgccccagtttggaaaacatggacttggatgaattgtctttgtttggacccctgcctgggccaggcccagcccttgtggaccggaatcgattatccagtgagagcagctgtaagagctggctgagctccatgacgatggacagtgaagatggctaccagacgtgtgtgtctgaggactccagcaggggtgccttcagtcggcagacgagtacagatgatgagtgctttatccccaaggagggggatgattttctgaggaggtcatcttcaaggaggaaccggagcatcagtaacaccagcagcggatccatgtctcccttgtgggagggcaacttatcaagcatgtttgggaccctgccccggaagagcagaaagggaagtgtccgaaagcaactcttgaaatttatccctggccttcatcgtgctgtggaagaggaagaaagtcgcttttgacggattgtggtgtcctttcaaattagcttatttcacaaatatctctagactcacccagatcccagcttggtgggaaagtgcagaagaattgcaaaactgacatcccatttcacagcaatagtgacctttatttaaattgttgtgttatagtttatgcttcttaaatcatttttcaacctaaacagccaatttctaagcagacaggaaaactaaataataagttaattaatataacaaagatgcaggttcctgctcattccagtaatgtctttgaaagcaaaactaatatttattttctagattatccctgtgaataattgagaactttttggagtcaagtatgaataaaggtgtggcagaatataataatctggactattttctataggataattgctgggttataaaatcttaggtttgcttatgcccagtagctcctgcggaggcttaataataggcaattttgaatttgttcaaacctgtaatggcttgtaaacaaagatgaccatcagctgtttctcacatctatagtgacaataaagcgggaagtataagatttaataggaggggttaaggttcatgagaaccatggaaagatgtggtctgagatgggtgctgcaaagatcataataaagtcatttttatagacagtctaaacaaaatgggtggggatgtcatgttttttgcccaattcagcttttgttctgcctgaacattaatggcaagtctagaactctccgaatcctacagctttgtaattttttttctacaaatgtctaacatccaaaactgagggttgggaaaaggacttccctcctgtagtttttttcatattacttctcactttatatcttatattctaaatagctatcacctcagcagtcttttgcctattggttatgttagtatcacattacttctagcctttcaattactccatgttttatttaatatccattgaagtctatgaattctctgttctggtggcacagctattcataacctatattctagagtagacaatctggactatgtaataaatagtctgctgattttaaaaaaaaaaaaaaaaaaaaaaaaaaaaaaaaaaaaaaaaaaaaaaaaaaaaaaaaaaaaaaaaaaaaaaaaaa

SEQ ID NO: 2107 - DNA, 3431 bp, Homo sapiens
gggggaggagggcggtcgtccggggttaggttgagggggggcgtcggtccgttctgggcgggggatgactcacagcccatcccatctccccgacgccgcccgcccgcgcagtgctagctccatggcttagcggaggaggcggcagtggcgagctggggggaggggggactcttattttgttagggggaccgggccgaggcccgaccggcctggcagggctcgcccggggccgggcgtcatgtctcatgcggccgaaccagctcgggatggcgtagaggccagcgcggagggccctcgagccgtgttcgtgctgttggaggagcgcaggccggccgactcggctcagctgctcagcctgaactctttgcttccggaatccgggattgttgctgacatagaattagaaaacgtccttgatcctgacagcttctacgagctcaaaagccaacccttaccccttcgctcaagcctcccaatatcactgcaggccacaccagccaccccagctacactctctgcatcgtcttctgcagggggctccaggacccctgccatgtcgtcatcttcttcatcgagggtcttgctgcggcagcagctaatgcgggcccaggcgcaggagcaggagaggcgtgagcgtcgggaacaggccgccgcggctcccttccccagtcctgcacctgcctctcctgccatctctgtggttggcgtctctgctgggggccacacattgagccgtccaccccctgctcaggtgcccagggaggtgctcaaggtgcagacccatctggagaacccaacgcgctaccacctgcagcaggcgcgccggcagcaggtgaaacagtacctgtccaccacactcgggcccaagctggcttcccaggccctcaccccaccgccggggcccgcaagtgcccagccactgcctgcccctgaggctgcccacactaccggccccacaggcagtgcgcccaacagccccatggcgctgctcaccatcgggtccagctcagagaaggagattgatgatgtcattgatgagatcatcagcctggagtccagttacaatgatgaaatgctcagctatctgcccggaggcaccacaggactgcagctccccagcacgctgcctgtgtcagggaatctgcttgatgtgtacagtagtcaaggcgtggccacaccagccatcactgtcagcaactcctgcccagctgagctgcccaacatcaaacgggagatctctgagaccgaggcaaaggcccttttgaaggaacggcagaagaaagacaatcacaacctaattgagcgtcgcaggcgattcaacattaacgacaggatcaaggaactgggcactctcatccctaagtccagtgacccggagatgcgctggaacaagggcaccatcctgaaggcctctgtggattatatccgcaagctgcagaaggagcagcagcgctccaaagacctggagagccggcagcgatccctggagcaggccaaccgcagcctgcagctccgaattcaggaactagaactgcaggcccagatccatggcctgccagtgcctcccactccagggctgctttccttggccacgacttcggcttctgacagcctcaagccagagcagctggacattgaggaggagggcaggccaggcgcagcaacgttccatgtaggggggggacctgcccagaatgctccccatcagcagccccctgcaccgccctcagatgcccttctggacctgcactttcccagcgaccacctgggggacctgggagaccccttccacctggggctggaggacattctgatggaggaggaggagggggtggtgggaggactgtcggggggtgccctgtccccactgcgggctgcctccgatcccctgctctcttcagtgtcccctgctgtctccaaggccagcagccgccgcagcagcttcagcatggaagaggagtcctgatcaggcctcacccctcccctgggactttcccacccaggaaaggaggaccagtcaggatgaggccccgccttttcccccaccctcccatgagactgccctgcccaggtatcctgggggaagaggagatgtgatcaggccccacccctgtaatcaggcaaggaggaggagtcagatgaggccctgcaccttccccaaaggaaccgcccagtgcaggtatttcagaaggagaaggctggagaaggacatgagatcagggcctgccccctggggatcacagcctcacccctgcccctgtgggactcatccttgcccaggtgagggaaggagacaggatgaggtctcgaccctgtcccctagggactgtcctagccaggtctcctgggaaagggagatgtcaggatgttgctccatcctttgtcttggaaccaccagtctagtccgtcctggcacagaagaggagtcaagtaatggaggtcccagccctgggggtttaagctctgccccttccccatgaaccctgccctgctctgcccaggcaaggaacagaagtgaggatgagacccagccccttcccctgggaactctcctggccttctaggaatggaggagccaggccccaccccttccctataggaacagcccagcacaggtatttcaggtgtgaaagaatcagtaggaccaggccaccgctagtgcttgtggagatcacagccccacccttgtccctcagcaacatcccatctaagcattccacactgcagggaggagtggtacttaagctcccctgccttaacctgggaccaacctgacctaacctaggagggctctgagccaaccttgctcttggggaaggggacagattatgaaatttcatggatgaattttccagacctatatctggagtgagaggcccccacccttgggcagagtcctgccttcttccttgaggggcagtttgggaaggtgatgggtattagtgggggactgagttcaggttaccagaaccagtacctcagtattctttttcaacatgtagggcaagaggatgaaggaaggggctatcctgggacctccccagcccaggaaaaactggaagccttcccccagcaaggcagaagcttggaggagggttgtaaaagcatattgtaccccctcatttgtttatctgatttttttattgctccgcatactgagaatctaggccaccccaacctctgttccccacccagttcttcatttggaggaatcaccccatttcagagttatcaagagacactcccccctccattcccacccctcatacctacacccaaggttgtcagctttggattgctggggccaggccccatggagggtatactgaggggtctataggtttgtgattaaaataataaaagctaggcgtgtttgatgcgcttttaactttgaaaaaaaaaaaaaaaaaaaaaaaaaaaaaaaaaaaaaa

SEQ ID NO: 2108 - DNA, 3641 bp, Homo sapiens
accggctgcagtcggctgtgccgggagggtaggatggcgtctggccgatgcggtgatagcaccgaaagcagacggccgccaggcgctccccctaccccccgaagtttctccccagcggcgggggatgggggtaggcggttcctctgttctttctgcgttccccgcggcctcttaccacagagacgcgggcctccaccgtcctagccctcccgccctgttctctagtgcggactagagcgtctcctcgccatttcctgtcgccctggggccccgcggggaaaaagggggagtagcaggacagcggagggaagtcgcgagcttaggtggtgtgtagacgccggaagtgttgggaaggaggccggaagctaggggcggggccaggaagtgaggaggggcgggggtttatgaggagtccaagggagcattggggcagacttgtactcagagccacctgagggacttggcggtggcgcccagcactgtcccctcccctcgtagagacacggttgtcgtttgggagtagggaacactgtgttggggtgggttgtcggcaggacatctctctggctgctcttggggcgaggtgtggaggggcagggctgggggtggagccgggtcgccagggcgtcggtagggaagacccccgcccctcgcccccccaccgaacctctacactggctggctggacactaagatggctgccgttgccatgacacccaaccctgtgcagacccttcaggaggaggcggtgtgcgccatctgcctcgattacttcacggaccccgtgtccatcggctgcgggcacaacttctgccgagtttgtgtaacccagttgtggggtggggaggatgaggaggacagagatgagttagatcgggaggaggaggaggaggacggagaggaggaggaagtggaggctgtgggggctggcgcggggtgggacacccccatgcgggatgaagactacgagggtgacatggaggaggaggtcgaggaggaagaagagggtgtgttctggaccagtggcatgagcaggtccagctgggacaacatggactatgtgtgggaggaggaggacgaggaggaagacctggactactacttgggggacatggaggaggaggacctgaggggggaggatgaggaggacgaggaggaagtgctggaggaggttgaggaagaggatctagaccccgtcaccccactgcccccgcctccagcccctcggaggtgcttcacatgccctcagtgccgaaagagctttcctcggcggagcttccgccccaacctgcagctggccaatatggtccaggtgattcggcagatgcacccaacccctggtcgagggagccgcgtgaccgatcagggcatctgtcccaaacaccaagaagccctgaagctcttctgcgaggtagacgaagaggccatctgtgtggtgtgccgagaatccaggagccacaaacagcacagcgtggtgccattggaggaggtggtgcaggagtacaaggccaaactgcaggggcacgtggaaccactgaggaagcacctggaggcagtgcagaagatgaaagccaaggaggagaggcgagtgacagaactgaagagccagatgaagtcagagctggcagcggtggcctcggagtttgggcgactgacacggtttctggctgaagagcaggcagggctggaacggcgtctcagagagatgcatgaagcccagctggggcgtgcgggagccgcggctagtcgccttgcagaacaggccgcccagctcagccgcctgctggcagaggcccaggagcggagccagcaggggggtctccggctgctccaggacatcaaggagactttcaataggtgtgaagaggtacagctgcagcccccagaggtctggtcccctgacccgtgccaaccccatagccatgacttcctgacagatgccatcgtgaggaaaatgagccggatgttctgtcaggctgcgagagtggacctgacgctggaccctgacacggctcacccggccctgatgctgtcccctgaccgccggggggtccgcctggcagagcggcggcaggaggttgctgaccatcccaagcgcttctcggccgactgctgcgtactgggggcccagggcttccgctccggccggcactactgggaggtagaggtgggcgggcggcggggctgggcggtgggtgctgcccgtgaatcaacccatcataaggaaaaggtgggccctgggggttcctccgtgggcagcggggatgccagctcctcgcgccatcaccatcgccgccgccggctccacctgccccagcagcccctgctccagcgggaagtgtggtgcgtgggcaccaacggcaaacgctatcaggcccagagctccacagaacagacgctgctgagccccagtgagaaaccaaggcgctttggtgtgtacctggactatgaagctgggcgcctgggcttctacaacgcagagactctagcccacgtgcacaccttctcggctgccttcctgggcgagcgtgtctttcctttcttccgggtgctctccaagggcacccgcatcaagctctgcccttgattatcctgccacccgcaggggcccctctgtcagcacttggggggtgggtggtggagggtggcccgtaagtttgagggctcaaaggctcttcccactgcttgttactgtgttgcttcccactcccccttgaccccaggcccctgcttctccctctaggagcctaaagaaccctcctggcctccagctcagccttctctcacctactatgtctgtccaacaggtctgcatgggtccctgataatgagaacagctgcctggtcttctctcccagtctgcctagcccagccctgggactggaatttgagtaggggatgaggggaaattgtaatttcattccttaacttccttttccccacccctgctcttcaacctctttatcagttctgaggctggagggtttgggcaaggcaacatccccattccaattccattttctgatgcagattttagctgagggatttggaagccatttggggaggcaggctgggccaaagggtagagctgggtaataaatgtctattctcctggggaggagggattctaaactttccttccgtcctcaatttctacctccatagaccggccagaatttagcttcacttgagagagatctggaatggtcgccatgattgaaaccacgcaccattacatcatcattacattaattacatcaacataaattatttcttcccccttcccttttccagcactcaaccaaggagcaaagctcatcccaccccacacccctcccaggtctgctcactgccaggctcctctcccctttgttcagtggagctggcttttctcccagcccctttccatgcctttcactccatttggcaagctctgagggggagcctggggacgggtttgggtccccaggaggagagccttgggtataatctatttttctaggagcctcttgccttgtcacttgcagctttcgccctctgctttgatggctgaggtgaactcatgttctttgggaaaagggaaggcgtgctgtggaaataaaatgtttatttgcttctctaaaaaaaaaaaaaaaaaaaaa

SEQ ID NO: 2109 - DNA, 2697 bp, Homo sapiens
accggctgcagtcggctgtgccgggagggtaggatggcgtctggccgatgcggtgatagcaccgaaagcagacggccgccaggcgctccccctaccccccgaagtttctccccagcggcgggggatgggggtaggcggttcctctgttctttctgcgttccccgcggcctcttaccacagagacgcgggcctccaccgtcctagccctcccgccctgttctctagtgcggactagagcgtctcctcgccatttcctgtcgccctggggccccgcggggaaaaagggggagtagcaggacagcggagggaagtcgcgagcttaggtggtgtgtagacgccggaagtgttgggaaggaggccggaagctaggggcggggccaggaagtgaggaggggcgggggtttatgaggagtccaagggagcattggggcagacttgtactcagagccacctgagggacttggcggtggcgcccagcactgtcccctcccctcgtagagacacggttgtcgtttgggagtagggaacactgtgttggggtgggttgtcggcaggacatctctctggctgctcttggggcgaggtgtggaggggcagggctgggggtggagccgggtcgccagggcgtcggtagggaagacccccgcccctcgcccccccaccgaacctctacactggctggctggacactaagatggctgccgttgccatgacacccaaccctgtgcagacccttcaggaggaggcggtgtgcgccatctgcctcgattacttcacggaccccgtgtccatcggctgcgggcacaacttctgccgagtttgtgtaacccagttgtggggtggggaggatgaggaggacagagatgagttagatcgggaggaggaggaggaggacggagaggaggaggaagtggaggctgtgggggctggcgcggggtgggacacccccatgcgggatgaagactacgagggtgacatggaggaggaggtcgaggaggaagaagagggtgtgttctggaccagtggcatgagcaggtccagctgggacaacatggactatgtgtgggaggaggaggacgaggaggaagacctggactactacttgggggacatggaggaggaggacctgaggggggaggatgaggaggacgaggaggaagtgctggaggaggttgaggaagaggatctagaccccgtcaccccactgcccccgcctccagcccctcggaggtgcttcacatgccctcagtgccgaaagagctttcctcggcggagcttccgccccaacctgcagctggccaatatggtccaggtgattcggcagatgcacccaacccctggtcgagggagccgcgtgaccgatcagggcatctgtcccaaacaccaagaagccctgaagctcttctgcgaggtagacgaagaggccatctgtgtggtgtgccgagaatccaggagccacaaacagcacagcgtggtgccattggaggaggtggtgcaggagtacaaggccaaactgcaggggcacgtggaaccactgaggaagcacctggaggcagtgcagaagatgaaagccaaggaggagaggcgagtgacagaactgaagagccagatgaagtcagagctggcagcggtggcctcggagtttgggcgactgacacggtttctggctgaagagcaggcagggctggaacggcgtctcagagagatgcatgaagcccagctggggcgtgcgggagccgcggctagtcgccttgcagaacaggccgcccagctcagccgcctgctggcagaggcccaggagcggagccagcaggggggtctccggctgctccaggacatcaaggagactttcaataggtgtgaagaggtacagctgcagcccccagaggtctggtcccctgacccgtgccaaccccatagccatgacttcctgacagatgccatcgtgaggaaaatgagccggatgttctgtcaggctgcgagagtggacctgacgctggaccctgacacggctcacccggccctgatgctgtcccctgaccgccggggggtccgcctggcagagcggcggcaggaggttgctgaccatcccaagcgcttctcggccgactgctgcgtactgggggcccagggcttccgctccggccggcactactgggaggagcctaaagaaccctcctggcctccagctcagccttctctcacctactatgtctgtccaacagaccggccagaatttagcttcacttgagagagatctggaatggtcgccatgattgaaaccacgcaccattacatcatcattacattaattacatcaacataaattatttcttcccccttcccttttccagcactcaaccaaggagcaaagctcatcccaccccacacccctcccaggtctgctcactgccaggctcctctcccctttgttcagtggagctggcttttctcccagcccctttccatgcctttcactccatttggcaagctctgagggggagcctggggacgggtttgggtccccaggaggagagccttgggtataatctatttttctaggagcctcttgccttgtcacttgcagctttcgccctctgctttgatggctgaggtgaactcatgttctttgggaaaagggaaggcgtgctgtggaaataaaatgtttatttgcttctctaaaaaaaaaaaaaaaaa

SEQ ID NO: 2110 - DNA, 1878 bp, Homo sapiens
ctgacactgaacgccgcttgtcccctccggcttgccgtcctcgcagccatggcggccgccgcgctcccagcatggctgtctctgcagtcgagggcaaggactctgcgtgcattctccactgccgtctactcggccactccggtcccgacacctagcctgccggaaagaacacccggaaatgaaaggccaccaagaagaaaggcactacctcctaggacagagaaaatggctgttgaccaggactggcctagtgtttacccagttgcagcaccatttaaaccctctgcagtacctcttcctgttcgaatgggttatccagtaaaaaagggcgtgcccatggcaaaggagggaaatctagaacttttaaagattcccaattttctgcatttgactcctgtagcaattaaaaagcactgtgaagcccttaaagatttttgcactgagtggccagccgcactggacagtgacgagaaatgtgagaagcattttccaattgaaattgacagcactgattatgtttcatcaggaccatctgttcggaaccccagagcacgagtagtagtcttaagagtaaagctttccagtttgaatttagatgatcacgcaaagaagaaattaattaaacttgtaggagagcgatactgcaagaccacagatgtgcttaccatcaaaacagataggtgccctttaaggaggcagaattacgattatgcagtgtatctactaacagtgttataccatgagtcttggaatactgaagaatgggaaaaaagtaagactgaagcagacatggaagagtatatatgggaaaatagctcatcagaaagaaatatcctggaaacgcttctccagatgaaagctgctgagaaaaatatggaaataaataaagaagagctccttggtactaaagaaattgaagagtacaaaaagtctgttgttagtcttaaaaatgaggaggaaaatgaaaattccatttctcagtacaaagaatccgtgaagagactattaaatgtgacatgaattatggagtagaaaaatctgcttgatttattaattttatgatatatgtgatcagtatctaatttgatataaaattgaaaatgttaaaaaatcattttttttcctcagagttaaaattatttccctcatactaatgcttaatggcaatgattactccagagttttttaatttttacactggggcaatagactaggaggtctctgatttcttcttggtctaaagtgttttgattttatttctacataatagctttggtattcatgtatatacatgcatttaattgtgattttatcacctttcccatttctttccccacaagctggcatttcagtagttgcttttgaataatggttttggttacctgggaaggcaggcccagaacccatttccttgacttgcagttccgggctgtgttcacatgactgctgtctagctgatgcatttttcacatttgtcaactctggttagaaacaggtcctcaggagtattctctaacctgatattttctaaaaagatatgttgattcaactttgtttagcatcctactttctagattgtggggctcattttgccagggccaagctaccagaaaagtagaagtggagattacctggtatgtatctctctgggtgccccagttagagctgccacagctcaggaaaaagatgaggcataacgaccttgaatgtaattggagtaagtgacaaaataagaactaccctgggaaaccctgcattcaatgtagctgtcaattcagtatttttaagtacacctgtcagctgtttcttaccacttcgatggttgtgattaatttaaaatcaaaataaaggaattactgagtttaaaaaaaaaaaaaa

SEQ ID NO: 2111 - DNA, 2179 bp, Homo sapiens
ttaaactgtaaactgagtgcacacatcttaaccctaaatacatacacacatacacacaaccagccacaaaatagtgttatttccttaaatgccaaacactgtctagttctagaagtgaaaaggaccttcttgtcttttcagaagtgtgtgttttgagtatgtaatgagattacctttctgtggctttggagaattaatttcagcgctttattgtcagatcttctctgtaagaaatgtgatagggatttcccattcaatctggaactaagaattcagattgacacttgagctttgtacctcagatagcgtttttcctcatctcctgttatatatcaagcagctgagattggtttttaaaaaagtgaagattgaattgtcttcacacatttattgtgaacttgcagaaaatggaaaggattatgctttaaagacagttggcttggctggatagaaaagatccctctgtcctgtttccctgtcctccttcccacatcgatttaaaaaattagatgcaaatgcaaaatccttaaattatagatttatgataaatttaaattctggtagaatcaaggttttataacatttaaagtgtctgacactaagtgtatataatcttttaagaaacgtcttcttaacagcgcatggtattctgtgactgttcgtgtaccatgaatattcttattgggttctagagttagttactgactcttgaagatgggcatctaatggtcctcctgtggaagtggagagcagctctccactgtttgataacatttaaagccaagggtgaaccactcaagaaacatttggtggttataatatttttttgttgttgttaagtaccatcaataaaactgaaaaatctcttaagtacctgactcctgcagtgatacaactgcagtgataaaacttttagctttttacatcaggggtattaggtattttctcacagaaatagccttttgaggtgaaattcacataacatacaattaaccattgtaaaatgaacaattcagtggcgtgtaagagtatgtttacaatgttgagcaaccatcacctctgtctagttgcaaaatgttttcatcactccaaaagaaactcctttattcatcatagcccaaagttggaagtattttcttgattgggctcttgattacatggatgcatctgagtcattgaattgaagcctaagatgtgcttaatttcactgtgtgtaagtttcacctcagttaacaagagagaacagaacaaaccaaaaatcttaattcttttgaaaaaaagactttctggctgctttattaaagaagccaggggaacaaggttaaaaggaaatcagttagcagtgaccaaggcaagagatgatggtggcttggctgaagatggtgacagtggaggtggtaaggtgatcagattctggatatattttgaaggttgagctaatttggtcagctgatgggcataatggatgtgagggaaagaaagttggaaaggatgatgtgaagatttttaatgggatggaataggtgtttaatgaacagccatttaacaacatcagggtaatttcatcttgtgtatcatcctagagtataaccctgttgtaaagaatgatacacaagacaaacttaccctgatgttgttaaatatatgttagatgaccagttgctttgatttctttgctcaataaacattggattacagctggtttgctgtgtggcatgcctacatggagggaacacactgagccaatgatttcatcatctgggtccctttggtttatatcagtttccaacatgacttgtttgtggggcttgtgggaggggcacatacatcggccccaggattctaacatctcctggtctctgaggttataattttcacttaacattgtcgagttggcattttggttttagtccaatggttcagttctttgaaactgactccagagatggctctgttcattaatagattgttttgttgaccctgtgaggattagtctgtggatcttggaaattcggcaggtgactacaattctagaaggcctcttgtgagatataaggtgttttccttaagtgacatggccctgcgttgcaaagctgagaagtaatatgaaggagcgttttgtaagtttgaatctctataatcaaaaaccagactaatgacacattcgcttttagaactt

SEQ ID NO: 2112 - DNA, 3471 bp, Homo sapiens
tttgctgaggggcaggcacaggagtcctggctgagctcatggcctgaggctgcctagcggccacggggaatggttgcaatggcggaggcagaggcaggggtggcagtggaggtccgtggactgccccctgccgtgcccgacgagctgctcactctctactttgaaaaccgccgacgctctggagggggacctgtgttgagctggcagagactgggctgtgggggcgtcctcaccttcagagagcctgcagacgccgagagggtcttggcccaggcagatcatgaactacatggtgcccagctgagcctgcggccagctccaccacgagcccctgcacgcctgctgctccaaggactgccccctggcaccacgccccagcgcttggagcagcatgtccaggccttgctgcgggcctcggggctcccagtacagccttgctgtgccttggccagcccccggccagaccgggctctggtccagttgcccaagcccctttctgaggcagatgtccgtgtcctggaggagcaggcccagaatctgggcctggaggggaccttggtgtccctggcccgggttccccaggcccgagcggtgcgtgtggtgggggatggtgcctctgtggacctgctgttgctggagttgtacctggagaatgagcgccgcagtggtggggggcccctggaggacctgcaacgcctacccgggcccctgggcactgttgcctccttccagcagtggcaagtggcagaacgagtgttgcagcaggagcaccggttgcagggctcagagctgagccttgtcccccactacgacgtcctggagcccgaggagctggctgagaacaccagtggaggggaccacccgtccacccaggggcctagggctaccaagcatgctctcctgaggaccggagggttggtgacggctctgcagggtgcagggactgtgacaatgggctctggcgaggaaccagggcagtcaggggcctctctgaggacaggtcccatagtgcagggtagagggattatgacaacaggctctggccaggaaccagggcagtcagggacctctctgaggacaggtcccatggggtctctgggacaggcagagcaagtcagctcgatgcccatggggtctctggaacatgaggggctggtaagcctgaggcctgtggggttgcaggaacaggaggggcccatgagcctggggcctgtggggtctgcaggcccagtggagacctctaaggggttgccggggcaggagggcctggtggaaattgccatggactcaccagagcaagaggggctggtgggtcccatggagatcaccatggggtctctggagaaggcagggcctgtgagcccaggatgtgtgaagctggcagggcaggagggcctggtggagatggtgctattgatggagccaggggcgatgcgcttcctgcagctctaccatgaggaccttcttgcgggcctgggagacgtcgctctcttgccacttgaaggaccggatatgactggctttcggctctgtggagcccaggcttcctgccaggcggctgaggagtttctgcggagcctgctgggcagcattagctgccatgtgttgtgcctggagcactcgggcagcgccaggtttctcctgggcccagaagggcagcaccttctccaggggctggaggctcagttccagtgtgtctttgggacagagcgcctggccacagccacgttggacacaggccttgaagaggtggaccctaccgaggccctcccagtgctccctggcaacgcccacaccctgtggaccccagacagtacaggtggtgaccaggaggacgtgagcctggaggaggtccgagaactgctggccaccctggagggcctagacctagacggggaggactggctgcctcgggagctggaggaggaagggcctcaggagcagccagaggaggaggcgaccccagggcatgaggaggaggagcctgtggcccccagcactgtggcacccaggtggctggaggaggaggccgctctgcagctggccctccaccggtcactggagcctcaaggtcaggtggctgagcaggaggaggctgctgccctgcggcaagccctaaccctctccctgctggagcagcccccgttggaggcagaagagcccccagatggggggactgatggcaaggcccagctggtggtgcactcggcctttgagcaggatgtggaggagctggaccgggcgctcagggctgccttggaggtccacgtccaggaggagacggtggggccctggcgccgcacactgcctgcagagctgcgtgctcgcctggagcggtgccatggtgtgagtgttgccctgcgtggtgactgcaccatcctccgtggcttcggggcccaccctgcccgtgctgcccgccacttggtggcacttctggctggcccctgggatcagagtttggcctttcccttggcagcttcaggccctaccttggcggggcagacgctgaaggggccctggaacaacctggagcgtctggcagagaacaccggggagttccaggaggtggtgcgggccttctacgacaccctggacgctgcccgcagcagcatccgcgtcgttcgtgtggagcgcgtgtcgcacccgctgctgcagcagcagtatgagctgtaccgggagcgcctgctgcagcgatgcgagcggcgcccggtggagcaggtgctgtaccacggcacgacggcaccggcagtgcctgacatctgcgcccacggcttcaaccgcagcttctgcggccgcaacgccacggtctacgggaagggcgtgtatttcgccaagcgcgcctccctgtcggtgcaggaccgctactcgccccccaacgccgatggccataaggcggtgttcgtggcacgggtgctgactggcgactacgggcagggccgccgcggtctgcgggcgccccctctgcggggtcctggccacgtgctcctgcgctacgacagcgccgtggactgcatctgccagcccagcatcttcgtcatcttccacgacacccaggcgctgcccacccacctcatcacctgcgagcacgtgccccgcgcttcccccgacgacccctctgggctcccgggccgctccccagacacttaaccgaaggggccaccctctggcctcctgcttcccaggctcccagctccgcacaggctgatgctccccgcccccaactgtggccgcctgagctgtccccggggacgcccctgcctccctctgcgggctccagaaggcggtgtgggggatggcggtcagcagcggccgagaggggctgggctaggtcccagcctgggccgaccccaccaccaggggtcagcagagcccaggaggcgacactgcccgcccgccgctcccagacctcgcccgagtcggctctgttgtttgaataaacgtgaacgtgaacccaggcggaagggacccggg

SEQ ID NO: 2113 - DNA, 5133 bp, Homo sapiens
cctctttcaccctgtctaggttgccagcaaatcccacgggcctcctgacgctgcccctggggccacaggtccctcgagtgctggaaggatgaaggattcctgcatcactgtgatggccatggcgctgctgtctgggttctttttcttcgcgccggcctcgagctacaacctggacgtgcggggcgcgcggagcttctccccaccgcgcgccgggaggcactttggataccgcgtcctgcaggtcggaaacggggtcatcgtgggagctccaggggaggggaacagcacaggaagcctctatcagtgccagtcgggcacaggacactgcctgccagtcaccctgagaggttccaactatacctccaagtacttgggaatgaccttggcaacagaccccacagatggaagcattttggcctgtgaccctgggctgtctcgaacgtgtgaccagaacacctatctgagtggcctgtgttacctcttccgccagaatctgcagggtcccatgctgcaggggcgccctggttttcaggaatgtatcaagggcaacgtagacctggtatttctgtttgatggttcgatgagcttgcagccagatgaatttcagaaaattctggacttcatgaaggatgtgatgaagaaactcagcaacacttcgtaccagtttgctgctgttcagttttccacaagctacaaaacagaatttgatttctcagattatgttaaatggaaggaccctgatgctctgctgaagcatgtaaagcacatgttgctgttgaccaatacctttggtgccatcaattatgtcgcgacagaggtgttccgggaggagctgggggcccggccagatgccaccaaagtgcttatcatcatcacggatggggaggccactgacagtggcaacatcgatgcggccaaagacatcatccgctacatcatcgggattggaaagcattttcagaccaaggagagtcaggagaccctccacaaatttgcatcaaaacccgcgagcgagtttgtgaaaattctggacacatttgagaagctgaaagatctattcactgagctgcagaagaagatctatgtcattgagggcacaagcaaacaggacctgacttccttcaacatggagctgtcctccagcggcatcagtgctgacctcagcaggggccatgcagtcgtgggggcagtaggagccaaggactgggctgggggctttcttgacctgaaggcagacctgcaggatgacacatttattgggaatgaaccattgacaccagaagtgagagcaggctatttgggttacaccgtgacctggctgccctcccggcaaaagacttcgttgctggcctcgggagcccctcgataccagcacatgggccgagtgctgctgttccaagagccacagggcggaggacactggagccaggtccagacaatccatgggacccagattggctcttatttcggtggggagctgtgtggcgtcgacgtggaccaagatggggagacagagctgctgctgattggtgccccactgttctatggggagcagagaggaggccgggtgtttatctaccagagaagacagttggggtttgaagaagtctcagagctgcagggggaccccggctacccactcgggcggtttggagaagccatcactgctctgacagacatcaacggcgatgggctggtagacgtggctgtgggggcccctctggaggagcagggggctgtgtacatcttcaatgggaggcacggggggcttagtccccagccaagtcagcggatagaagggacccaagtgctctcaggaattcagtggtttggacgctccatccatggggtgaaggaccttgaaggggatggcttggcagatgtggctgtgggggctgagagccagatgatcgtgctgagctcccggcccgtggtggatatggtcaccctgatgtccttctctccagctgagatcccagtgcatgaagtggagtgctcctattcaaccagtaacaagatgaaagaaggagttaatatcacaatctgtttccagatcaagtctctctacccccagttccaaggccgcctggttgccaatctcacttacactctgcagctggatggccaccggaccagaagacgggggttgttcccaggagggagacatgaactcagaaggaatatagctgtcaccaccagcatgtcatgcactgacttctcatttcatttcccggtatgtgttcaagacctcatctcccccatcaatgtttccctgaatttctctctttgggaggaggaagggacaccgagggaccaaagggcgcagggcaaggacataccgcccatcctgagaccctccctgcactcggaaacctgggagatcccttttgagaagaactgtggggaggacaagaagtgtgaggcaaacttgagagtgtccttctctcctgcaagatccagagccctgcgtctaactgcttttgccagcctctctgtggagctgagcctgagtaacttggaagaagatgcttactgggtccagctggacctgcacttccccccgggactctccttccgcaaggtggagatgctgaagccccatagccagatacctgtgagctgcgaggagcttcctgaagagtccaggcttctgtccagggcattatcttgcaatgtgagctctcccatcttcaaagcaggccactcggttgctctgcagatgatgtttaatacactggtaaacagctcctggggggactcggttgaattgcacgccaatgtgacctgtaacaatgaggactcagacctcctggaggacaactcagccactaccatcatccccatcctgtaccccatcaacatcctcatccaggaccaagaagactccacactctatgtcagtttcacccccaaaggccccaagatccaccaagtcaagcacatgtaccaggtgaggatccagccttccatccacgaccacaacatacccaccctggaggctgtggttggggtgccacagcctcccagcgaggggcccatcacacaccagtggagcgtgcagatggagcctcccgtgccctgccactatgaggatctggagaggctcccggatgcagctgagccttgtctccccggagccctgttccgctgccctgttgtcttcaggcaggagatcctcgtccaagtgatcgggactctggagctggtgggagagatcgaggcctcttccatgttcagcctctgcagctccctctccatctccttcaacagcagcaagcatttccacctctatggcagcaacgcctccctggcccaggttgtcatgaaggttgacgtggtgtatgagaagcagatgctctacctctacgtgctgagcggcatcggggggctgctgctgctgctgctcattttcatagtgctgtacaaggttggtttcttcaaacggaacctgaaggagaagatggaggctggcagaggtgtcccgaatggaatccctgcagaagactctgagcagctggcatctgggcaagaggctggggatcccggctgcctgaagcccctccatgagaaggactctgagagtggtggtggcaaggactgagtccaggcctgtgaggtgcagagtgcccagaactggactcaggatgcccagggccactctgcctctgcctgcattctgccgtgtgccctcgggcgagtcactgcctctccctggccctcagtttccctatctcgaacatggaactcattcctgaatgtctcctttgcaggctcatagggaagacctgctgagggaccagccaagagggctgcaaaagtgagggcttgtcattaccagacggttcaccagcctctcttggttccttccttggaagagaatgtctgatctaaatgtggagaaactgtagtctcaggacctagggatgttctggccctcacccctgccctgggatgtccacagatgcctccaccccccagaacctgtccttgcacactcccctgcactggagtccagtctcttctgctggcagaaagcaaatgtgacctgtgtcactacgtgactgtggcacacgccttgttcttggccaaagaccaaattccttggcatgccttccagcaccctgcaaaatgagaccctcgtggccttccccagcctcttctagagccgtgatgcctccctgttgaagctctggtgacaccagcctttctcccaggccaggctccttcctgtcttcctgcattcacccagacagctccctctgcctgaaccttccatctcgcccacccctccttccttgaccagcagatcccagctcacgtcacacacttggttgggtcctcacatctttcacacttccaccaccctgcactactccctcaaagcacacgtcatgtttcttcatccggcagcctggatgttttttccctgtttaatgattgacgtacttagcagctatctctcagtgaactgtgagggtaaaggctatacttgtcttgttcaccttgggatgacgccgcatgatatgtcagggcgtgggacatctagtaggtgcttgacataatttcactgaattaatgacagagccagtgggaagatacagaaaaagagggccggggctgggcgcggtggttcacgcctgtaatcccagcactttgggaggccaaggagggtggatcacctgaggtcaggagttagaggccagcctggcgaaaccccatctctactaaaaatacaaaatccaggcgtggtggcacacacctgtagtcccagctactcaggaggttgaggtaggagaattgcttgaacctgggaggtggaggttgcagtgagccaagattgcgccattgcactccagcctgggcaacacagcgagactccgtctcaaggaaaaaataaaaataaaaagcgggcacgggcccggacatccccacccttggaggctgtcttctcaggctctgccctgccctagctccacaccctctcccaggacccatcacgcctgtgcagtggcccccacagaaagactgagctcaaggtgggaaccacgtctgctaacttggagccccagtgccaagcacagtgcctgcatgtatttatccaataaatgtgaaattctgtccaaaaaaaaaaaa

SEQ ID NO: 2114 - DNA, 7730 bp, Homo sapiens
gtcggctgacgtggagggccggaggtggcggcggcggcggcggcggctgctgctgctgctgcccgcgtccgaggctcgcgggcggcgggcccggacttgtgcaccatggacaattttgctgagggagatttcactgtggcggattatgccttgttagaagattgccctcacgtggatgattgtgtctttgctgctgaatttatgagcaatgattatgttcgtgtgactcagctttactgtgatggggtgggtgtgcaatataaagattatatccaaagtgagaggaatttggaatttgacatctgcagtatatggtgtagtaaaccaatttctgtcctgcaagattattgcgatgccattaaaataaacatcttctggccacttctgtttcaacatcaaaacagttccgtaatatcacgattgcatccctgtgtggacgccaacaattcacgtgcttctgagataaatttgaagaaactacaacatcttgagttgatggaagatattgtggatttggcaaagaaagttgctaatgattcattccttattggaggcttattgagaattggttgtaaaatagaaaataaaatcttggcaatggaagaagctctgaattggataaaatatgcaggcgatgtaacaattctaactaaattaggatcaattgacaattgttggcctatgttaagtattttctttactgaatacaagtaccacataactaaaattgtaatggaagactgcaatttgcttgaagaacttaaaactcaaagttgtatggattgtatagaggaaggagaactaatgaaaatgaaaggaaatgaagagttttccaaagaaagatttgatatagctattatctattacaccagagccattgaatatagacctgaaaactaccttctttatggtaaccgagctctttgttttcttcgtactggacagtttagaaatgcactcggtgatggaaagagagccactattctgaagaacacttggccaaagggtcattatcgttattgtgatgctctttctatgctgggggaatatgactgggccctgcaagcaaacataaaagctcaaaaactctgtaaaaatgaccctgagggaatcaaggatctaattcagcagcatgtaaagttacaaaaacaaatagaagacctacaaggtcgaacagcaaataaggatccaattaaagccttttatgaaaacagggcctacacacctaggagtttatcagcacctatatttactacttcacttaactttgtggagaaggaaagagatttcagaaaaattaatcacgaaatggccaacggtggtaatcagaatctaaaggtggcggatgaggcgttgaaggtagatgattgtgactgtcatcctgaattttcaccaccatcaagtcagcctccaaaacataaaggaaaacaaaaatctcgaaacaatgaatcagaaaagttcagttctagttcaccattgactttaccagcagatttgaagaacatcttggagaaacagttttctaaatcttccagagctgcacaccaggattttgctaatataatgaaaatgctgagaagcttaattcaagatggctatatggccttattggagcagcgttgccgcagcgctgcacaggcctttacagagttgctgaacggtttagatcctcaaaaaataaagcaattgaacctggccatgattaactatgttttggtcgtctatggacttgccatttctctccttggaataggacagcctgaggaattatctgaagccgaaaaccagtttaagaggattattgaacactaccccagtgagggccttgattgcttggcctactgtggaattggaaaagtatatttgaaaaaaaacagatttctagaagctctcaatcactttgagaaagcaagaaccttgatttatcgtcttcctggagtgttaacttggcccacgagtaatgtgattattgaagagtctcagccacaaaaaataaagatgctgttagagaaatttgttgaagaatgcaagttccctccagtgccagatgccatttgttgctatcagaagtgccatggatattctaagatccagatatacataactgatccagactttaagggttttatacgcatcagctgttgccagtactgtaaaatagaatttcacatgaattgctggaagaagttaaaaactacaacctttaatgataaaattgacaaggattttctacaaggaatatgtcttacccctgactgtgaaggtgtcatttctaagattatcatcttcagcagtggtggtgaagttaaatgtgaatttgaacacaaggtcataaaagaaaaggttcctccaagacctattctgaaacagaaatgttctagcctagagaaactaagactgaaagaagacaaaaaattgaagagaaagatccaaaaaaaagaagcaaaaaagttagcacaagaaagaatggaggaggacttaagagaaagtaatccacccaaaaatgaagagcagaaagaaactgtagacaatgttcagcgttgtcagttccttgatgacagaattctacagtgtataaagcagtatgctgacaagattaaatccggcatacagaatacagccatgcttctcaaagaattgctttcttggaaagttttgagcacagaagactatacaacctgtttttctagcagaaattttctaaatgaagcagtggactatgttattcgccacttgattcaagaaaataacagagtaaagacaagaatatttctgcatgttttgagtgagcttaaagaagtggagcccaaattagccgcctggatccaaaaacttaatagctttggcttagatgccacaggaactttcttttctcgttatggagcatctcttaaactgcttgattttagtatcatgactttcctctggaatgagaaatatggtcacaaactagactctatagaaggaaagcaacttgattatttctctgagccagcatcattgaaggaagcccgttgtttaatatggctgctagaagaacacagagacaagttcccagcattgcatagtgctttagatgaattctttgatataatggacagccgctgtactgtgttaaggaaacaagatagtggtgaagcaccgtttagttcaaccaaggtgaaaaacaaaagcaagaaaaagaagccaaaggattcaaagcctatgttagttgggtctggaacaacttcagtaacttcaaataatgagatcatcacttcaagtgaagaccatagcaatcgaaattcagattctgcaggcccatttgcagtgcctgaccatcttcggcaagatgtagaagaattcgaagctctctatgaccaacacagtaacgaatatgttgtccgcaataagaagctatgggacatgaacccaaaacaaaaatgttcaactctatatgattacttctctcagtttttggaggaacatggtcccttggacatgagtaacaagatgttctctgcagaatatgagtttttcccagaagaaactcgacagatactagaaaaagcaggaggtttaaaaccttttctcttgggatgccctcgttttgttgtgattgacaactgtattgcactgaagaaggttgcatcacggctcaagaaaaaaaggaagaagaaaaacattaaaacaaaagtagaagaaatttcaaaagcaggggagtatgtacgagttaaactacaactgaatccagctgctagggaatttaaaccagatgtaaagtctaaaccagtgtcagattcatcttcagcaccagcttttgaaaatgtgaaacccaaacctgtgtctgcaaattctcccaagccagcttgtgaagatgtgaaggccaaaccagtatccgacaattcttctagacaagtttctgaggatgggcaacccaaaggggtctcttctaattctcctaaaccaggctctgaggatgcaaattacaagcgagtctcctgtaattcccccaaaccggttcttgaggatgtgaaaccaacttattgggctcaatcccatttggtcacaggatactgtacgtatcttcctttccagagatttgatatcacccagacaccgccagcatacataaacgtgttaccaggtttgccccagtacaccagcatatatacacccttggccagcctttctcctgaatatcagctaccaagatcagtaccagtggtgccgtcttttgtagccaatgacagagcagataaaaatgctgctgcctattttgagggtcatcatttgaatgctgagaatgttgctggtcaccagattgcctctgaaacacagatccttgagggctctttgggaatatctgtaaagtcacactgcagcacaggtgatgctcatacagtcctgagtgagtctaacagaaatgatgagcactgtggaaattctaacaacaaatgtgaagtaattccagaaagcaccagtgcagtaacaaacattccacacgtgcagatggttgccatacaggtatcttggaacataatacaccaagaagtcaatactgagccatataatccttttgaggaacgacaaggggaaatttcacggattgaaaaggagcaccaagtattacaagaccaacttcaagaagtgtatgaaaattatgagcagataaaacttaagggcttagaagagaccagggacctggaagagaagttgaaaaggcacttagaagaaaacaagatctcaaagacggaattagattggttccttcaagatttggaaagagaaattaaaaaatggcaacaggaaaaaaaagaaatccaagaaagactaaaatcactgaagaagaaaattaaaaaggtttcaaatgccagtgaaatgtatacccagaaaaatgatggaaaggaaaaggaacatgaattacatctggatcagtcccttgaaatcagcaacacacttacaaatgagaaaatgaaaatagaagagtatataaagaaagggaaagaggattatgaagagagtcatcagagagctgtggctgcagaggtatccgtacttgaaaactggaaggagagtgaagtgtataagctacagatcatggagtcacaagcagaagcctttctgaagaagctggggctgattagccgtgatcctgcagcatatcctgacatggagtctgatatacgttcatgggaattgtttctttctaatgttacaaaagaaattgagaaagcaaagtctcagtttgaagaacaaattaaggcaattaaaaatggttctcggctcagtgaactttctaaagtgcagatttctgagctttcatttcctgcctgtaacacggttcatcccgagttactccctgagtcttcaggcgacgatggccaagggcttgtgacttctgcaagcgacgtgactggaaaccacgcagcacttcacagggatcctagtgtgttctctgctggtgattccccaggggaggctccttctgcgctgttgccagggccaccccctggtcagcctgaagccactcagctgacagggccaaaacgggctggccaggcagctctgtcagaacgaagccctgtggctgatcggaagcagcctgttcctccaggacgtgctgcgcgttcaagccagtctccaaaaaagccgttcaatagtattattgagcacctgtcagtggtattcccatgttacaacagcactgagcttgctggttttattaaaaaagtgcgaagcaaaaacaagaactcactctcaggattgagtattgatgaaattgtccaaagagtgacagaacacattctagatgaacagaaaaagaaaaagccaaacccaggaaaggacaagaggacttatgagcccagctctgccacccccgtgaccaggtcctcccagggctcaccctcggtggttgttgcaccatcacccaaaaccaaggggcagaaagcagaagatgtccctgtgaggattgcactgggtgcaagttcctgtgaaatatgccacgaggtgttcaaatcaaaaaacgtgcgtgtgctcaaatgtgggcacaagtatcacaaagggtgctttaagcagtggcttaaagggcagagcgcttgcccggcctgccagggtcgtgatctcctgacagaagagtcaccttctggaagaggctggcccagtcagaatcaggagctgccttcctgctcttctaggtagtcacacttcactaaagtgtcatccaccagtgtgttgaatccgaagaatgacaattttctaccactggtgtaaaaaacaaacatttgaagacccttgtgcattgtgtgtcacaaagctaaatacatggaaatcgttaatatcgctgatattaagtaatttccccactctgagtgaatactttgatgattgccaacagtggctaataaaatgacggctaccacactcatgggtcactggggctgcgcagggctctttgaggtgggtggcttcttttggaaagtactatgaacgtctcgaagcagtattctagtgataagaattcttaacatagccaagcgccccacgtttgttccccacgtttgttccccttttctgtttgaaaaacctgttctggtagctccacaagagagatgatactgactttttaaattttttacaagagtctgtattcctgatatgcctatatttttcctcaaagattctgcattttaaggatgggcataagcaaactatattttaataatttatagttaatgttaaaatattggctgatttagaccaaaagattcaaatctcctctttgtgaaatcccatctgcatttgattttttattattttatgttcccccgttagattgttttaagtgtttgcttttcatcttttatagatgtaatctgattttcaaaaatcattaacactttttaattagtatcgactaagactttttccccctggaatcgaggctgtgtgtccgtcatcccagcccccggttggagcctgctctttgaactccgctgccttccttagcagcttctgtcctcttctgtgagtcagtcagcgagtgcttgggatccgcatccagccgtgctgagcacacaacaggctgtgtgtggaaatggccaccaccattctccttccccaccccaccacaaaaagagaagctgtgtctttagacaaccctgaggtatctgtgttacaatcgttctgtgtttgatatttgtgtaaagtatgcatgcagtcttgtactgtgacctaagaacaaaactgtaactgcattagaaaccatgaaaaaattagatattgttttgtgacttttagacagtggtaaatatagaaccatgaattctggtcacattccatttctctccaacatgaaggatcaaaaaatgtttttcaatgtgttctttgttccactggaaacttagagtcatgagtttatgagctgatttggtcaccttcctctgcctttgttcactgtgagttctgatgtcttagtgacttagttcttagaagctcacgccttagtttgaaacagattctccacggtggtccccaaaacactgtctgcatatccataagaattgagcgctatgggtgttaacgtgcatgaggatcagtttgcagcagcaagtacaaaaggagaagaggaacatccgttgaatgagtgtgttttgtacataacttcagatacttgtgaacatgccttatatttgtccaacaactgtcagaataaagaacattctaaaatgagaaaaaaaaaaaaaaaa

SEQ ID NO: 2115 - DNA, 9021 bp, Homo sapiens
cctaaagaaaagtattaagtaaatagcagtacagatggcaaatggattgcacaatatatcctctggatccatagtgaccctgcagagataaacctgtgatggtcaaacaatgtgaaaactgctgtcagagacatgggcagggtgctcttgtttacagagaagaggtgcaaaaatcaacttgatggtagtgggaagatcaggaaatgcttcctgaaattgagtattaagaactaatagacattaggtggttgcagaataagttttgtttaggaaggacaagcagttgggtatgactggcttctaggttgtgtgttgtggagtgactggggataaaagcaggagcaagatcacaaaaggtcttctatgcttatattagggaagttggactttattctcaagctgaagggaagctgttgcatggttttaagcagtaaagtgatatgatcagagttttagaggatgccaagattgaaggcaagtctgaccagttaggagactgcttgttaaattagttcagaggagaaacagtgaaggcagtggcactgggcatgaagaagtatatgtgtgctaattttagatttcttagggaagcagaaatgacaagagttagtggtccattggacagaaatattgaaggagactggggagtctaggttgactcccagggtttaggtttgggcagtaaaatgacatgtagaacaattaactgataaacagcatacagaaagaggaaagaacttcatttcatatgtttgtttttgaggaaaagatgtttgtttttgaacttcctgattcagaggggcttgtgggacatcttggttaagatcctgtagtagttctagtagggtctagaagtcaagagatacaaccccgcctggaaggatttgggagtcttcagcatttggaattttggaagccattgtttactgcagtgcatatgagataatttaaactggtacatagataaacacttgaaaaaattttaatagataggaatttaatgtgtatgagaaacataacttgcacatctaacctttgataatcatggacattatcacttaggccaagtgagctcaataaaagggaaatattaactaaaaatatatgtgatacatggaaatggcaaaaatcacggtgaagctatgcaaacgatgcaagttcagaaagtgctgtgttaagtcatgggtgtggtggataaattcacccaaggagagagtaagagtgagaagaaaagagagttgacattgggtggcggggaatggagaagaagaacccatgaaggaaactgaggaagagcagccagacgaataggaggaaaaccaggagaagatggtctttggagtccaaatgaagagttctgaggaggaagtggtccacagcgtcaaacttgtgcaccatggacaattttgctgagggagatttcactgtggcggattatgccttgttagaagattgccctcacgtggatgattgtgtctttgctgctgaatttatgagcaatgattatgttcgtgtgactcagctttactgtgatggggtgggtgtgcaatataaagattatatccaaagtgagaggaatttggaatttgacatctgcagtatatggtgtagtaaaccaatttctgtcctgcaagattattgcgatgccattaaaataaacatcttctggccacttctgtttcaacatcaaaacagttccgtaatatcacgattgcatccctgtgtggacgccaacaattcacgtgcttctgagataaatttgaagaaactacaacatcttgagttgatggaagatattgtggatttggcaaagaaagttgctaatgattcattccttattggaggcttattgagaattggttgtaaaatagaaaataaaatcttggcaatggaagaagctctgaattggataaaatatgcaggcgatgtaacaattctaactaaattaggatcaattgacaattgttggcctatgttaagtattttctttactgaatacaagtaccacataactaaaattgtaatggaagactgcaatttgcttgaagaacttaaaactcaaagttgtatggattgtatagaggaaggagaactaatgaaaatgaaaggaaatgaagagttttccaaagaaagatttgatatagctattatctattacaccagagccattgaatatagacctgaaaactaccttctttatggtaaccgagctctttgttttcttcgtactggacagtttagaaatgcactcggtgatggaaagagagccactattctgaagaacacttggccaaagggtcattatcgttattgtgatgctctttctatgctgggggaatatgactgggccctgcaagcaaacataaaagctcaaaaactctgtaaaaatgaccctgagggaatcaaggatctaattcagcagcatgtaaagttacaaaaacaaatagaagacctacaaggtcgaacagcaaataaggatccaattaaagccttttatgaaaacagggcctacacacctaggagtttatcagcacctatatttactacttcacttaactttgtggagaaggaaagagatttcagaaaaattaatcacgaaatggccaacggtggtaatcagaatctaaaggtggcggatgaggcgttgaaggtagatgattgtgactgtcatcctgaattttcaccaccatcaagtcagcctccaaaacataaaggaaaacaaaaatctcgaaacaatgaatcagaaaagttcagttctagttcaccattgactttaccagcagatttgaagaacatcttggagaaacagttttctaaatcttccagagctgcacaccaggattttgctaatataatgaaaatgctgagaagcttaattcaagatggctatatggccttattggagcagcgttgccgcagcgctgcacaggcctttacagagttgctgaacggtttagatcctcaaaaaataaagcaattgaacctggccatgattaactatgttttggtcgtctatggacttgccatttctctccttggaataggacagcctgaggaattatctgaagccgaaaaccagtttaagaggattattgaacactaccccagtgagggccttgattgcttggcctactgtggaattggaaaagtatatttgaaaaaaaacagatttctagaagctctcaatcactttgagaaagcaagaaccttgatttatcgtcttcctggagtgttaacttggcccacgagtaatgtgattattgaagagtctcagccacaaaaaataaagatgctgttagagaaatttgttgaagaatgcaagttccctccagtgccagatgccatttgttgctatcagaagtgccatggatattctaagatccagatatacataactgatccagactttaagggttttatacgcatcagctgttgccagtactgtaaaatagaatttcacatgaattgctggaagaagttaaaaactacaacctttaatgataaaattgacaaggattttctacaaggaatatgtcttacccctgactgtgaaggtgtcatttctaagattatcatcttcagcagtggtggtgaagttaaatgtgaatttgaacacaaggtcataaaagaaaaggttcctccaagacctattctgaaacagaaatgttctagcctagagaaactaagactgaaagaagacaaaaaattgaagagaaagatccaaaaaaaagaagcaaaaaagttagcacaagaaagaatggaggaggacttaagagaaagtaatccacccaaaaatgaagagcagaaagaaactgtagacaatgttcagcgttgtcagttccttgatgacagaattctacagtgtataaagcagtatgctgacaagattaaatccggcatacagaatacagccatgcttctcaaagaattgctttcttggaaagttttgagcacagaagactatacaacctgtttttctagcagaaattttctaaatgaagcagtggactatgttattcgccacttgattcaagaaaataacagagtaaagacaagaatatttctgcatgttttgagtgagcttaaagaagtggagcccaaattagccgcctggatccaaaaacttaatagctttggcttagatgccacaggaactttcttttctcgttatggagcatctcttaaactgcttgattttagtatcatgactttcctctggaatgagaaatatggtcacaaactagactctatagaaggaaagcaacttgattatttctctgagccagcatcattgaaggaagcccgttgtttaatatggctgctagaagaacacagagacaagttcccagcattgcatagtgctttagatgaattctttgatataatggacagccgctgtactgtgttaaggaaacaagatagtggtgaagcaccgtttagttcaaccaaggtgaaaaacaaaagcaagaaaaagaagccaaaggattcaaagcctatgttagttgggtctggaacaacttcagtaacttcaaataatgagatcatcacttcaagtgaagaccatagcaatcgaaattcagattctgcaggcccatttgcagtgcctgaccatcttcggcaagatgtagaagaattcgaagctctctatgaccaacacagtaacgaatatgttgtccgcaataagaagctatgggacatgaacccaaaacaaaaatgttcaactctatatgattacttctctcagtttttggaggaacatggtcccttggacatgagtaacaagatgttctctgcagaatatgagtttttcccagaagaaactcgacagatactagaaaaagcaggaggtttaaaaccttttctcttgggatgccctcgttttgttgtgattgacaactgtattgcactgaagaaggttgcatcacggctcaagaaaaaaaggaagaagaaaaacattaaaacaaaagtagaagaaatttcaaaagcaggggagtatgtacgagttaaactacaactgaatccagctgctagggaatttaaaccagatgtaaagtctaaaccagtgtcagattcatcttcagcaccagcttttgaaaatgtgaaacccaaacctgtgtctgcaaattctcccaagccagcttgtgaagatgtgaaggccaaaccagtatccgacaattcttctagacaagtttctgaggatgggcaacccaaaggggtctcttctaattctcctaaaccaggctctgaggatgcaaattacaagcgagtctcctgtaattcccccaaaccggttcttgaggatgtgaaaccaacttattgggctcaatcccatttggtcacaggatactgtacgtatcttcctttccagagatttgatatcacccagacaccgccagcatacataaacgtgttaccaggtttgccccagtacaccagcatatatacacccttggccagcctttctcctgaatatcagctaccaagatcagtaccagtggtgccgtcttttgtagccaatgacagagcagataaaaatgctgctgcctattttgagggtcatcatttgaatgctgagaatgttgctggtcaccagattgcctctgaaacacagatccttgagggctctttgggaatatctgtaaagtcacactgcagcacaggtgatgctcatacagtcctgagtgagtctaacagaaatgatgagcactgtggaaattctaacaacaaatgtgaagtaattccagaaagcaccagtgcagtaacaaacattccacacgtgcagatggttgccatacaggtatcttggaacataatacaccaagaagtcaatactgagccatataatccttttgaggaacgacaaggggaaatttcacggattgaaaaggagcaccaagtattacaagaccaacttcaagaagtgtatgaaaattatgagcagataaaacttaagggcttagaagagaccagggacctggaagagaagttgaaaaggcacttagaagaaaacaagatctcaaagacggaattagattggttccttcaagatttggaaagagaaattaaaaaatggcaacaggaaaaaaaagaaatccaagaaagactaaaatcactgaagaagaaaattaaaaaggtttcaaatgccagtgaaatgtatacccagaaaaatgatggaaaggaaaaggaacatgaattacatctggatcagtcccttgaaatcagcaacacacttacaaatgagaaaatgaaaatagaagagtatataaagaaagggaaagaggattatgaagagagtcatcagagagctgtggctgcagaggtatccgtacttgaaaactggaaggagagtgaagtgtataagctacagatcatggagtcacaagcagaagcctttctgaagaagctggggctgattagccgtgatcctgcagcatatcctgacatggagtctgatatacgttcatgggaattgtttctttctaatgttacaaaagaaattgagaaagcaaagtctcagtttgaagaacaaattaaggcaattaaaaatggttctcggctcagtgaactttctaaagtgcagatttctgagctttcatttcctgcctgtaacacggttcatcccgagttactccctgagtcttcaggcgacgatggccaagggcttgtgacttctgcaagcgacgtgactggaaaccacgcagcacttcacagggatcctagtgtgttctctgctggtgattccccaggggaggctccttctgcgctgttgccagggccaccccctggtcagcctgaagccactcagctgacagggccaaaacgggctggccaggcagctctgtcagaacgaagccctgtggctgatcggaagcagcctgttcctccaggacgtgctgcgcgttcaagccagtctccaaaaaagccgttcaatagtattattgagcacctgtcagtggtattcccatgttacaacagcactgagcttgctggttttattaaaaaagtgcgaagcaaaaacaagaactcactctcaggattgagtattgatgaaattgtccaaagagtgacagaacacattctagatgaacagaaaaagaaaaagccaaacccaggaaaggacaagaggacttatgagcccagctctgccacccccgtgaccaggtcctcccagggctcaccctcggtggttgttgcaccatcacccaaaaccaaggggcagaaagcagaagatgtccctgtgaggattgcactgggtgcaagttcctgtgaaatatgccacgaggtgttcaaatcaaaaaacgtgcgtgtgctcaaatgtgggcacaagtatcacaaagggtgctttaagcagtggcttaaagggcagagcgcttgcccggcctgccagggtcgtgatctcctgacagaagagtcaccttctggaagaggctggcccagtcagaatcaggagctgccttcctgctcttctaggtagtcacacttcactaaagtgtcatccaccagtgtgttgaatccgaagaatgacaattttctaccactggtgtaaaaaacaaacatttgaagacccttgtgcattgtgtgtcacaaagctaaatacatggaaatcgttaatatcgctgatattaagtaatttccccactctgagtgaatactttgatgattgccaacagtggctaataaaatgacggctaccacactcatgggtcactggggctgcgcagggctctttgaggtgggtggcttcttttggaaagtactatgaacgtctcgaagcagtattctagtgataagaattcttaacatagccaagcgccccacgtttgttccccacgtttgttccccttttctgtttgaaaaacctgttctggtagctccacaagagagatgatactgactttttaaattttttacaagagtctgtattcctgatatgcctatatttttcctcaaagattctgcattttaaggatgggcataagcaaactatattttaataatttatagttaatgttaaaatattggctgatttagaccaaaagattcaaatctcctctttgtgaaatcccatctgcatttgattttttattattttatgttcccccgttagattgttttaagtgtttgcttttcatcttttatagatgtaatctgattttcaaaaatcattaacactttttaattagtatcgactaagactttttccccctggaatcgaggctgtgtgtccgtcatcccagcccccggttggagcctgctctttgaactccgctgccttccttagcagcttctgtcctcttctgtgagtcagtcagcgagtgcttgggatccgcatccagccgtgctgagcacacaacaggctgtgtgtggaaatggccaccaccattctccttccccaccccaccacaaaaagagaagctgtgtctttagacaaccctgaggtatctgtgttacaatcgttctgtgtttgatatttgtgtaaagtatgcatgcagtcttgtactgtgacctaagaacaaaactgtaactgcattagaaaccatgaaaaaattagatattgttttgtgacttttagacagtggtaaatatagaaccatgaattctggtcacattccatttctctccaacatgaaggatcaaaaaatgtttttcaatgtgttctttgttccactggaaacttagagtcatgagtttatgagctgatttggtcaccttcctctgcctttgttcactgtgagttctgatgtcttagtgacttagttcttagaagctcacgccttagtttgaaacagattctccacggtggtccccaaaacactgtctgcatatccataagaattgagcgctatgggtgttaacgtgcatgaggatcagtttgcagcagcaagtacaaaaggagaagaggaacatccgttgaatgagtgtgttttgtacataacttcagatacttgtgaacatgccttatatttgtccaacaactgtcagaataaagaacattctaaaatgagaaaaaaaaaaaaaaaa

SEQ ID NO: 2116 - DNA, 2106 bp, Homo sapiens
accaggcgcggtccggaggccgagggcgaccacagcagcctccgcctcctgctgctccggactattctgcgctgggctagtcggcggtgacccggactgcgcccggcagtggcttcgcgggcgacgcgtcgccatgggctctcgctggagcagcgaagaggagaggcagccgctgctggggcccgggctcgggcctgggctgggggcctcctggagaagccgggaggcggcggcggcggcgctgcccgcggcggtcccgggtcccgggcgggtatacgggcgccgctggctggtgctgctgctcttctcgctgctggcgttcgttcagggcctggtctggaacacctggggtcccatccagaactcggcgcgccaggcctacggcttctccagctgggacatcgcgctgctcgtgctgtgggggcccatcggcttcctgccctgcttcgcgttcatgtggctcctggacaagagaggtctccggataactgtgctcctgacatccttccttatggttttgggaactggtctaagatgcatacctatatcagacttaatccttaaaagaagattaattcatggaggacagatgttaaatggattggcaggtccaactgtaatgaatgcagcaccatttctctctacgacgtggttttctgcagatgaaagggccacagccacagctattgcatcaatgctcagttatcttgggggagcatgtgcatttttagttggaccacttgttgttccagctcccaatgggacatcacctcttcttgctgcagagagcagcagggcgcatattaaagatcgcatagaggctgtgttatatgcagaatttggagttgtctgcttaatattttctgcaacactagcttatttcccaccccgacctcctcttcctcccagtgttgctgcagctagccagcggctgagttatcggagaagcgtttgtagattattaagcaattttcgatttttgatgattgctttagcatatgccataccacttggtgtatttgctggctggtctggagttctggacttaattttaacaccagcgcatgtcagccaagtagatgctggctggattggattttggtccatagttggaggctgtgttgttggaatagctatggcaaggtttgcagattttatcaggggtatgctgaaactaattcttctcctcctgttttcgggagctacactgtcatccacgtggttcaccctgacctgtttgaacagcatcacacacctacctttaaccacagtgacattgtatgcctcctgtattctcctgggagtgttcttgaatagcagcgtgcctatattttttgagctttttgtggaaactgtctacccagttccagaaggaattacttgtggagttgtcacttttttaagtaatatgtttatgggagtacttttattttttctcacattttatcatacagagttgtcttggttcaactggtgccttcccgggtcgtgtttgctcagtctcctcctcattctgtgcttcagggaatcctatgacagactctatcttgatgtggttgtctccgtttaatagcacagacttgaaggagtttaaaaggaggctggaaatcaatactgcacactgcacatttgctcagaattgcacatctaacaggaaaagagggagaagaaagaaacttcattcagaggttttgttaggttacagattatcacattaatttaattactactaggtaataataatgggagacttgagtgataataggggattttaaaactctacagatggcatacctgtgcctgcttctggggttggaagtgtgacttcttacacataaagcactacctaagtaattctctctctgttttgtgccagtgctaaactactgattacttgtaattatgaaaagaaataaagggtgtctatcatatgaagataacgccttccctaagtcacatatcagaataggaagatatgccactaacttctaaagaagttcaaaccctgtatccaattttaatgataaaatagccaagaggtatatcgatgatggaaattagccacatgtacactacattttttctaataaagccatttcttatatg

SEQ ID NO: 2117 - DNA, 2096 bp, Homo sapiens
gcctttgcgcacgcgcacgaacgcacggccgcgcagcatctgtcttgctggaagctttttcctagaggttgagcggtttgcacaatgtcggaaatggctgagttgtccgagctgtatgaagagagcagtgacctgcagatggatgtgatgcctggcgagggtgaccttccgcagatggaggtaggcagcgggagccgggagctatccctgcgtccctcccgcagcggggcccaacagctcgaggaggaaggcccaatggaggaggaggaggcccagccaatggcggcgccagaggggaaacggagccttgctaacgggcccaacgctggggagcagccaggccaggtggcgggcgcagacttcgagagcgaggacgagggcgaggaatttgatgactgggaggacgactacgactatcccgaagaggagcagctcagtggtgccggctacagagtatcagccgctcttgaagaagccgacaagatgtttctgagaacaagagaaccagccctggatggcgggtttcagatgcattatgagaagaccccgtttgatcagttagcttttatcgaagagcttttttcactgatggttgtcaatcgtctgaccgaagaactcggctgtgatgagattattgatagagagtagttagatgctgttaaaagaggaggaaactacttgaggagggacccaactttccgctatcttttgggttcattccaaatagttttgtgccattgaaaaacttgaccttcaaaaaaatttgtttttcagaatagaacacaataggacagtgactgcacagttgtgaaaaaggaagagaatcattaaagaaaaagaaaaaagattttaagaccgttgaaatcaattatcaagaacgtcctaaaacacctatggctttgactttgttattgatccagattattttccttgcattggggaaaatatctttcatatttgtttgctgtaaagatggttttgcaagaataagtcatgaccaagacaaactgccaatacaaaagcccactgatactaattatataatgagaaaaaaatgtatccaactaggacacatatcttttgagttatttggactgaaagcttaagaaaacttggaaaattctattttgtgatctagtcaagccacagttatcaaaggctacattttcagtgtaagataaatggatgagtaaactcaaatatgtatcacgtgtgctttgtatcttaagatgtgtttccaagagcatctgaaattttgtttgtacatgtatcttgatcatttataaagccactgtgatctataaatcaagaaaatccattgtcataaccatttttaaaagtcaaaaattaagacatccttaattaaaaagtttcaaatctagacactaaatgtgtgtgaatgtacaaagaaaacaaaccattgcttatgctgttatatactagagaaattttgttttgcttgctgttttaacttgacagatgaaggactttagttgaacttcatattgtaagaactgttaataaaagttgtcaagtaaaaagcgctatatctaaaaagactttatgaacagttattctatcaacttttaaaggttttaaacctgcccagaaattaccttggtatctgaagtttccctctgtctcctcctctaattaagcttgttatttgtcatgcaccagcattggagataataaaatttcttgttctgtgtattttgtttggctaatagtattgcatacatactttctctgtatactactttctattgtatgtgttaaccagtattaagggaaaatgatccagcttcagctatctaattcacaaattaatttctggaaattaaactttgtaaattaagtttttgcctataagaatttgctggtctgggaaaacctgccctatcaatgagtatgttgccgtggttaccttactaagatgctgaagttctaggagagtaatgattacatcagaaggctaggttcagcaaaataagtgtatcagcaggttttatcatgatcagtaaaaatgttccaaatgcttctgctccattatagcagtaaagaacgaatatccaatgcaacaggacaattaaaaa

SEQ ID NO: 2118 - DNA, 3192 bp, Homo sapiens
cacaagctcagcgatggcggctccagaaggcagcggtctaggcgaggacgcccggctggaccaggagaccgcccagtggctgcgctgggacaagaattccttaactttggaggcagtgaaacgactaatagcagaaggtaataaagaagaactacgaaaatgttttggggcccgaatggagtttgggacagctggcctccgagctgctatgggacctggaatttctcgtatgaatgacttgaccatcatccagactacacagggattttgcagatacctggaaaaacaattcagtgacttaaagcagaaaggcatcgtgatcagttttgacgcccgagctcatccatccagtgggggtagcagcagaaggtttgcccgacttgctgcaaccacatttatcagtcaggggattcctgtgtacctcttttctgatataacgccaaccccctttgtgcccttcacagtatcacatttgaaactttgtgctggaatcatgataactgcatctcacaatccaaagcaggataatggttataaggtctattgggataatggagctcagatcatttctcctcacgataaagggatttctcaagctattgaagaaaatctagaaccgtggcctcaagcttgggacgattctttaattgatagcagtccacttctccacaatccgagtgcttccatcaataatgactactttgaagaccttaaaaagtactgtttccacaggagcgtgaacagggagacaaaggtgaagtttgtgcacacctctgtccatggggtgggtcatagctttgtgcagtcagctttcaaggcttttgaccttgttcctcctgaggctgttcctgaacagaaagatccggatcctgagtttccaacagtgaaatacccgaatcccgaagaggggaaaggtgtcttgactttgtcttttgctttggctgacaaaaccaaggccagaattgttttagctaacgacccggatgctgatagacttgctgtggcagaaaagcaagacagtggtgaatggagggtgttttcaggcaatgagttgggggccctcctgggctggtggctttttacatcttggaaagagaagaaccaggatcgcagtgctctcaaagacacgtacatgttgtccagcaccgtctcctccaaaatcttgcgggccattgccttaaaggaaggttttcattttgaggaaacattaactggctttaagtggatgggaaacagagccaaacagctaatagaccaggggaaaactgttttatttgcatttgaagaagctattggatacatgtgctgcccttttgttctggacaaagatggagtcagtgccgctgtcataagtgcagagttggctagcttcctagcaaccaagaatttgtctttgtctcagcaactaaaggccatttatgtggagtatggctaccatattactaaagcttcctattttatctgccatgatcaagaaaccattaagaaattatttgaaaacctcagaaactacgatggaaaaaataattatccaaaagcttgtggcaaatttgaaatttctgccattagggaccttacaactggctatgatgatagccaacctgataaaaaagctgttcttcccactagtaaaagcagccaaatgatcaccttcacctttgctaatggaggcgtggccaccatgcgcaccagtgggacagagcccaaaatcaagtactatgcagagctgtgtgccccacctgggaacagtgatcctgagcagctgaagaaggaactgaatgaactggtcagtgctattgaagaacattttttccagccacagaagtacaatctgcagccaaaagcagactaaaatagtccagccttgggtatacttgcatttacctacaattaagctgggtttaacttggttaagcaatatttttaagggccaaaatgattcaaaacatcacaggtatttatgtgttttacaaagacctacattcctcattggtttcatgtttgacctttaaggtgaaaaaagaaaatggccaaacccaacaaactaacattcctactaaaaagttgagcttggacatattttgaatttttgtaagtgaagatttttaaactgactaacttaaaaaaatagattgtaattgatgtgccttaatttgcataaatcataaatgtatgtcctctctgtaattgttttaatgtgtgcttgaaatatccagaaaacctatggagttagtaaattctgggctgtcatatgtaggatagccactttttaggtatatgtacatttatatttctatcaattccttagaaagtaaaataaatgaatagatcaaatgttgtgttcatgtttggggaaaatataatttgcagaaacctatgaagtagagcaaagatgctttaaaaagataagtttttttgaactaaattttttttagttctaataatgcacataggatattagtacatcgtacacgtgctaggaaaaaacagcttcagtgtctttgtttaatgtgttgaaactcatctttttaaatcttgaaaaaccaattgtttacttgaaacttgaaagtagcatatttttctgttttttggttgtttgttcatttgtattagcacaatttaatgtaattcctggtttggaggcagcaagacctatgagcaagaactatttacttgaccctcgtttttttctcttgttcttgtgtggtctgaaatctaaaactagactttattatgatagatttcctataagccaatttctaataacaaatagatttattatttaatctgtaccttctatcttctcataattcgtggtcttacagccttccaaaataactccagttgggcacccatgagctaggatcaaactttctttatatactttatatattttacattatttctgatttttaaagcaaatgattgtgattacactcaacctaaatagttatgaacagtttcagaacaatgaaaaattacaatactatgtgatagtattgtaactatttttctattttagtcatatgtcgcttatatcctaccagaactcttaaatctataatattcgatatattctacaaactgctttattgtagaagccatatttatgtttattttataatgttttctagtgtcaaactgtactgtggagaaaagaaatgttagatctgtaaaaaaaaaaaaaaaaaa

SEQ ID NO: 2119 - DNA, 3593 bp, Homo sapiens
acgcgtggcgcgatggcggcggccccacgcgcgggccggcggcgcgggcagccgctcctggcgctgctgcttctgctgctggcgccactgccgccgggggccccgccgggcgccgacgcctactttcccgaggagcgctggagcccggagtcgcccctgcaggcgccgcgcgtgctcatcgcgctgttggcgcgaaacgcggcccacgcgttgcccaccacgctgggcgcactcgagcggctgcggcacccgcgggagcgcacggcgctatgggtggctacggaccacaacatggataacacgtcaactgtgctgcgggagtggctggtggccgtgaagagtttgtaccattccgtggagtggcggccagcagaggagcccaggtcctacccggacgaggaaggcccgaaacactggtctgactcacgctacgagcatgtcatgaagttgcgccaggcagccctgaaatcagctcgagacatgtgggctgattacatcctgtttgtagatgcggacaacctgatcctcaaccctgacacactgagcctgctcatcgctgagaacaagacggtggtcgcccccatgctggattcccgggctgcgtactccaacttctggtgtggaatgacttcccagggctactacaagcgcacacctgcctacatccctatccgcaagcgagaccgccggggctgctttgcagttcccatggtgcactcgaccttcctgatcgacctgcggaaggcggcgtccaggaacctggccttctacccacctcaccctgactacacctggtcctttgacgacatcatcgtctttgccttctcctgcaagcaggcagaggttcagatgtatgtgtgcaacaaggaggagtacggattcttgccagtgccattgcgcgcccacagcaccctccaggatgaggccgagagcttcatgcatgtgcagctggaggtcatggtgaagcacccgcccgcagagccctcccgcttcatctcggctcccaccaagacaccggacaagatgggcttcgacgaggtcttcatgatcaacctgaggcggcggcaggaccggcgggagcgcatgctgcgggcgctgcaggcacaggagatcgagtgccggctggtggaggccgtggacggcaaagccatgaacaccagccaggtggaggcgctggggatccagatgctgcctggctaccgggacccctaccacggccggcccctcaccaagggtgagctgggctgcttcctgagccactacaacatctggaaggaggtggtggaccgggggctgcagaaatcgcttgtgtttgaggatgacctgcgttttgagatcttcttcaagagacgtctgatgaacctcatgcgggatgtggagcgggagggcctggactgggacctcatctatgtgggccggaagcggatgcaggtggagcaccccgagaaggctgtgcctcgcgtgaggaacctggtggaggccgactattcctactggaccctggcctacgtgatctccctgcaaggcgcccgcaaactgctggctgctgagccgctctccaagatgctgcctgtggacgagttcctgcccgtcatgttcgacaaacacccagtgtccgagtacaaggcccacttctccctccgcaacctgcatgccttctctgtggagccgctgctcatctaccccacacactacacaggagacgatggctatgtgagtgacaccgagacctcagtcgtatggaacaatgagcacgtcaagaccgactgggaccgcgccaagtcccagaagatgcgggagcagcaggcactgagccgtgaggccaagaactcggacgtgctccagtccccactggacagtgctgcccgggatgaactctgaggggtagcagccagaaagccaaagcagccatcggtggcccaggctccacgtgcttactgaggacatcagggccacctctggaccccttggcaggccacagagggctctcgtgtggggtggtgtccagccagctcttgctaagcaatcacgtgcacacaggcagcattaatggagtgcctactgcatgccagcaacagggcttggccctggggaattgggaggaaccaagccctcttcatctgttcatgtgcccagcatttattaagcacctgctgtatgcaaggttcccatgttacggcagtgaatgaggcataattgttccctccatcagcgattgattcagtcatcaagcagttactgatcagattaagaatcaggcactagtgatacacattcatttttaaaattcattcaaggatttattgagtgcctactgtgtgttgggtgccattccaggctctgggatttttttttttttttttttaagagtagagtctgtctctgtcacccaggctggagtgcagtggtgtgacggctcactgcagcctgcgcctcccagcgtccagcaattcttgtttctcggcctcccaagtagctgggactataggtgcgtgccatcacatctggctagtttttgtatttttagtagagacggggtttcaccatgttggccagactggtctcgaactcctgacctcaagtgatctgcccgccttggccacccaaagtgctagggttacaggcatgagccactgtgcccagcccaggctctgggaatattgagataaataagatgcttctatccatttattcaagcacatattggtcacctactgtgtgcctggcactcatgtcacaaagataagttcctgattcggtacacttactgagcacctgctgtgtgcagggagctgagctatgggatgggaatgggagtaaacaaggtacttttcacttttttctttttttcctcactgctagacggtgtgggaacttctcactcattggcttctttcccacacacctgaagagcactgactgtgtgccgggcactagtgatacaaaagagtgtgacagttgttcagtctgcattttcgatcatgggctacatgccgagtgctggggcacagagatgaacaagatcggttccttcacttcttcatgccacaagtgtttattgagcacctgtgtgccaggcctcacagactcccagttgggttgaagaatggttgactgagtttgattcttcctgtaccctcggtcgtctgagctgtgtgcggacaacatccccccaccacccaagagggagggtagctcttccgccaccaggggcaagcacaggtcctggtggccccacgccacatgttagcccccctggagggggcgccagttggagacgggggctgggtgtccctggcccactcccagtcccctgtgctttacctccttgcccttgtgtctcaggtgtggtccctgcctgcttgatgaagttgctctgttcaagcctttggtgggatcatgtgtttgggggcttttaggggacccagctgcactggggcactgcccgtggcctgggtaggacatttcccagcaagggctggaggagttgccgtgccttcagcctgaatcgaatgtcagaaccagccagcggtgcttcaccctcttggggataacttgcttagttttttaataaatgttcctggttggttttc

SEQ ID NO: 2120 - DNA, 4286 bp, Homo sapiens; identical to SEQ ID NO: 389

SEQ ID NO: 2121 - DNA, 2732 bp, Homo sapiens
gtctttatttcagtcccggatccgcgggcgcaggcccagctcaggcccccagggatggacgtcgtggaccctgacattttcaatagagacccccgggaccactatgacctgctacagcggctgggtggcggcacgtatggggaagtctttaaggctcgagacaaggtgtcaggggacctggtggcactgaagatggtgaagatggagcctgatgatgatgtctccacccttcagaaggaaatcctcatattgaaaacttgccggcacgccaacatcgtggcctaccatgggagttatctctggttgcagaaactctggatctgcatggaattctgtggggctggttctctccaggacatctaccaagtgacaggctccctgtcagagctccagattagctatgtctgccgggaagtgctccagggactggcctatttgcactcacagaagaagatacacagggacatcaagggagctaacatcctcatcaatgatgctggggaggtcagattggctgactttggcatctcggcccagattggggctacactggccagacgcctctctttcattgggacaccctactggatggctccggaagtggcagctgtggccctgaagggaggatacaatgagctgtgtgacatctggtccctgggcatcacggccatcgaactggccgagctacagccaccgctctttgatgtgcaccctctcagagttctcttcctcatgaccaagagtggctaccagcctccccgactgaaggaaaaaggcaaatggtcggctgccttccacaacttcatcaaagtcactctgactaagagtcccaagaaacgacccagcgccaccaagatgctcagtcatcaactggtatcccagcctgggctgaatcgaggcctgatcctggatcttcttgacaaactgaagaatcccgggaaaggaccctccattggggacattgaggatgaggagcccgagctaccccctgctatccctcggcggatcagatccacccaccgctccagctctctggggatcccagatgcagactgctgtcggcggcacatggagttcaggaagctccgaggaatggagaccagacccccagccaacaccgctcgcctacagcctcctcgagacctcaggagcagcagccccaggaagcaactgtcagagtcgtctgacgatgactatgacgacgtggacatccccacccctgcagaggacacacctcctccacttccccccaagcccaagttccgttctccatcagacgagggtcctgggagcatgggggatgatgggcagctgagcccgggggtgctggtccggtgtgccagtgggcccccaccaaacagcccccgtcctgggcctcccccatccaccagcagcccccacctcaccgcccattcagaaccctcactctggaacccaccctcccgggagcttgacaagcccccacttctgccccccaagaaggaaaagatgaagagaaagggatgtgcccttctcgtaaagttgttcaatggctgccccctccggatccacagcacggccgcctggacacatccctccaccaaggaccagcacctgctcctgggggcagaggaaggcatcttcatcctgaaccggaatgaccaggaggccacgctggaaatgctctttcctagccggactacgtgggtgtactccatcaacaacgttctcatgtctctctcaggaaagaccccccacctgtattctcatagcatccttggcctgctggaacggaaagagaccagagcaggaaaccccatcgctcacattagcccccaccgcctactggcaaggaagaacatggtttccaccaagatccaggacaccaaaggctgccgggcgtgctgtgtggcggagggtgcgagctctgggggcccgttcctgtgcggtgcattggagacgtccgttgtcctgcttcagtggtaccagcccatgaacaaattcctgcttgtccggcaggtgctgttcccactgccgacgcctctgtccgtgttcgcgctgctgaccgggccaggctctgagctgcccgctgtgtgcatcggcgtgagccccgggcggccggggaagtcggtgctcttccacacggtgcgctttggcgcgctctcttgctggctgggcgagatgagcaccgagcacaggggacccgtgcaggtgacccaggtagaggaagatatggtgatggtgttgatggatggctctgtgaagctggtgaccccggaggggtccccagtccggggacttcgcacacctgagatccccatgaccgaagcggtggaggccgtggctatggttggaggtcagcttcaggccttctggaagcatggagtgcaggtgtgggctctaggctcggatcagctgctacaggagctgagagaccctaccctcactttccgtctgcttggctcccccaggctggagtgcagtggcacgatctcgcctcactgcaacctcctcctcccaggttcaagcaattctcctgcctcagcctcccgagtagctgggattacaggcctgtagtggtggagacacgcccagtggatgatcctactgctcccagcaacctctacatccaggaatgagtccctaggggggtgtcaggaactagtccttgcaccccctcccccatagacacactagtggtcatggcatgtcctcatctcccaataaacatgactttagcctctgcaaaaaaa

SEQ ID NO: 2122 - DNA, 2573 bp, Homo sapiens
ggtgaccaagagtacatctcttttcaaatagctggattaggtcctcatgctgctgtggtcattgctggtcatctttgatgcagtcactgaacaggcagattcgctgacccttgtggcgccctcttctgtcttcgaaggagacagcatcgttctgaaatgccagggagaacagaactggaaaattcagaagatggcttaccataaggataacaaagagttatctgttttcaaaaaattctcagatttccttatccaaagtgcagttttaagtgacagtggtaactatttctgtagtaccaaaggacaactctttctctgggataaaacttcaaatatagtaaagataaaagtccaagagctctttcaacgtcctgtgctgactgccagctccttccagcccatcgaagggggtccagtgagcctgaaatgtgagacccggctctctccacagaggttggatgttcaactccagttctgcttcttcagagaaaaccaggtcctggggtcaggctggagcagctctccggagctccagatttctgccgtgtggagtgaagacacagggtcttactggtgcaaggcagaaacggtgactcacaggatcagaaaacagagcctccaatcccagattcacgtgcagagaatccccatctctaatgtaagcttggagatccgggcccccgggggacaggtgactgaaggacaaaaactgatcctgctctgctcagtggctgggggtacaggaaatgtcacattctcctggtacagagaggccacaggaaccagtatgggaaagaaaacccagcgttccctgtcagcagagctggagatcccagctgtgaaagagagtgatgccggcaaatattactgtagagctgacaacggccatgtgcctatccagagcaaggtggtgaatatccctgtgagaattccagtgtctcgccctgtcctcaccctcaggtctcctggggcccaggctgcagtgggggacctgctggagcttcactgtgaggccctgagaggctctcccccaatcttgtaccaattttatcatgaggatgtcacccttgggaacagctcggccccctctggaggaggggcctccttcaacctctctttgactgcagaacattctggaaactactcctgtgaggccaacaacggcctgggggcccagtgcagtgaggcagtgccagtctccatctcaggacctgatggctatagaagagacctcatgacagctggagttctctggggactgtttggtgtccttggtttcactggtgttgctttgctgttgtatgccttgttccacaagatatcaggagaaagttctgccactaatgaacccagaggggcttccaggccaaatcctcaagagttcacctattcaagcccaaccccagacatggaggagctgcagccagtgtatgtcaatgtgggctctgtagatgtggatgtggtttattctcaggtctggagcatgcagcagccagaaagctcagcaaacatcaggacacttctggagaacaaggactcccaagtcatctactcttctgtgaagaaatcataacacttggaggaatcagaagggaagatcaacagcaaggatggggcatcattaagacttgctataaaaccttatgaaaatgcttgaggcttatcacctgccacagccagaacgtgcctcaggaggcacctcctgtcatttttgtcctgatgatgtttcttctccaatatcttcttttacctatcaatattcattgaactgctgctacatccagacactgtgcaaataaattatttctgctaccttctcttaagcaatcagtgtgtaaagatttgagggaagaatgaataagagatacaaggtctcaccttcatctactgtgaagtgatgagaacaggacttgatagtggtgtattaacttatttatgtgctgctggatacagtttgctaatattttgttgagaatttttgcaaatatgttcattgggaatattggcctgaaattttcttttccactgtgtctctgccagaatgtttgtatcaggctgatgctggcttcatagaatgagttaggcaggagcccttcctccttgattttttggcatagtttcagcaggattggtaccagttattctttctgcatcttgtagaattcagctatgaatccatctggtctagggcttttgtgttggttggtaagttttttattactaattcaacttcagcgcttgatattggtctaggaggggtttctgtctcttcctggttcaatcttgggagattgtgtgtttccaggaatttagccgtttcctccagattttcttctttatgtgcatcgacttgagtgtaaacataacttatatgcactgggaaaccaaaaaatctgtgtgacttgctttattgcagcatttgttttattttggtagtctggaactgaacctgcaatatcaccaaagtatgcatatagttgcaaaaatgtgatttttgacatagtaaatatgagtatttgcaataaactatgatattacttttgtaagtatatagaataaaatgtaaataatct

SEQ ID NO: 2123 - DNA, 2071 bp, Homo sapiens
ccacgcgtccggtcctgaactgggctgaataaacatacctaaatatatgtttagaaatgctcctatgtatcagttttcccaggaacaactataatattatagaaatcttaaaattatttcctaataaaaaattataggatacaaaagaaaaaaaagaaatatgaagagggctggatgggcacaggaaaacaatcagatgagaacaacagatgaccgtgtctgcaggcagcacccagaactgatattcccctcaaacgtctaaatatattgttgagaaaattatctctaactgttctagtgggaatgtgggaatggaaaatatgcaacagccatggggccaggccctttgctgagcctgcaggttgggagtttgtgaatctattgaggcatcacaaatcttttctgatagcccctctgtgtctgtcagttccagtgtctcgccctgtcctcaccctcaggtctcctggggcccaggctgcagtgggggacctgctggagcttcactgtgaggccctgagaggctctcccccaatcttgtaccaattttatcatgaggatgtcacccttgggaacagctcggccccctctggaggaggggcctccttcaacctctctttgactgcagaacattctggaaactactcctgtgaggccaacaacggcctgggggcccagtgcagtgaggcagtgccagtctccatctcaggacctgatggctatagaagagacctcatgacagctggagttctctggggactgtttggtgtccttggtttcactggtgttgctttgctgttgtatgccttgttccacaagatatcaggagaaagttctgccactaatgaacccagaggggcttccaggccaaatcctcaagagttcacctattcaagcccaaccccagacatggaggagctgcagccagtgtatgtcaatgtgggctctgtagatgtggatgtggtttattctcaggtctggagcatgcagcagccagaaagctcagcaaacatcaggacacttctggagaacaaggactcccaagtcatctactcttctgtgaagaaatcataacacttggaggaatcagaagggaagatcaacagcaaggatggggcatcattaagacttgctataaaaccttatgaaaatgcttgaggcttatcacctgccacagccagaacgtgcctcaggaggcacctcctgtcatttttgtcctgatgatgtttcttctccaatatcttcttttacctatcaatattcattgaactgctgctacatccagacactgtgcaaataaattatttctgctaccttctcttaagcaatcagtgtgtaaagatttgagggaagaatgaataagagatacaaggtctcaccttcatctactgtgaagtgatgagaacaggacttgatagtggtgtattaacttatttatgtgctgctggatacagtttgctaatattttgttgagaatttttgcaaatatgttcattgggaatattggcctgaaattttcttttccactgtgtctctgccagaatgtttgtatcaggctgatgctggcttcatagaatgagttaggcaggagcccttcctccttgattttttggcatagtttcagcaggattggtaccagttattctttctgcatcttgtagaattcagctatgaatccatctggtctagggcttttgtgttggttggtaagttttttattactaattcaacttcagcgcttgatattggtctaggaggggtttctgtctcttcctggttcaatcttgggagattgtgtgtttccaggaatttagccgtttcctccagattttcttctttatgtgcatcgacttgagtgtaaacataacttatatgcactgggaaaccaaaaaatctgtgtgacttgctttattgcagcatttgttttattttggtagtctggaactgaacctgcaatatcaccaaagtatgcatatagttgcaaaaatgtgatttttgacatagtaaatatgagtatttgcaataaactatgatattacttttgtaagtatatagaataaaatgtaaataatct

SEQ ID NO: 2124 - DNA, 3211 bp, Homo sapiens
gaggggcggggataaatgcggagggacggtccagctttagctctctgctcgccgccgccgctgtcgccgccacctcctctgatctacgaaagtcatgttacccaacaccgggaggctggcaggatgtacagtttttatcacaggtgcaagccgtggcattggcaaagctattgcattgaaagcagcaaaggatggagcaaatattgttattgctgcaaagaccgcccagccacatccaaaacttctaggcacaatctatactgctgctgaagaaattgaagcagttggaggaaaggccttgccatgtattgttgatgtgagagatgaacagcagatcagtgctgcagtggagaaagccatcaagaaatttggaggaattgatattctggtaaataatgccagtgccattagtttgaccaatacattggacacacctaccaagagattggatctgatgatgaacgtgaacaccagaggcacctaccttgcatctaaagcatgtattccttatttgaaaaagagcaaagttgctcatatcctcaatatcagtccaccactgaacctaaatccagtttggttcaaacagcactgtgcttataccattgctaagtatggtatgtctatgtatgtgcttggaatggcagaagaatttaaaggtgaaattgcagtcaatgcattatggcctaaaacagccatacacactgctgctatggatatgctgggaggacctggtatcgaaagccagtgtagaaaagttgatatcattgcagatgcagcatattccattttccaaaagccaaaaagttttactggcaactttgtcattgatgaaaatatcttaaaagaagaaggaatagaaaattttgacgtttatgcaattaaaccaggtcatcctttgcaaccagatttcttcttagatgaatacccagaagcagttagcaagaaagtggaatcaactggtgctgttccagaattcaaagaagagaaactgcagctgcaaccaaaaccacgttctggagctgtggaagaaacatttagaattgttaaggactctctcagtgatgatgttgttaaagccactcaagcaatctatctgtttgaactctccggtgaagatggtggcacgtggtttcttgatctgaaaagcaagggtgggaatgtcggatatggagagccttctgatcaggcagatgtggtgatgagtatgactactgatgactttgtaaaaatgttttcagggaaactaaaaccaacaatggcattcatgtcagggaaattgaagattaaaggtaacatggccctagcaatcaaattggagaagctaatgaatcagatgaatgccagactgtgaaggaaaatataaaaaaaaagtcgactgctatgctcaaaaagtaaaaaaagctcaacagttaaaatctaatgtttgttttctttcctgttatattataaggatatgcacgtttgttctggaaaagatagaatttgtctctaaaagacttgaaattgtaattaaaatggcaagctaatcaaacataagcttcattaagtgggattctaagacagtctgtgtttttatatttcaagggtttaaccctttgagccttacatctcattcactgtctttctccaagaaaagtattttgggcggacagtcagatcaagcagtaaaattagctctttcaaatcttcttgtcatgtaaaatgaagctagtctgttttaaaatttttagttttggattgtatactaatgaaaatcttaatgatgtttttgatttttatatacttattttaaagaaaatcttatatagtacattttacaaaaattataaaaaatgaattagtactggcgaggactaaatgaaacaataatttttcattttgataactagctttccaggtggacttagccataggaaaatattactaatgtaatttaacaaattgctgcatgtattccatttaaaaatatgtttaaattgtcctaaaacaaaataattttctccctaggagtatgcatttggctacagtgttttgaaacagaaaccttagaataggtcattggtatgggctgaactgtgtatcccccaattcatttgttgaggtcctaactcccatttcttttgaatgtgactgttcggagatgaggcctttaaagaggtgacttaagttcaaaggaggctgttagtctaatccaacatggtgtcctttggacataagagataccagcaatgtgtgcacagaacaaagaccaggagaggacacagtgagaaggcagttatctgcaagcaaagagagaggcttcagaagaaacaaaatcaccagcaccttgatctttgacttctaatctccagaatagtgagaaataaatttctgttgttaagccgtccactgtgggaggccgacgcaggaggattgcttgaggccaggagttcaaggccagcctggacaacatagtaagaccctatctctacccccctaataaattaatttaaaaagccccccaatctgtggtattttattatggcagccctagcaagctaatacagtggtttgagaggctgggagggttgaggggaagataaacttttaaaaagctcttatctttcatttcaatcagttaaaaatacttgctcagtgtaacaattttgcttctcagcttccactctaatattgttgtgccattaagcaatttagctaatcctgacatttcttagattcataatgttaggagcatttaatctgtattttacaagttaggaagcagaggatcagagatgggaaaggactagcccaaggccaacattaacaagccctctaacaaaaactttacaatacatttatgttgaatggaactccaagatctcacctctccatccaggaatggagtccatgtaatcaaagtgaacttaaaaataggacagtttcaacaagtcaggagattcacagcaactgatcaaagggagtccagtcaacgtgagcaagcgtgattatgatgaggaagccccctctgctttaatccacacaaggaacgtaacctgaagtaacctgatgttaaccaatctgctgtgtctactatgctgtttccttgttcctgctagtgctgctttacaaatgcagaccattctatcatacctggcggggcttctgttttattttgtaggctggatgctacccagttcatgaatcgctaataaaagccaattagatcttt

SEQ ID NO: 2125 - DNA, 2423 bp, Homo sapiens
gagagccgagctagcgacgagcagtcgttgcggccgccggcgccgcgggaggtggtggaggcctagccggagccgagaggtctcttgttcccgtcccacggtcccggcgtcacccctccggcgcccagtccccgtcccggaactcccgggcctgtcctgggcccccggtctgtgcactccgctcgccgcagcgcccggcccgggccgcacccgccggccccatgaggagggacgtgaacggagtgaccaagagcaggtttgagatgttctcaaatagtgatgaagctgtaatcaataaaaaacttcccaaagaactcctgttacggatattttcttttctagatgttgttaccctgtgccgctgtgctcaggtctccagggcctggaatgttctggctctggatggcagtaactggcagcgaattgacctatttgatttccagagggatattgagggccgagtagtggagaatatttcaaaacgatgtgggggctttttacgaaagttaagtcttcgtggatgtcttggagtgggagacaatgcattaagaacctttgcacaaaactgcaggaacattgaagtactgaatctaaatgggtgtacaaagacaacagacgctacatgtactagccttagcaagttctgttccaaactcaggcaccttgacttggcttcctgtacatcaataacaaacatgtctctaaaagctctgagtgagggatgtccactgttggagcagttgaacatttcctggtgtgaccaagtaaccaaggatggcattcaagcactagtgaggggctgtgggggtctcaaggccttattcttaaaaggctgcacgcagctagaagatgaagctctcaagtacataggtgcacactgccctgaactggtgactttgaacttgcagacttgcttgcaaatcacagatgaaggtctcattactatatgcagagggtgccataagttacaatccctttgtgcctctggctgctccaacatcacagatgccatcctgaatgctctaggtcagaactgcccacggcttagaatattggaagtggcaagatgttctcaattaacagatgtgggctttaccactctagccaggaattgccatgaacttgaaaagatggacctggaagagtgtgttcagataacagatagcacattaatccaactttctatacactgtcctcgacttcaagtattgagtctgtctcactgtgagctgatcacagatgatggaattcgtcacctggggaatggggcctgcgcccatgaccagctggaggtgattgagctggacaactgcccactaatcacagatgcatccctggagcacttgaagagctgtcatagccttgagcggatagaactctatgactgccagcaaatcacacgggctggaatcaagagactcaggacccatttacccaatattaaagtccacgcctacttcgcacctgtcactccacccccatcagtagggggcagcagacagcgcttctgcagatgctgcatcatcctatgacaatggaggtggtcaaccttggcgaactgagtatttaatgacacttctagagctaccgtggagtctctccagtggaagcaaccccagtgttctgagcaagggttacaaagtgagggagggcagtgtccagatccccagagccacacatacatacacatacacacccttacccccatccactctagctttgtgaccatgggactgaagtttgtgatggcttttttatcaagtagattggtaaaatttaaccattcctgttgaggtgcccataagaaaatcataggccaagatagggaggggcattccagcaaaccccgtgttaatgctactgtggtttttaaatttttgtctaggggtttctttggggattttagaacagcatctgctgtcctccggggtcaagaaaagcatggaaagacaatatatgatgtacccagggaccagaaagaaaatttctttgcatcttagaaatggtagacattcattgtgactaaagagcttctatgcttccttgtttccatgccaacatgctgagcatgctcacaaagaaggctcgtccattcctcctgtgttttagtatttggcccagaggtttcctaaatggttgccttgaaatcactgtggtccaaatgtaattcttacacactcaaattatcactgtctgtagcacacttgtgcacctgtcttacattctctgttgctcccccccacactcttgctcagtctgtcacctgttcagtctgcttactcactcaattgttacccttttgctgttgtcgtgtttacagtttgcattttgaatgattagttgggattaccaaacattttttaaaaagatattatcaataaatatttttttaattctaaattttaaaaaaaaaaaaaaaaaaa

SEQ ID NO: 2126 - DNA, 1486 bp, Homo sapiens
agagagagaaagagaactagtctcgagttttttttttttttttttctcaggtgcttgcgaggtgatcagaaggcaaagatgtcggagcgaaaagtattaaacaaatactacccgccggactttgacccatcaaagatccccaaactcaagctccccaaagaccggcagtacgtggtgcggctgatggcccccttcaacatgaggtgtaagacgtgcggagaatacatctacaaggggaagaaattcaatgctcggaaggagacggtgcagaacgaggtctacctgggcctgcccatcttccgcttttacatcaagtgcacgcgctgcctggcagagatcaccttcaagacagaccctgaaaacacagactacaccatggagcatggagccacgcggaatttccaggctgagaagctcctggaggaggaggagaagagggtgcagaaggagcgggaggacgaggagctgaacaaccccatgaaggtgctggagaaccggaccaaggactccaagctggagatggaggtgctggagaacctccaggagctgaaagacctgaaccagcggcaggcgcacgtggacttcgaggctatgctgaggcagcaccgcctgtcggaggaggagcggcggaggcagcagcaggaggaggacgagcaggagaccgcggccctgttggaggaagccagaaagcgaagactgctggaggactccgactcagaggatgaggctgctccctcgcccctgcagccagcccttcggcccaaccccaccgccatcctggatgaggccccaaagcccaagaggaaggtggaggtctgggagcagagcgttggcagcctgggcagccggcccccgctgtcgaggctggtcgtggtgaagaaggcaaaggccgacccggactgcagcaacgggcagcctcaggcggcccccaccccaggagccccgcagaacaggaaggaggccaaccctacacccctgacgcctggcgcgtcctccctgagccaactgggtgcatacctggacagtgacgacagcaacggcagcaactgagccctcccaggaccccctcacggggtcaaagtcacacgtccagcttcagccacattgaggccagcattgctggtggtcagggcaggaggccttggcgtgactggaggccggacagacaagcgccagcgtgctccaacacatagggccaccaggggcctcagccccaggaggtcccttctctgtgccctcaccagcctctcaacacctcggggacccctgctgctcctgcccccacctgtcactgtgcttagggctgcaacatccctggagcagcttccaacactacttcagggtggcagtgtttggggcactgggcgagcctgccggcctctagatggcctcatctcttccttccacaaactgtctagaaccaataaaaggaaacctgccaaaaaaaaaaaaaaaaaaaaaaaaaaaaaaaaaaaaaaaaaaaaaa

SEQ ID NO: 2127 - DNA, 5801 bp, Homo sapiens
gagcgagagcgcgaaggaaatctggccgccgccgccgcgagcgctcccgaatttttacttgttcctgcaaagctgctggagctcagaagctgattctatcacattgtaagatgcctttggataattctacagtcctcttaaatgaatctttagaacttggcaagtctcactagataccttcaatcatcattttgagctcaaagaattctgagacttatggttggtcatatagaagagtaccttgaacctatagtttcctgaagaatcagtttaaaagatccaaggagtacaaaaggagaagtacaaatgtctactacaagacgaaaacgtagtatgttatgttgtttaccgtaagctgtagtaaaatgagctcgattgttgacagagatgacagtagtatttttgatgggttggtggaagaagatgacaaggacaaagcgaaaagagtatctagaaacaaatctgaaaagaaacgtagagatcaatttaatgttctcattaaagaactgggatccatgcttcctggtaatgctagaaagatggacaaatctactgttctgcagaaaagcattgattttttacgaaaacataaagaaatcactgcacagtcagatgctagtgaaattcgacaggactggaaacctacattccttagtaatgaagagtttacacaattaatgttagaggctcttgatggtttttttttagcaatcatgacagatggaagcataatatatgtgtctgagagtgtaacttcattacttgaacatttaccatctgatcttgtggatcaaagtatatttaattttatcccagaaggggaacattcagaggtttataaaatactctctactcatctgctggaaagtgattcattaaccccagaatatttaaaatcaaaaaatcagttagaattctgttgtcacatgctgcgaggaacaatagacccaaaggagccatctacctatgaatatgtaaaatttataggaaatttcaaatctttaaacagtgtatcctcttcagcacacaatggttttgaaggaactatacaacgcacacataggccatcttatgaagatagagtttgttttgtagctactgtcaggttagctacacctcagttcatcaaggaaatgtgcactgttgaagaacccaatgaagagtttacatctagacatagtttagaatggaagtttctgtttctagatcacagggcaccacccataatagggtatttgccatttgaagttctgggaacatcaggctatgattactatcatgtggatgacctagaaaatttggcaaaatgtcatgagcacttaatgcaatatgggaaaggcaaatcatgttattataggttcctgactaaggggcaacagtggatttggcttcagactcattattatatcacttaccatcagtggaattcaaggccagagtttattgtttgtactcacactgtagtaagttatgcagaagttagggctgaaagacgacgagaacttggcattgaagagtctcttcctgagacagctgctgacaaaagccaagattctgggtcagataatcgtataaacacagtcagtctcaaggaagcattggaaaggtttgatcacagcccaaccccttctgcctcttctcggagttcaagaaaatcatctcacacggccgtctcagacccttcctcaacaccaaccaagatcccgacggatacgagcactccacccaggcagcatttaccagctcatgagaagatggtgcaaagaaggtcatcatttagtagtcagtccataaattcccagtctgttggttcatcattaacacagccagtgatgtctcaagctacaaatttaccaattccacaaggcatgtcccagtttcagttttcagctcaattaggagccatgcaacatctgaaagaccaattggaacaacggacacgcatgatagaagcaaatattcatcggcaacaagaagaactaagaaaaattcaagaacaacttcagatggtccatggtcaggggctgcagatgtttttgcaacaatcaaatcctgggttgaattttggttccgttcaactttcttctggaaattcatctaacatccagcaacttgcacctataaatatgcaaggccaagttgttcctactaaccagattcaaagtggaatgaatactggacacattggcacaactcagcacatgatacaacaacagactttacagagtacatcaactcagagtcaacaaaatgtactgagtgggcacagtcagcaaacatctctacccagtcagacacagagcactcttacagccccactgtataacactatggtgatttctcagcctgcagccggaagcatggtccagattccatctagtatgccacaaaacagcacccagagtgctgcagtaactacattcactcaggacaggcagataagattttctcaaggtcaacaacttgtgaccaaattagtgactgctcctgtagcttgtggggcagtcatggtacctagtactatgcttatgggccaggtggtgactgcatatcctacttttgctacacaacagcaacagtcacagacattgtcagtaacgcagcagcagcagcagcagagctcccaggagcagcagctcacttcagttcagcaaccatctcaggctcagctgacccagccaccgcaacaatttttacagacttctaggttgctccatgggaatccctcaactcaactcattctctctgctgcatttcctctacaacagagcaccttccctcagtcacatcaccagcaacatcagtctcagcaacagcagcaactcagccggcacaggactgacagcttgcccgacccttccaaggttcaaccacagtagcacacgtgcttcctctcttgacatcaagggaggaaggggatggcccattaagagttactcagatgacctgaggaaaggagggaaagttccagcagtttcatgagatgcagtattgagtgttctagttcctggaattagttggcagagaaaatgctgcctagtgctacagatgtacattaaataccagccagcaggaggtgatcataggggcatagccagttctgacagtgttttaggtgcctggatattttttgatggaaaaagaatatattgccaaatattaagaagctcagctatgaaatgacctccagggaatcagaaaggcactaatgatgttagtaacttttagtggttctgtgcctcttatcaagtgttacagaggacataccactgccatgtcaggggtttgcttacagtgatgccatgaagacagtccagtagacttggtagcgaccccctcccccaacccctctcccttttcagataatgatggaacagtaattactttcagaatgttgtgtgggttcaaattctctatgtacagatgatgtaaaaatatgtatatgtctagataaaaggagagaaagcaaaacattttgtatgctgcatgaaagcgttatctcttccttacaggtgtgagcacctttcctgaaattctgacaccatgtgcaaactgatccatcctgtttttccttttgtttacaacacagtagtgttctgttcacttttccggggcacaagtttttttgttcatactttggctgtgatgtcacagtttgttcagtgaggtatgatgtgctgctgggaatggattttttttttcaggttaaattattgatacaacaggattttcaagttattcagaaatatccctcatttcattatttttcaattatgtttgaaaataggatttgcactgctttattttaggtggctgggagttttgattgcatattttgttatagttcatagttggaaatatttgcgtaaatggttttcaacaagcctgaaagtaatttcaagaatgtttcagttatagaggtaaaatttgcacacaaaacatcttaggcactttttaacattctcaatcatgggaattttaacttttgggatttgttgaaatcttttttattatccttcacaatttcaatgcttcttttagtcagaaatgattcagggttatttgaggggaaaaaaccccatagtgccttgattttaattcaggtgataactcaccatcttgaagtcattgtccggtttccgtagcagttttgaaaccttagtacctttttaacagcatgtgggtgtcagtgtcattattagtctcctaataagttcctctgaagactgctatcagtctcttggactggaggtacaaataatttagaaataaaagatgataacctaacactatcatagttattaatgtgatcctaaaattgtttcctaaatcagcatttttctttagtcatttaagaatttaccagaaatatttgctcaatatgatcttgatattcctacaaagaaaaaagaaggggtagggatttggctatgccttcactacaacattagaatattgtaactcacatgccttctaaacgtgaactaagatttcctttggcaatatcatattctaaaagtaataaattccaatacaagttacatacatttaaaaaacattttacagattttatggtactaatgaaatttacagtgatagaacaaaagaggattagtagaaaatacattattagaatataaaaaatgttattactgaggaaagggaggagaggacaagtgtaataaatcaaaattgacctcaaaagaaaatgtgtaacagagttgaggttgttaaaacagaaaaggttctgaataatgaagattaacctaatgcagaattgctaggtaaagaggtcaggggaatgctaagccagttcttaagacttctctgtcctctgctttgctgttatccttaaggcatatactttgtctttctgcagaaaattctacctggctacaattactttgaacattaatgttgaaaaagaaaacaaccaaagaaaattggtacttacccttctacaaaagaagtgtgactagatatcaatcagtaattaacatatcaaggagctcttctagctaaatgaccatccagtagagatttcccacattcccatgaatatcaagaatagttgtcagaatatgtatgtacctgagcatatgtacacagacaagggggatgttgtggaatatggcaatagcattgttcttctcccctttcaaattgcctttcttgaccttatgccattccatatatatctgagttgtgcctcatttatttattggcaatacctagtgatacggatttagctaacaaaagatatgaagaactattatattgaggcctgtcctctacataccacacttaaaagatggtgaactgtgagtactacttaggttgacagcaacaaagcataagacaagccccaggtaaacgtctaaactgtttactcacattgtcctactccagccccttcaattatttcccatctccacaaatagtcgggggaaaaaattaaaattttcctttatgattcttactgttcttcgcagctcatcttttcctgcttagaattaaccattgctaatttaaaggagcagctagctgcttttctgtcagtctgaagcgtagtagtggaagaggtagtaagcaccagctgcctctttgctgctttgttttcctcctgattctcttaaatttgggttgcaaagctatcccgccccccaccctgccccatgaaacttgagcattcaaatgaagattcagcagtgtctgttcttcatttctatagccaaagctgttagttaaaatcccaaatctatagcatttaaagataccaaatagaaacaccttccagcttt

SEQ ID NO: 2128 - DNA, 1184 bp, Homo sapiens
ggcgctgcgggggctgacatgtcgtcccggcctgggcgcgaggacgtgggggctgcgggcgcgcggcggccgcgtgagccgccggagcaggagctgcagcgacgtcgggagcagaagcggcggcgacacgacgcgcagcagctgcagcagctcaagcacctggagtccttttacgaaaaacctcctcctgggcttatcaaggaagatgagactaagccagaagattgcataccagatgtaccaggcaatgaacacgccagggaatttctggctcatgcaccaactaaaggactttggatgccactggggaaagaagtcaaagttatgcagtgttggcgttgcaaacgctatggtcaccgaacgggtgacaaagaatgccctttctttatcaaaggcaaccaaaagttagagcagttcagagtggcacatgaagatcccatgtatgacatcatacgagacaataaacgacatgaaaaggacgtaaggatacagcagttaaaacagttactggaggattctacctcagatgaagataggagcagctccagttcctctgaaggtaaagagaaacacaagaaaaagaagaagaaagaaaagcataagaaaaggaagaaagaaaagaaaaagaagaaaaaacggaagcacaaatcttccaagtcaaatgagggttctgactcagagtgacaaggatgtgacttgttcaacattctcttctcaaacactgaccaaggaacagaggaagatgcagtcagagaaagcagcaggatagagacgccgagagaggagtatatgtgggtcacagcagtgagctcccacccgccttgcagtgaagatgtgaccccaggagagggagtgtctccttccaggtgctagctctggacagcagctgattttaggcaggaaagtttcttcatcgttgtcctccctgctggtcacatgagtttacgattcctttgaagtgtctcccacagggtggcaggactgggagaatctctgaggcgtgtcttccaggccctcccacagcttgtgccctccacagtgtggactcaggtcccatagacatcaggctggagtcttctctgttgttgagaataataaaagctcattatttattttttaaaaaaaaaaaaaaaaaaaaaaaaaaaaaaaaaaaaaaaaaaaaaaaaaaaaaaaaaaaaaaaaaa

SEQ ID NO: 2129 - DNA, 3799 bp, Homo sapiens
ctgtgttccacccgcctgggctagcacgtgggggagctgcggaagcgcggcgctgcgggccgggccgcggggcacagccgggggccggcggcggcgcgcggactccgcatcccgcaccccgatggtagccgaggagctggtgtaattacttcaagcctccaggatggcaatccagttccgttcgctcttccccttggcattgcctgggatgctggcgctcctcggctggtggtggtttttctctcgtaaaaaaggccatgtcagcagccatgatgagcagcaggtggaggctggtgctgtgcagctgagggctgaccctgccatcaaggaacctctccccgtggaagacgtctgtcccaaagtagtgtccacaccccccagtgtcacagagcctccagaaaaggaactgtccaccgtgagcaagctgcctgcagagcccccagcattgctccagacacacccaccttgccgaagatcagagtcctcgggcattcttcctaacaccacagacatgagattgcgaccaggaacacgcagagatgacagtacaaagctggagctagccctgacaggtggtgaagccaaatcgattcctctagagtgccccctttcatccccaaagggtgtactattctccagcaaatcagctgaggtgtgtaagcaagattcccccttcagcagggtgccaaggaaggtccagccaggctaccccgtagtccccgcagagaagcgtagctctggggagagggcaagagagacaggtggggccgaagggactggtgatgccgtgttgggggaaaaggtgcttgaagaagctctgttgtctcgggagcatgtcttggaattggagaacagcaagggccccagcctggcctctttagagggggaagaagataaggggaagagcagctcatcccaggtggtggggccagtgcaggaggaagagtatgtagcagagaagttgccaagtaggttcatcgagtcggctcacacagagctggcaaaggacgatgcggcgccagcacccccagtcgcagacgccaaagcccaggatagaggtgtcgagggagaactgggcaatgaggagagcttggatagaaatgaggagggcttggatagaaatgaggagggcttggatagaaatgaggagagcttggatagaaatgaggagggcttggatagaaatgaggagattaagcgggctgccttccagataatctcccaagtgatctcagaagcaaccgaacaggtgctggccaccacggttggcaaggttgcaggtcgtgtgtgtcaggccagtcagctccaagggcagaaggaagagagctgtgtcccagttcaccagaaaactgtcttgggcccagacactgcggagcctgccacagcagaggcagctgttgccccgccggatgctggcctccccttgccaggcctaccagcagagggctcaccaccaccaaagacctacgtgagctgcctgaagagccttctgtccagccccaccaaggacagtaagccaaatatctctgcacaccacatctccctggcctcctgcctggcactgaccacccccagtgaagagttgccggaccgggcaggcatcctggtggaagatgccacctgtgtcacctgcatgtcagacagcagccaaagtgtccctttggtggcttctccaggacactgctcagattctttcagcacttcagggcttgaagactcttgcacagagaccagctcgagccccagggacaaggccatcaccccgccactgccagaaagtactgtgcccttcagcaatggggtgctgaagggggagttgtcagacttgggggctgaggatggatggaccatggatgcggaagcagatcattcaggaggttctgacaggaacagcatggattccgtggatagctgttgcagtctcaagaagactgagagcttccaaaatgcccaggcaggctccaaccctaagaaggtcgacctcatcatctgggagatcgaggtgccaaagcacttagtcggtcggctaattggcaagcaggggcgctatgtgagttttctgaagcaaacatctggtgccaagatctacatttcaaccctgccttacacccagagcgtccagatctgccacatagaaggctctcaacatcatgtagacaaagcgctgaacttgattgggaagaagttcaaagagctgaacctcaccaatatctacgctcccccattgccttcactggcactgccttctctgccgatgacatcctggctcatgctgcctgatggcatcaccgtggaggtcattgtggtcaaccaggtcaatgccgggcacctgttcgtgcagcagcacacacaccctaccttccacgcgctgcgcagcctcgaccagcagatgtacctctgttactctcagcctggaatccccaccttgcccaccccagtggaaataacggtcatctgtgccgcccctggtgcggacggggcctggtggcgagcccaagtggttgcctcctacgaggagaccaacgaagtggagattcgatacgtggactacggcggatataagagggtgaaagtagacgtgctccggcaaatcaggtctgactttgtcaccctgccgtttcagggagcagaagtccttctggacagtgtgatgcccctgtcagacgatgaccagttttcaccggaagcagatgccgccatgagcgagatgacggggaatacagcactgcttgctcaggtgacaagttacagtccaactggtcttcctctgattcagctgtggagtgtggttggagatgaagtggtgttgataaaccggtccctggtggagcgaggccttgcccagtgggtagacagctactacacaagcctttgacccccatgctgcttcctgagagtctttttttgcactgttgaaattgggcttggcactcaagtcaaagatgaacatcggaataacaaacattgtcctctccagaaagtcctttctttatccatactgtagtcctattgagaagacatttcgtctctgagaaaaaaggatggaactatgggttctcttcgcaaagccaaaggatagtgtttaacaagccagctggcttatcctggttctcagctgtttaaaaaaaaaaaaaaaaaggaatagaaacagtttcaaccagattgtcctattccccctgttccattcccctcttcttccttctatctccttccccggcaaaaaccaaacaaactggcagacaggccagggatgtatgttgcttgcttgagagggtttcttttacttcaaaatctttcttcagggagcaagacatgaactgactaattggtatccactacttgtacagcttacataaatgagttgatgatatttaaccagtttttataaacttcatttaggtctctaaacacagactttttaaattgcaactgtaaatatgaaatggtcatcacatctgaccttggtcagtggggaggggaactggtatcctgccaagcctggttgtaatttgtaaccattttctatttgtgcaaactctgtaaatatgtgtttaaacaaatgtaatattttgtacaagatacactggagaacaaagggaactcaagattcttccagccacatgtcacctgtaggtagaagtaaactctgcagtgcagcttctgctcttggcccctctggccagggcccctgtggcttcctgcacactggacaggtgactgtatggtagagactgtgatctgggaactttttgctgtacaaatctgtttaaaaaaaaaaaaaagtaactcattgaattaa

SEQ ID NO: 2130 - DNA, 3801 bp, Homo sapiens
cccacccttggtggcagaaccgagcactacccagcaaggtgtaattacttcaagcctccaggatggcaatccagttccgttcgctcttccccttggcattgcctgggatgctggcgctcctcggctggtggtggtttttctctcgtaaaaaaggccatgtcagcagccatgatgagcagcaggtggaggctggtgctgtgcagctgagggctgaccctgccatcaaggaacctctccccgtggaagacgtctgtcccaaagtagtgtccacaccccccagtgtcacagagcctccagaaaaggaactgtccaccgtgagcaagctgcctgcagagcccccagcattgctccagacacacccaccttgccgaagatcagagtcctcgggcattcttcctaacaccacagacatgagattgcgaccaggaacacgcagagatgacagtacaaagctggagctagccctgacaggtggtgaagccaaatcgattcctctagagtgccccctttcatccccaaagggtgtactattctccagcaaatcagctgaggtgtgtaagcaagattcccccttcagcagggtgccaaggaaggtccagccaggctaccccgtagtccccgcagagaagcgtagctctggggagagggcaagagagacaggtggggccgaagggactggtgatgccgtgttgggggaaaaggtgcttgaagaagctctgttgtctcgggagcatgtcttggaattggagaacagcaagggccccagcctggcctctttagagggggaagaagataaggggaagagcagctcatcccaggtggtggggccagtgcaggaggaagagtatgtagcagagaagttgccaagtaggttcatcgagtcggctcacacagagctggcaaaggacgatgcggcgccagcacccccagtcgcagacgccaaagcccaggatagaggtgtcgagggagaactgggcaatgaggagagcttggatagaaatgaggagggcttggatagaaatgaggagggcttggatagaaatgaggagagcttggatagaaatgaggagggcttggatagaaatgaggagattaagcgggctgccttccagataatctcccaagtgatctcagaagcaaccgaacaggtgctggccaccacggttggcaaggttgcaggtcgtgtgtgtcaggccagtcagctccaagggcagaaggaagagagctgtgtcccagttcaccagaaaactgtcttgggcccagacactgcggagcctgccacagcagaggcagctgttgccccgccggatgctggcctccccttgccaggcctaccagcagagggctcaccaccaccaaagacctacgtgagctgcctgaagagccttctgtccagccccaccaaggacagtaagccaaatatctctgcacaccacatctccctggcctcctgcctggcactgaccacccccagtgaagagttgccggaccgggcaggcatcctggtggaagatgccacctgtgtcacctgcatgtcagacagcagccaaagtgtccctttggtggcttctccaggacactgctcagattctttcagcacttcagggcttgaagactcttgcacagagaccagctcgagccccagggacaaggccatcaccccgccactgccagaaagtactgtgcccttcagcaatggggtgctgaagggggagttgtcagacttgggggctgaggatggatggaccatggatgcggaagcagatcattcaggagttgcagctccacccccgggaaagcggggcactttgataacgaggtgtcctgggtttttcgagtgctgaccccagcgtagacagttcagaccgctaacttacaggttctgacaggaacagcatggattccgtggatagctgttgcagtctcaagaagactgagagcttccaaaatgcccaggcaggctccaaccctaagaaggtcgacctcatcatctgggagatcgaggtgccaaagcacttagtcggtcggctaattggcaagcaggggcgctatgtgagttttctgaagcaaacatctggtgccaagatctacatttcaaccctgccttacacccagagcgtccagatctgccacatagaaggctctcaacatcatgtagacaaagcgctgaacttgattgggaagaagttcaaagagctgaacctcaccaatatctacgctcccccattgccttcactggcactgccttctctgccgatgacatcctggctcatgctgcctgatggcatcaccgtggaggtcattgtggtcaaccaggtcaatgccgggcacctgttcgtgcagcagcacacacaccctaccttccacgcgctgcgcagcctcgaccagcagatgtacctctgttactctcagcctggaatccccaccttgcccaccccagtggaaataacggtcatctgtgccgcccctggtgcggacggggcctggtggcgagcccaagtggttgcctcctacgaggagaccaacgaagtggagattcgatacgtggactacggcggatataagagggtgaaagtagacgtgctccggcaaatcaggtctgactttgtcaccctgccgtttcagggagcagaagtccttctggacagtgtgatgcccctgtcagacgatgaccagttttcaccggaagcagatgccgccatgagcgagatgacggggaatacagcactgcttgctcaggtgacaagttacagtccaactggtcttcctctgattcagctgtggagtgtggttggagatgaagtggtgttgataaaccggtccctggtggagcgaggccttgcccagtgggtagacagctactacacaagcctttgacccccatgctgcttcctgagagtctttttttgcactgttgaaattgggcttggcactcaagtcaaagatgaacatcggaataacaaacattgtcctctccagaaagtcctttctttatccatactgtagtcctattgagaagacatttcgtctctgagaaaaaaggatggaactatgggttctcttcgcaaagccaaaggatagtgtttaacaagccagctggcttatcctggttctcagctgtttaaaaaaaaaaaaaaaaaggaatagaaacagtttcaaccagattgtcctattccccctgttccattcccctcttcttccttctatctccttccccggcaaaaaccaaacaaactggcagacaggccagggatgtatgttgcttgcttgagagggtttcttttacttcaaaatctttcttcagggagcaagacatgaactgactaattggtatccactacttgtacagcttacataaatgagttgatgatatttaaccagtttttataaacttcatttaggtctctaaacacagactttttaaattgcaactgtaaatatgaaatggtcatcacatctgaccttggtcagtggggaggggaactggtatcctgccaagcctggttgtaatttgtaaccattttctatttgtgcaaactctgtaaatatgtgtttaaacaaatgtaatattttgtacaagatacactggagaacaaagggaactcaagattcttccagccacatgtcacctgtaggtagaagtaaactctgcagtgcagcttctgctcttggcccctctggccagggcccctgtggcttcctgcacactggacaggtgactgtatggtagagactgtgatctgggaactttttgctgtacaaatctgtttaaaaaaaaaaaaaagtaactcattgaattaa

SEQ ID NO: 2131 - DNA, 4890 bp, Homo sapiens
cgccacgggggtcgctgtcatggcaacgcacccgctcccgcatggagggcgcgaagccgcattgtgagcgctggccctggagcccgcggccccgcggctgagagcgagcctcggtcccgctgaagctcccctgacttctgcctgctccctctcccgacgggacggaaagggccggggctcgggcatggggtcccctgcggtccgagcctgcccacggcgaagccggtgcagcctggccccgtgacccctctgaatccccgtccggccgtcgccgtgcagttgtcaagtttctgggaagattagtgggagcgcagccgcccgagcccgacggccggagggtcgcggccagtcccccttgccgggtcgccacgtcccacaaggtccttcccggccgctccgtgggaggcggggcgcaggttggagtaacagggacgggcttgagctggtacggaaccgggcaaggtgagagaagtgtcttccacgcgattcccaagcctcgctagggaatcgagggagaagaaaggttgctcagagtgataaagaacatgccgttgcaaacggaagagcaacgtgcccgaatctaggtgacaggaagggcttaggccttttcggcacgaatggagccttccagtcaacatgcttctacgtgatgcagctttatagcgcaaaaaaatgacaatgcaaggggtacaaacagccctgctagaccaacagcccgagcctcgacagtctacatccggcgccttcaagcccccaaccacacactgcgaagtgggaaaagttcccagcgcggcttggcgaacccgctaacacggcgctctcacgagctgctggaaaagaccttcgcgagagggcgcagggagtcccgctccctggagggcccgcccccttggaggggaccggaagcgcttgtcctggcccggaagcagtgctgactccgtacacgcgcgctgcggcatggcggcccaccgccccggcccgctcaagcagcagaataaagctcataaaggcggacggcatcggggtcggggatctgcacagcgggacggcaagggccgtctggcactgaaaaccctaagcaagaaggtgagaaaagaactcagcagagtcgaccagaggcatcgcgccagccagctccgaaagcagaagaaggaggcggttctggcagagaagagacagctgggtggcaaggatggccctcctcatcaggtactggtggtgcccctgcacagcagaatttccctgccagaggccatgcagctgcttcaagatagggacactggaacagtacacttgaatgaattgggaaacacccagaactttatgctgctgtgcccccgcttgaaacatcggtggtttttcacctcagcaaggccaggggatctgcacgttgtgttagacatggctaaagtagctgataccatcctgttcctccttgatccactagaaggctgggacagcaccggtgattactgtctttcctgcctctttgctcagggccttccgacctatacactagctgtccaggggatttctggcctcccactgaagaaacaaatagataccaggaagaagctaagtaaagcagtggagaagcgctttccgcatgacaaactcctcttgttagacactcaacaggaggcagggatgctgcttaggcagttggctaaccagaagcaacagcatcttgcttttcgagatcggcgggcctacctatttgcccatgctgttgattttgttcctagtgaagagaataacttggtgggcaccttgaaaatttcaggctatgttcgagggcagactctgaatgtcaataggttgctgcatatcgttggatatggtgatttccagatgaaacagatagatgcccccggagaccctttccctttaaatcctagaggaattaaaccccaaaaggacccagacatggcaatggagatttgtgctacggatgctgtagatgatatggaagaaggtcttaaagtcctaatgaaggcagaccctggtagacaggaatccttgcaagcagaggttatcccagatccaatggagggagagcaaacctggcccactgaggaggagctgagcgaggcaaaggatttcttgaaggaaagttctaaggtggtaaagaaggtccccaaaggaacatccagttaccaagctgaatggattttggatggtggcagccaaagtggtggggaaggagatgaatatgaatatgatgatatggaacatgaggattttatggaggaggaatctcaggatgagagtagtgaagaagaggaagaatatgaaactatgactattggggagtctgtgcatgatgatctgtatgataagaaagtagatgaagaagctgaggcaaaaatgttggagaaatataaacaagaaagactggaagagatgtttccagatgaagtggacacgccccgtgatgtggctgctcgaattcgatttcagaaatacagaggccttaagagcttccggacatctccatgggatcctaaggaaaaccttcctcaagattatgctcgaatatttcagtttcagaactttactaacactaggaaaagcatctttaaagaggttgaagaaaaagaggttgaaggagctgaggttggctggtatgtcacacttcatgtctctgaagtccccgtctcagtggtcgagtgcttcaggcaaggaacacccttgattgcattttctttactacctcatgaacagaagatgtcagtattgaatatggtggtgaggcgtgaccctggcaacactgaacctgtgaaagccaaggaagagctcatatttcactgtggattcaggcgcttccgagcctcacctttattctctcagcacactgcagcggacaaacataaattgcagagattcctgactgctgacatggccctggtggcgacagtctatgcgccaatcacttttcctcctgcatctgtgctgcttttcaagcaaaaaagcaatggaatgcacagcctcattgctacaggccatcttatgtcagtagatccagacagaatggtcatcaagagagttgttctgagtggtcatcctttcaaaatttttactaagatggcagtagtacgttacatgttcttcaacagagaggatgtgctgtggtttaaaccagtggaactgagaacgaagtggggccggagaggacatatcaaggaacctttaggtacccatggccacatgaaatgcagctttgatgggaagctaaaatctcaagacacagtactgatgaacctgtataaacgagtcttccccaaatggacttatgatccatatgtaccagaaccagtaccctggctgaaaagtgagatttcttcaacagtgcctcaagggggcatggagtaatggattcaaagagattctgtcttaccggtgccagtcagtactccagggatgggaggcacaagttgtgattgggcaaagtttattttctatgtcagcctgtcagtccactgccccattttgcaagacttttttttagccttgacaaaatgtctcagttaagtataaaagtttttccactacttagtccaaaaaaaactattaaatcttaatgaaatagccactctccattaagaatctgataactaagagttgacaatactaggaaacaaaatgtcttcagtatctaaagacactgaattcccaccatttccttttctgtaaattaaacagaaacagactgataagaagctggcctttcagcctgcttcacccaagttatggaggaggttaagtctacatttccaccactgagcacaatacaaatgttctttacttctggggaaacagtttgaaaatgttgagacagcacagcagccactccaacaccagctgtaggttcaatgagtagtttcatcctctcccacaccagctgggttgcacactgttgatatggaagggagtaggaattagtgaaaggggagtctagttggtttacctataaagttcagatgagaatacgtgtccagtttgaattttcttatcactgtgtacacacgcttcccaaagcttttctttaattctgactctgcttctgtcaagagggttgtcattaatacatctagggtaccctcccatgtcatgaagttacctagtcaggttcccgtgggtcacttgctactcctaagggaagtttcttctgcctaagaagttacaccatgctttgctatttcttttcttgctggagcctcaccttaatttcatcctctgtgacagtgaagatatcatccacaaggtccctgataataggccaggtgttcaagccaatgctggatttgacaccatctgctatggtttctggaggataaagattgggcatcagtttccccttcagcttggactggtagcagtcatctgcatttgagggttcagcagcatataccttcacactaggtttcagagcctgggaagaggaatattaagacatcttaacaacaaaccacaacattgcctgcatgtctaaaagaaaatatgggcctggtgtggtggctcacacctgtaatcccaacactttgggagcccgaggcgggtggatcagctgaggtcaggagttcaagaccagcctggccaacctggtgaaatgcagtgtcaactaaaaataggaaaatcagccaggcgtggtggcagacccctgtaatcccagctactcaagaggctgaggtaggagaatcacttgaacttgggaggggtaggttgcagtgagctgagatcacaccaaaatggggtggggcgcagtggctcacgcctgtaatcccagcactttgggaggccgaggtgggcggatcacgaggtagggagatcaagaccatcctggctaacacggtgaaaccccgtctctactaaaaatacaaaaaaaaaaaa

SEQ ID NO: 2132 - DNA, 2306 bp, Homo sapiens
agggccccgccctgccttctggggcaaagcggagagtggtcggttctgccccacagtaacgcgaggaaagaaatctcgcgaggctggagttctccgggagcgccggtcggaggcggtcggcggaggtgtctaccccgccggtgatggcgttgaacgccactggcttcccggccttccgtccgctgcctccgtccgattctgcgtctgcttgctgaggaggcggattaggggggcgcggagtctcttcccttgagtgcataggtcccggttggtagagggtttgagtccgcatcgccacagctgaaggctgcgagggactaagagcagaatatatctttagaaatgagttgcacaattgagaaggcacttgccgacgctaaagctcttgttgaaagattaagagatcatgacgatgcagcagaatctctgattgagcaaaccacagctctcaacaagcgagtagaagccatgaaacagtatcaggaagaaattcaagaacttaatgaagtcgcgagacatcggccacggtccacgttagttatgggaatccagcaagaaaacagacaaatcagagagttgcaacaagaaaacaaagaattacgtacatctctggaagaacatcagtcggccttggaacttataatgagcaagtaccgagaacaaatgtttagattgctaatggctagcaaaaaagatgatccgggtataataatgaagttaaaagagcagcactccaagattgacatggtacatcgtaacaagtccgaaggattcttccttgatgcatctcgacacatccttgaagcacctcaacatggactggagagaaggcacttggaagcaaatcagaatgaactgcaagcacatgttgaccagataactgaaatggcagcagtaatgaggaaagccattgaaattgacgagcaacagggttgcaaggaacaagaacgaatatttcaacttgaacaagaaaacaaaggcttgagagagatccttcaaataactcgagaatcatttttgaacctaaggaaagatgatgcgtcggaaagtacttctttgtcagcattagtgaccaacagtgatttgagtctgaggaagagctgaagagtttctgagtctgtgagcttcttacatggctccaaatggtcaaataagtgaatgaatgaatggacagaaaattcaatcctttatttttttctctgtaaatatgtacagtgcacgggctatgagatagcaacaaaaaatgcatagttaatggtcatagactttattccaaaacataattggaaaatagaaactgagccattgccaaatggtaaagaaatgaaaagttttcacagtgactactgaatataccaagagcttttggcagtactgctggctttctgggtgattaattaggtaaacttgaatattcccagtaaatgtttgagaatgcataaaattataccaatttaaaaatataaatttttgccactgttttgtgaacggaggatttgtacgctaaatttcatccttatttggcgtcaaagttgatgcaaagtttatgtaccatgagacttctagtgattgcctactttcacatttatttaaatttttgtgaaagaaaatacagttttaaaggctataggaatgtgttatatgtaccttaaacagataatttaattttagcaatttatcataactgatacttagctaacaattgtccataacttgtttaagtgtaagaaataccatttcaggaatgaaaaagaaggaatactactttctaagaaagaagatcttataatagacatatttagtaggttaaactactcctttgaaagaataagttttggttcaaagtcaataatgaagacgagatttgtttttctcttctctggctgatttttaaggatattatgtagttcatttagttaacagaattgaaatgtttgatatggcaagataggtatggtaatttcaaagtgaattgggaattcctctggctcatagaacccttttttttttcctttaagtattcttgagatacaaaaaaaaaaagtaaataaaatttcaaaaaaaaagttccggatctgtttttaagctccatctggtcctcataacctgcaagatttttcttaaaacctttcagctgaaagtgggggtaaaggtggagtaatctgtggatttgtttctgttgtcttttaaaatgtcaaatatataatatgtaatttttttaaaaaccaccagatacagaaatgtgctttaacatcagttgaaacctaaattttcttatgttgtggtgattgtattaaaaaaaaaat

SEQ ID NO: 2133 - DNA, 2835 bp, Homo sapiens
gtacagaagcaaaatcaaacctgctatttcagcactcctgtttttaacttggtgtctttagtgcttggattggtgggatgtttcggaatgggcattgtcgccaattttcaggagttagctgtgccagtggttcatgacgggggcgctcttttggcctttgtctgtggtgtcgtgtacacgctcctacagtccatcatctcttacaaatcatgtccccagtggaacagtctctcgacatgccacatacggatggtcatctctgccgtttcttgcgcagctgtcatccccatgattgtctgtgcttcactaatttccataaccaagctggagtggaatccaagagaaaaggattatgtatatcacgtagtgagtgcgatctgtgaatggacagtggcctttggttttattttctacttcctaactttcatccaagatttccagagtgtcaccctaaggatatccacagaaatcaatggtgatatttgaagaaagaagaattcagtctcactcagtgaatgtcgcaggccatttctaaaagtgctacagaggacagacagggttttgaggccaccctgattattgggatgcatctgcagcacatccaggacttgaatttcattacgagttcctaatagttgtatttctaaagatgtgtttcctagagaatgtacagccttatgacactgtagtgatgtttttataattttctaagtagatttttttatattaacaaattcatatacagaaaaaataaggtgttacaaaaaatggagagctcttatttttgtacagattctgtcgtttttttttatttgtgtgagatttatggaaatacactaaatgagtaattcaggttcagtacatttattacaaagtgaaatcaggggatattcatttgtaaattttattcttagtgaatgaactgtataattttttttatcaggagagcacttataaaattcaatttataaagatcatatacccaaatcataaagatttagttgatacattaacactaagatactctgatttttagcgaactaaacaaagtgcttctactgagaggcctttataccaccatgtacagtaactctaagtgaatacggaagaccttggttttgaaattctgccaccttgtttctccctgctcatgaggtcgcaccttttgctcttgctgctaattgcccattcgtagtgggtgtaatgccaggtggaatggtttcaacaagtcaggtgaaaaccatcctttattgttgctggcacaacttgatatatagtctgactcagaactgaagctcacatctcaaattcatttcatgccagtaaatgtggcaaagagaagaaaggcccaagagcgagacaagaagaatggagaagggggcagccaagaagaacttctgggttcagggtactgtttatttgctccttctcttcatgcctgtggctggatgtcccacaacactataagaaatataagtcaagccctttgtgttaagcaagaactacagactccatcttttcacccaaatcatgaatgaccaataaaaagcaagttattccagaggaagaagcagcccttgaaatgttaaggcttaggcttgaaaggtgaagagcaggaattctctctttcaaatcctagagcataaacccatgtgtggccaagtgagatcagccctcaagggcacatgccaagggcagagcagcccatgtagacagcttcggagggcatgggggtgtagggagttcggggtagctcctcattaactatttgttgggtgagtaaaggggtgaggctcagtggcaggtacctctgcaatgacaagctgcctcccctctatgtgtttagcatatgttattagaacatgtccgacacccctaccgctgccatttgggccctttaataaagccaagtagagaaatctggcaataaaaggcaaatgtaagcatgctttctttaagacgcatcataaatggttttctttaagtgaatggaagagtttgacagagatacacctttgtaagaaaacattaagaatgctggctggctgtggtggctcacacctgtattcccagcactttgggaggcctaggcaggaggattgcttgagcctgggacttcgagaccagactgggaaacatggcaaaatcccatctctacaacaaaaatacaaaaattagccaagtgcggtggtgtgcctgtagtcctagttacttgggaggctgaggtgggagaatcacctgagcccaggaggtggaggctgcagtgagccatgccaatgcactccagtctgggcaacagagtgagaccctgtctcaaaaataaataaataaataaatgaataaagagaatgctaatcatttctgggttcactgcgactcactgtagtgctggggatcccccttgtaacactggaactgaaaggcagtgatgaaagctatgtcaagcattcattattctgaagaggaggagaaatgccacatacctttcccatgggacctgtggtggaatgaatccatacttctgcctcacttcgagcagacttttgttctcggcgctcctcacgatggagtttcatgcttcattttcacatctctctgcacaattagattgggagctccttgagggcagagtacgtgccttaatctttatctttgtaatgccacaatgaacagagtgcctcctggtacactgtaggagcttaagaaatactcactgaatgcatgaatgaatgaatgaacaaatgaaggaatgactaaggatgtttgtagtgctataatatagaatgggatttactctgctttaccagttagtttcataataaacaaatagtctgt

SEQ ID NO: 2134 - DNA, 1651 bp, Homo sapiens
agtagagttttgctgttaagactgcgcgaggagctagagagagcggagagcgcggagccgggccgcacccgccgagccgtcccttctccctgtgatcagttaccaactacctgttgatgaaaaaagtacatctcctggaagggatgctttttagctgagctctggtggatgagaggagctagccttgaaaaacttgatactgatggacattgtgtgggccagaggcagggatggttggctatgaccccaaaccagatggcaggaataacaccaagttccaggtggcagtggctgggtctgtgtctggacttgttactcgggcgctgatcagtcccttcgacgtcatcaagatccgtttccagcttcagcatgagcgcctgtctcgcagtgaccccagcgcaaagtaccatggcatcctccaggcctctaggcagattctgcaggaggagggtccgacagctttctggaaaggacacgtcccagctcagattctctccataggctatggagctgtccaattcttgtcatttgaaatgctgacggagctggtccacagaggcagcgtgtacgacgccctggaattctcagtgcactttgtatgtggtggcctggctgcctgtatggccaccctcactgtgcaccccgtggatgttctgcgcacccgctttgcagctcagggtgagcccaaggtctataatacgctgcgccacgccgtggggaccatgtataggagcgaaggcccccaggttttctacaaaggcttggctcccaccttgatcgccatcttcccctacgccgggctgcagttctcttgctacagctccttgaagcacctgtacaagtgggccataccagccgaaggaaagaaaaatgagaacctccaaaacctgctttgtggcagtggagctggtgtcatcagcaagaccctgacatatccgctggacctcttcaagaagcggctacaggttggagggtttgagcatgccagagctgcctttggccaggtacggagatacaagggcctcatggactgtgccaagcaggtgctacaaaaggaaggcgccctgggcttcttcaagggcctgtcccccagcttgctgaaggctgccctctccacaggcttcatgttcttctcgtatgaattcttctgtaatgtcttccactgcatgaacaggacagccagccagcgctgagcgcaggaaggaccccaggtcttccctggaggcagcctcctgaaggaaggaagattcagtctccactgagaggtgccgtctggcccttccctgcaggccagctgccccaagcggggtagcagccttgaacccacccagctgggacaccaccagaaggtccagggctctccccatgagagaatcagagggaatgcaggacgtggtctatggtgagccaacgacacagtgagaaggagcaggaagttgctgtttctcctctgaccagcccacactgcaaaggaaacagacgccatcctacacctatcagccctgcctgccaggagaacagaacacactcctggtctggatggggctgctgcttgagtgcagagggctgcggtaggccctttgcaggagtcaggtccctacacttggcctgtttttccaacctatttaatagacattaaagctaaacacac

SEQ ID NO: 2135 - DNA, 3046 bp, Homo sapiens
gccggcgggatcccaggcgccgagcgcccgctgagcagccaccctttgcgcgccgcctgcagcgcagcttccccgggcgctgcctggacaggcctgcctgcgtgctgggacatgtctggcctccaaggaccgtcggtgggcgatggctgcaacggtggaggggccagagctggaggcagctgctgccgcaggagatgcttcagaggattcggacgcagggtccagggcgctgcctttcctgggcggcaaccggctgagcttggacctgtaccccgggggctgccagcagctgctgcacctgtgtgtccagcagcctctgcagctgctgcaggtggaattcttgcgtctgagcactcacgaggaccctcagctgctggaggccaccctggcccagctgcctcagagcctgtcctgcctccgctccctggtcctcaaagggtcgatctgggacctcggaccctggctctgagggccacatccgcctccccccttcccaggagggcaacgccgggacacactgggtgcctgtctccggggtgccctgaccaacctgcccgctggtctgagtggcctggcccatctggcccacctggacctgagcttcaacagcctggagacactgccggcctgtgtcctgcagatgcgaggtctgggtgcgctcttgctgtctcacaactgcctctctgagctgcctgaggctctgggggccctccccgccctcaccttcctcacagtgacacacaaccgcctgcagacgctgcccccagcactgggggccctatccaccctgcagcgcctcgatctctctcagaatctgctggacacgctacctcctgagattggaggcctgggcagcctcctggagctcaacctggcctccaaccggctgcagagcctcccagcctctctggcgggacttcggtccttgcggctccttgtcctgcacagcaacctcctggcctctgtgccagctgacttggcccgccttccactcctcacccggctcgacctgagggacaaccagctccgggacctgccccctgagctgctagacgccccctttgtgcgcctgcaggggaaccccctgggtgaggcctcgccagacgccccgagttcaccagtggcagccctcattccagaaatgcccagactgttcctgacctcagatttggacagctttcctgtgacccctcaaggctgctcagtgaccctggcctgtggcgtccgcctgcagttcccagcgggagccaccgccacccccatcaccatccgctatcggctgctgctgccggagccaggcctcgtccccctgggtcctcatgacgccctgctcagccatgtgctggagctgcagccccatggggtggccttccagcaggatgtggggctgtggctgctcttcaccccaccgcaggcccggcgctgccgtgaagtggtggtcaggacccggaatgacaacagctggggtgacctggagacctacctggaggaagaggcaccccagcggctctgggctcactgccaggtgccccacttctcctggttccttgtggtttcccgccctgtgtccaatgcctgcctggtgccaccggaggggacactgctgtgctcctcgggtcatcctggggtcaaagtcatcttcccccctggggccactgaggagcctcgtcgagtctccatgcaggtggtgcgcatggctggccgagagctgcaggccctcctgggagaaccagaggctgcagtgagccccctgctgtgcctgtcacagagcggtccccccagcttcctccaaccggtcaccgtgcagctgcctctgccctctggcatcacaggcctcagtctggaccgctcccgcctgcacctgttgtactgggcccctcctgcagccacctgggatgacatcacagctcaggtggtcctggagctcacccacctgtactggctctggtacaccaccaagaactgtgtgggaggcctggctcggaaggcctgggagcggctgcggctgcaccgtgtgaacctcatcgctctgcagcggcgccgggaccctgagcaggtcctgctgcagtgcctgccccgaaacaaggtggacgccacccttcggcggctgctggagcggtaccggggccccgagccctctgacacggtggagatgttcgagggcgaagagttctttgcggccttcgagcgcggcatcgacgtggatgctgaccgccctgactgtgtggagggcagaatctgctttgtcttctactcgcacctgaagaatgtgaaggaggtatacgtgaccaccactctggaccgggaggctcaggctgtgcggggccaggtgtccttctaccgtggcgcggtgcctgtgcgggtgcccgaggaggctgaggctgcccggcagaggaagggcgcagacgccctgtggatggccactctgcccatcaagctgccgagacttcgagggtccgaggggccacggcggggggctggcctctccttggcacccttgaatctgggagatgccgagaccggctttctgacgcagagcaacctgctgagtgtggctgggcgtctgggtctggactggccagccgtggccctgcacctgggggtgtcctaccgggaggtgcagcgcatccggcacgagttccgggatgatctggatgagcagatccgtcacatgctcttctcctgggctgagcgccaggctgggcagccaggggctgtggggctcctggtgcaggccctggagcagagtgaccggcaggacgtggctgaagaggtgcgcgcagtcttggagctcggccgccgcaagtaccaggacagcatccgacgcatgggcttggcccccaaggaccccgctctgcctggctcctcggctccacagcccccagagcctgcccaggcctaggccccacagacttttaggctggcccagatattccccagtggatgggcagagcccccaccttcaagtctctccagtgtgtggggacgggtccctgtgagcaacaaaactgcactgtttctttcacctcaaaaaaaaaaaaaaaaa

SEQ ID NO: 2136 - DNA, 3025 bp, Homo sapiens
gccggcgggatcccaggcgccgagcgcccgctgagcagccaccctttgcgcgccgcctgcagcgcagcttccccgggcgctgcctggacaggcctgcctgcgtgctgggacatgtctggcctccaaggaccgtcggtgggcgatggctgcaacggtggaggggccagagctggaggcagctgctgccgcaggagatgcttcagaggattcggacgcagggtccagggcgctgcctttcctgggcggcaaccggctgagcttggacctgtaccccgggggctgccagcagctgctgcacctgtgtgtccagcagcctctgcagctgctgcaggtggaattcttgcgtctgagcactcacgaggaccctcagctgctggaggccaccctggcccagctgcctcagagcctgtcctgcctccgctccctggtcctcaaaggagggcaacgccgggacacactgggtgcctgtctccggggtgccctgaccaacctgcccgctggtctgagtggcctggcccatctggcccacctggacctgagcttcaacagcctggagacactgccggcctgtgtcctgcagatgcgaggtctgggtgcgctcttgctgtctcacaactgcctctctgagctgcctgaggctctgggggccctccccgccctcaccttcctcacagtgacacacaaccgcctgcagacgctgcccccagcactgggggccctatccaccctgcagcgcctcgatctctctcagaatctgctggacacgctacctcctgagattggaggcctgggcagcctcctggagctcaacctggcctccaaccggctgcagagcctcccagcctctctggcgggacttcggtccttgcggctccttgtcctgcacagcaacctcctggcctctgtgccagctgacttggcccgccttccactcctcacccggctcgacctgagggacaaccagctccgggacctgccccctgagctgctagacgccccctttgtgcgcctgcaggggaaccccctgggtgaggcctcgccagacgccccgagttcaccagtggcagccctcattccagaaatgcccagactgttcctgacctcagatttggacagctttcctgtgacccctcaaggctgctcagtgaccctggcctgtggcgtccgcctgcagttcccagcgggagccaccgccacccccatcaccatccgctatcggctgctgctgccggagccaggcctcgtccccctgggtcctcatgacgccctgctcagccatgtgctggagctgcagccccatggggtggccttccagcaggatgtggggctgtggctgctcttcaccccaccgcaggcccggcgctgccgtgaagtggtggtcaggacccggaatgacaacagctggggtgacctggagacctacctggaggaagaggcaccccagcggctctgggctcactgccaggtgccccacttctcctggttccttgtggtttcccgccctgtgtccaatgcctgcctggtgccaccggaggggacactgctgtgctcctcgggtcatcctggggtcaaagtcatcttcccccctggggccactgaggagcctcgtcgagtctccatgcaggtggtgcgcatggctggccgagagctgcaggccctcctgggagaaccagaggctgcagtgagccccctgctgtgcctgtcacagagcggtccccccagcttcctccaaccggtcaccgtgcagctgcctctgccctctggcatcacaggcctcagtctggaccgctcccgcctgcacctgttgtactgggcccctcctgcagccacctgggatgacatcacagctcaggtggtcctggagctcacccacctgtacgcacgcttccaggtcacacacttctcctggtactggctctggtacaccaccaagaactgtgtgggaggcctggctcggaaggcctgggagcggctgcggctgcaccgtgtgaacctcatcgctctgcagcggcgccgggaccctgagcaggtcctgctgcagtgcctgccccgaaacaaggtggacgccacccttcggcggctgctggagcggtaccggggccccgagccctctgacacggtggagatgttcgagggcgaagagttctttgcggccttcgagcgcggcatcgacgtggatgctgaccgccctgactgtgtggagggcagaatctgctttgtcttctactcgcacctgaagaatgtgaaggaggtatacgtgaccaccactctggaccgggaggctcaggctgtgcggggccaggtgtccttctaccgtggcgcggtgcctgtgcgggtgcccgaggaggctgaggctgcccggcagaggaagggcgcagacgccctgtggatggccactctgcccatcaagctgccgagacttcgagggtccgaggggccacggcggggggctggcctctccttggcacccttgaatctgggagatgccgagaccggctttctgacgcagagcaacctgctgagtgtggctgggcgtctgggtctggactggccagccgtggccctgcacctgggggtgtcctaccgggaggtgcagcgcatccggcacgagttccgggatgatctggatgagcagatccgtcacatgctcttctcctgggctgagcgccaggctgggcagccaggggctgtggggctcctggtgcaggccctggagcagagtgaccggcaggacgtggctgaagaggtgcgcgcagtcttggagctcggccgccgcaagtaccaggacagcatccgacgcatgggcttggcccccaaggaccccgctctgcctggctcctcggctccacagcccccagagcctgcccaggcctaggccccacagacttttaggctggcccagatattccccagtggatgggcagagcccccaccttcaagtctctccagtgtgtggggacgggtccctgtgagcaacaaaactgcactgtttctttcacctcaaaaaaaaaaaaaaaaaaaaaaa

SEQ ID NO: 2137 - DNA, 2902 bp, Homo sapiens
gcttccccgggcgctgcctggacaggcctgcctgcgtgctgggacatgtctggcctccaaggaccgtcggtgggcgatggctgcaacggtggaggggccagagctggaggcagctgctgccgcaggagatgcttcagaggattcggacgcagggtccagggcgctgcctttcctgggcggcaaccggctgagcttggacctgtaccccgggggctgccagcagctgctgcacctgtgtgtccagcagcctctgcagctgctgcaggtggaattcttgcgtctgagcactcacgaggaccctcagctgctggaggccaccctggcccagctgcctcagagcctgtcctgcctccgctccctggtcctcaaaggagggcaacgccgggacacactgggtgcctgtctccggggtgccctgaccaacctgcccgctggtctgagtggcctggcccatctggcccacctggacctgagcttcaacagcctggagacactgccggcctgtgtcctgcagatgcgaggtctgggtgcgctcttgctgtctcacaactgcctctctgagctgcctgaggctctgggggccctccccgccctcaccttcctcacagtgacacacaaccgcctgcagacgctgcccccagcactgggggccctatccaccctgcagcgcctcgatctctctcagaatctgctggacacgctacctcctgagattggaggcctgggcagcctcctggagctcaacctggcctccaaccggctgcagagcctcccagcctctctggcgggacttcggtccttgcggctccttgtcctgcacagcaacctcctggcctctgtgccagctgacttggcccgccttccactcctcacccggctcgacctgagggacaaccagctccgggacctgccccctgagctgctagacgccccctttgtgcgcctgcaggggaaccccctgggtgaggcctcgccagacgccccgagttcaccagtggcagccctcattccagaaatgcccagactgttcctgacctcagatttggacagctttcctgtgacccctcaaggctgctcagtgaccctggcctgtggcgtccgcctgcagttcccagcgggagccaccgccacccccatcaccatccgctatcggctgctgctgccggagccaggcctcgtccccctgggtcctcatgacgccctgctcagccatgtgctggagctgcagccccatggggtggccttccagcaggatgtggggctgtggctgctcttcaccccaccgcaggcccggcgctgccgtgaagtggtggtcaggacccggaatgacaacagctggggtgacctggagacctacctggaggaagaggcaccccagcggctctgggctcactgccaggtgccccacttctcctggttccttgtggtttcccgccctgtgtccaatgcctgcctggtgccaccggaggggacactgctgtgctcctcgggtcatcctggggtcaaagtcatcttcccccctggggccactgaggagcctcgtcgagtctccatgcaggtggtgcgcatggctggccgagagctgcaggccctcctgggagaaccagaggctgcagtgagccccctgctgtgcctgtcacagagcggtccccccagcttcctccaaccggtcaccgtgcagctgcctctgccctctggcatcacaggcctcagtctggaccgctcccgcctgcacctgttgtactgggcccctcctgcagccacctgggatgacatcacagctcaggtggtcctggagctcacccacctgtacgcacgcttccaggtcacacacttctcctggtactggctctggtacaccaccaagaactgtgtgggaggcctggctcggaaggcctgggagcggctgcggctgcaccgtgtgaacctcatcgctctgcagcggcgccgggaccctgagcaggtcctgctgcagtgcctgccccgaaacaaggtggacgccacccttcggcggctgctggagcggtaccggggccccgagccctctgacacggtggagatgttcgagggcgaagagttctttgcggccttcgagcgcggcatcgacgtggatgctgaccgccctgactgtgtggagggcagaatctgctttgtcttctactcgcacctgaagaatgtgaaggaggtgtccttctaccgtggcgcggtgcctgtgcgggtgcccgaggaggctgaggctgcccggcagaggaagggcgcagacgccctgtggatggccactctgcccatcaagctgccgagacttcgagggtccgaggggccacggcggggggctggcctctccttggcacccttgaatctgggagatgccgagaccggctttctgacgcagagcaacctgctgagtgtggctgggcgtctgggtctggactggccagccgtggccctgcacctgggggtgtcctaccgggaggtgcagcgcatccggcacgagttccgggatgatctggatgagcagatccgtcacatgctcttctcctgggctgagcgccaggctgggcagccaggggctgtggggctcctggtgcaggccctggagcagagtgaccggcaggacgtggctgaagaggtgcgcgcagtcttggagctcggccgccgcaagtaccaggacagcatccgacgcatgggcttggcccccaaggaccccgctctgcctggctcctcggctccacagcccccagagcctgcccaggcctaggccccacagacttttaggctggcccagatattccccagtggatgggcagagcccccaccttcaagtctctccagtgtgtggggacgggtccctgtgagcaacaaaactgcactgtttctttcacctcaaaaaaaaaaaaaaaaa

SEQ ID NO: 2138 - DNA, 1795 bp, Homo sapiens
gggtgagtgcaccgcgttctcgcacgcgtcatggcggtcctcggagtacagctggtggtgaccctgctcactgccaccctcatgcacaggctggcgccacactgctccttcgcgcgctggctgctctgtaacggcagtttgttccgatacaagcacccgtctgaggaggagcttcgggccctggcggggaagccgaggcccagaggcaggaaagagcggtgggccaatggccttagtgaggagaagccactgtctgtgccccgagatgccccgttccagctggagacctgccccctcacgaccgtggatgccctggtcctgcgcttcttcctggagtaccagtggtttgtggactttgctgtgtactcgggcggcgtgtacctcttcacagaggcctactactacatgctgggaccagccaaggagactaacattgctgtgttctggtgcctgctcacagtgaccttctccatcaagatgttcctgacagtgacacggctgtacttcagcgccgaggaggggggtgagcgctctgtctgcctcacctttgccttcctcttcctgctgctggccatgctggtgcaagtggtgcgggaggagaccctcgagctgggcctggagcctggtctggccagcatgacccagaacttagagccacttctgaagaagcagggctgggactgggcgcttcctgtggccaagctggctatccgcgtgggactggcagtggtgggctctgtgctgggtgccttcctcaccttcccaggcctgcggctggcccagacccaccgggacgcactgaccatgtcggaggacagacccatgctgcagttcctcctgcacaccagcttcctgtctcccctgttcatcctgtggctctggacaaagcccattgcacgggacttcctgcaccagccgccgtttggggagacgcgtttctccctgctgtccgattctgccttcgactctgggcgcctctggttgctggtggtgctgtgcctgctgcggctggcggtgacccggccccacctgcaggcctacctgtgcctggccaaggcccgggtggagcagctgcgaagggaggctggccgcatcgaagcccgtgaaatccagcagagggtggtccgagtctactgctatgtgaccgtggtgagcttgcagtacctgacgccgctcatcctcaccctcaactgcacacttctgctcaagacgctgggaggctattcctggggcctgggcccagctcctctactatcccccgacccatcctcagccagcgctgcccccatcggctctggggaggacgaagtccagcagactgcagcgcggattgccggggccctgggtggcctgcttactcccctcttcctccgtggcgtcctggcctacctcatctggtggacggctgcctgccagctgctcgccagccttttcggcctctacttccaccagcacttggcaggctcctagctgcctgcagaccctccaggggccctgaggtctgttcctggggcagcgggacactagcctgccccctctgtttgcgcccccgtgtccccagctgcaaggtggggccggactccccggcgttcccttcaccacagtgcctgacccgcggccccccttggacgccgagtttctgcctcagaactgtctctcctgggcccagcagcatgagggtcccgaggccattgtctccgaagcgtatgtgccaggtttgagtggcgagggtgatgctggctgctcttctgaacaaataaaggagcatgccgatttttaaaaaaaaaaaaaaaaa

SEQ ID NO: 2139 - DNA, 2013 bp, Homo sapiens
aattcctgtcctcaggcgctgtcagatctgtggtttttctacttgaaggacacaatgttttccaaactagcacatttgcagaggtttgctgtacttagtcgcggagttcattcttcagtggcttctgctacatctgttgcaactaaaaaaacagtccaaggccctccaacctctgatgacatttttgaaagggaatataagtatggtgcacacaactaccatcctttacctgtagccctggagagaggaaaaggtatttacttatgggatgtagaaggcagaaaatattttgacttcctgagttcttacagtgctgtcaaccaagggcattgtcaccccaagattgtgaatgctctgaagagtcaagtggacaaattgaccttaacatctagagctttctataataacgtacttggtgaatatgaggagtatattactaaacttttcaactaccacaaagttcttcctatgaatacaggagtggaggctggagagactgcctgtaaactagctcgtaagtggggctataccgtgaagggcattcagaaatacaaagcaaagattgtttttgcagctgggaacttctggggtaggacgttgtctgctatctccagttccacagacccaaccagttacgatggttttggaccatttatgccgggattcgacatcattccctataatgatctgcccgcactggagcgtgctcttcaggatccaaatgtggctgcgttcatggtagaaccaattcagggtgaagcaggcgttgttgttccggatccaggttacctaatgggagtgcgagagctctgcaccaggcaccaggttctctttattgctgatgaaatacagacaggattggccagaactggtagatggctggctgttgattatgaaaatgtcagacctgatatagtcctccttggaaaggccctttctgggggcttataccctgtgtctgcagtgctgtgtgatgatgacatcatgctgaccattaagccaggggagcatgggtccacatacggtggcaatccactaggctgccgagtggccatcgcagcccttgaggttttagaagaagaaaaccttgctgaaaatgcagacaaattgggcattatcttgagaaatgaactcatgaagctaccttctgatgttgtaactgccgtaagaggaaaaggattattaaacgctattgtcattaaagaaaccaaagattgggatgcttggaaggtgtgtctacgacttcgagataatggacttctggccaagccaacccatggcgacattatcaggtttgcgcctccgctggtgatcaaggaggatgagcttcgagagtccattgaaattattaacaagaccatcttgtctttctgagggtagccagctgttttcagtggtccctgggagccagctggagacaggtggtcctgtaaaagctttattcctaatgtgggcacattccactcccatgagtcttcaaaaactttttttttgaatatatttttttcagttgatacataatagaacaacgtttatgaacctgccgtttgctttgtaacgtaactaaataatgtaatggcatctatattcagttgaagtgttttgatgtgcatgtgtacttcctaaggtgaaatgcatctatatacagacagcctctaaatcaagtccttcagtataattgatatatgtttttataatttcctcactggtataagtgtttcatatttgaaaaagttatctctgggtattgcataaaaggcttcatcttataaagtgaaatcattgttattgaattttaggaaggattaatggttaagtgtatataaaatactaatattaagtaaacttcatattggccaacaccagggttgtattctatggatgtcattattttgaattaagaattagtgtttaacattcctaaattgttttgagtgcttgattataatttgtaaaaaatgtttattttcaatacttctttaaatttaaaataaagcttatatttcaaatgtc

SEQ ID NO: 2140 - DNA, 3872 bp, Homo sapiens
cggacgaggcacgagtgaggggggaggcggtggcggcggccattttgagccgctgccgccattggagtgggccccccccctttcccccttcgcctcctgacaggaaaggtttaagggggacagagccctgggaggccgggccgggctcgggggccaccccgggggcccgggccatggatgtgcgccgtctgaaggtgaacgaacttcgcgaggagctgcagcgccgcggcctggacactcgaggcctcaaggccgagcttgctgagcggctgcaggcggcgttggaggccgaggagcctgacgacgagcgggagctcgacgccgacgacgaaccggggcgacccgggcacatcaacgaggaggtcgagaccgaggggggctccgagctggaggggaccgcgcagccaccgccgcccgggctgcagccgcacgcggagcccggcggctactcggggccggacggacattatgccatggacaatattaccaggcagaaccaattctacgatacccaagtcatcaaacaagaaaacgagtcaggctacgagaggagaccactggaaatggagcagcagcaggcctatcgtccagaaatgaagacagagatgaagcaaggagcacccaccagcttcctcccgcctgaagcttctcaactcaagccagacaggcagcaattccagagtcgaaagaggccttatgaagaaaaccggggacgggggtactttgagcaccgagaggataggaggggccgctctcctcagcctcctgctgaagaggatgaagatgactttgatgatacccttgttgctattgacacctataactgcgacctccacttcaaggtggcccgagatcggagtagtggctatccgctcacaattgagggctttgcatacctgtggtcaggagcccgtgccagctatggggtcagaaggggccgtgtatgcttcgagatgaagatcaatgaggaaatctccgtgaagcaccttccgtctacagagcctgacccccacgtggtccgtatcggctggtccctggactcctgcagcacccagctaggcgaagagcctttctcctatggctatggaggcactgggaagaagtccaccaatagccggtttgaaaactacggagacaagtttgcagagaacgatgtgattggctgctttgcggattttgaatgtggaaatgacgtggaactgtcttttaccaagaatggaaagtggatgggcattgctttccgaatccagaaggaagccttggggggtcaggccctctatcctcatgtcctggtgaagaattgcgcagtggagttcaacttcggacagagagcagagccctactgttctgtcctcccggggtttaccttcatccagcaccttccccttagtgagcgtatccggggcaccgttggaccaaagagcaaggcagaatgtgagattctgatgatggtgggcctgcctgctgctggcaagaccacatgggccatcaaacatgcagcctccaacccttccaagaagtacaacatcctgggtaccaatgccatcatggataagatgcgggtgatgggcctacgccggcagcggaactatgctggccgctgggatgtcctgatccagcaggccacccagtgcctcaaccgcctcatccagattgctgcccgcaagaaacgcaactatatcctagatcagacaaatgtttatgggtcagcccagagacgaaaaatgagaccatttgaaggcttccagcgcaaagctattgtaatttgtcccactgacgaggacctaaaagaccgaacaataaagcgaaccgacgaggaagggaaggatgtcccagatcatgcggtcttagaaatgaaagccaacttcacgttgccagatgttggggacttcctggatgaggttctgttcattgagctgcagcgggaggaagcggacaagctagtgaggcagtacaacgaggaaggccgcaaggctgggccaccccctgaaaagcgctttgacaaccgaggtggtggtggcttccggggccgcgggggtggtggtggcttccagcgctatgaaaaccgaggaccccctggaggcaaccgtggcggcttccagaaccgagggggaggcagcggtggaggaggcaactaccgaggaggtttcaaccgcagcggaggtggtggctatagccagaaccgctggggtaacaacaaccgggataacaacaactccaacaacagaggcagctacaaccgggctccccagcaacagccgccaccacagcagcctccgccaccacagccaccaccccagcagccaccgccaccacccagctacagccctgctcggaaccccccaggggccagcacctacaataagaacagcaacatccctggctcaagcgccaataccagcacccccaccgtcagcagctacagccctccacagccgagttacagccagccaccctacaaccagggaggttacagccagggctacacagccccaccgcctccacctccaccaccacctgcctacaactatgggagctacggcggttacaacccggccccctataccccaccgccaccccccactgcacagacctaccctcagcccagctataaccagtatcagcagtatgcccagcagtggaaccagtactatcagaaccagggccagtggccgccatactacgggaactacgactacgggagctactccgggaacacacagggtggcacaagtacacagtagccagtgtgacccagaggctcccggaggcccctgccggcttcctccaccagcgcctgcctcggcccctcctctgcccccgccagatcccgtggtgctggggatggggtcatcccagggctgcctccctccagcccactgcctcccctctgaggggcttccttcccctccatagggccaggcatttttttctggattcaaacaggcaacaatgaccttttattttctgtttgtccccacctccccagccttccacctcctgttcttcctaccttcttcctttttgactaaataatccccacctcccttgatcatacagtgaggctacagtgactgaggggagaatcccctcctgttcactctcccaaccctgctccagcccctcagcttcccagaccctcatgcagttggttgtaaattctcccaggagctgttttactgtctacttttcaggattaaaaaaaaaatcaaaacttaaaaaaaaaaaagtttaaaaagcaaaatggggagggggaggaagcagtgacttttttttggtaattatgcgcttttttttaatttttagaatttgtctttttactgtgggtgggctgttgatatttcatcaagataagcatttctttcctgagttcaggtgactgaggaagagccacaaaacaaaacacaacaaaaccaaaccacagaatcatctttaacccaactttttatacgatgccccagttccccataactttgcacacaagcttctgtgttcagttgaattgtaactgctttttgtatttggagagagtgactattgaacttgaaaccttttattccgggcgtcttggtagtttctggtgggattcagtgggtgagagggaagaaggggaggttggggggctccttcccttcagaacttgaagtttctcccactgcctcctctccagtggtctcccaggtgccagacccaaaagcttttcctacagtgataccctttatttttacttccccttgactcatatgttttaacatgattttaacaaactgcacttattaagaaatgtgtttgccctgttttgtttggtttcgttttgttttctttgaataaatgacatggcacctcctagcaggaaggaagcagggttgaaa

SEQ ID NO: 2141 - DNA, 3468 bp, Homo sapiens
agagagagaggaagtcggacgtgggcgaggggcggggtgtctggactggaacctctgggcccacatgccatggacaatattaccaggcagaaccaattctacgatacccaagtcatcaaacaagaaaacgagtcaggctacgagaggagaccactggaaatggagcagcagcaggcctatcgtccagaaatgaagacagagatgaagcaaggagcacccaccagcttcctcccgcctgaagcttctcaactcaagccagacaggcagcaattccagagtcgaaagaggccttatgaagaaaaccggggacgggggtactttgagcaccgagaggataggaggggccgctctcctcagcctcctgctgaagaggatgaagatgactttgatgatacccttgttgctattgacacctataactgcgacctccacttcaaggtggcccgagatcggagtagtggctatccgctcacaattgagggctttgcatacctgtggtcaggagcccgtgccagctatggggtcagaaggggccgtgtatgcttcgagatgaagatcaatgaggaaatctccgtgaagcaccttccgtctacagagcctgacccccacgtggtccgtatcggctggtccctggactcctgcagcacccagctaggcgaagagcctttctcctatggctatggaggcactgggaagaagtccaccaatagccggtttgaaaactacggagacaagtttgcagagaacgatgtgattggctgctttgcggattttgaatgtggaaatgacgtggaactgtcttttaccaagaatggaaagtggatgggcattgctttccgaatccagaaggaagccttggggggtcaggccctctatcctcatgtcctggtgaagaattgcgcagtggagttcaacttcggacagagagcagagccctactgttctgtcctcccggggtttaccttcatccagcaccttccccttagtgagcgtatccggggcaccgttggaccaaagagcaaggcagaatgtgagattctgatgatggtgggcctgcctgctgctggcaagaccacatgggccatcaaacatgcagcctccaacccttccaagaagtacaacatcctgggtaccaatgccatcatggataagatgcgggtgatgggcctacgccggcagcggaactatgctggccgctgggatgtcctgatccagcaggccacccagtgcctcaaccgcctcatccagattgctgcccgcaagaaacgcaactatatcctagatcagacaaatgtttatgggtcagcccagagacgaaaaatgagaccatttgaaggcttccagcgcaaagctattgtaatttgtcccactgacgaggacctaaaagaccgaacaataaagcgaaccgacgaggaagggaaggatgtcccagatcatgcggtcttagaaatgaaagccaacttcacgttgccagatgttggggacttcctggatgaggttctgttcattgagctgcagcgggaggaagcggacaagctagtgaggcagtacaacgaggaaggccgcaaggctgggccaccccctgaaaagcgctttgacaaccgaggtggtggtggcttccggggccgcgggggtggtggtggcttccagcgctatgaaaaccgaggaccccctggaggcaaccgtggcggcttccagaaccgagggggaggcagcggtggaggaggcaactaccgaggaggtttcaaccgcagcggaggtggtggctatagccagaaccgctggggtaacaacaaccgggataacaacaactccaacaacagaggcagctacaaccgggctccccagcaacagccgccaccacagcagcctccgccaccacagccaccaccccagcagccaccgccaccacccagctacagccctgctcggaaccccccaggggccagcacctacaataagaacagcaacatccctggctcaagcgccaataccagcacccccaccgtcagcagctacagccctccacagccgagttacagccagccaccctacaaccagggaggttacagccagggctacacagccccaccgcctccacctccaccaccacctgcctacaactatgggagctacggcggttacaacccggccccctataccccaccgccaccccccaccgcacagacctaccctcagcccagctataaccagtatcagcagtatgcccagcagtggaaccagtactatcagaaccagggccagtggccgccatactacgggaactacgactacgggagctactccgggaacacacagggtggcacaagtacacagtagccagtgtgacccagaggctcccggaggcccctgccggcttcctccaccagcgcctgcctcggcccctcctctgcccccgccagatcccgtggtgctggggatggggtcatcccagggctgcctccctccagcccactgcctcccctctgaggggcttccttcccctccatagggccaggcatttttttctggattcaaacaggcaacaatgaccttttattttctgtttgtccccacctccccagccttccacctcctgttcttcctaccttcttcctttttgactaaataatccccacctcccttgatcatacagtgaggctacagtgactgaggggagaatcccctcctgttcactctcccaaccctgctccagcccctcagcttcccagaccctcatgcagttggttgtaaattctcccaggagctgttttactgtctacttttcaggattaaaaaaaaaatcaaaacttaaaaaaaaaaaagtttaaaaagcaaaatggggagggggaggaagcagtgacttttttttggtaattatgcgcttttttttaatttttagaatttgtctttttactgtgggtgggctgttgatatttcatcaagataagcatttctttcctgagttcaggtgactgaggaagagccacaaaacaaaacacaacaaaaccaaaccacagaatcatctttaacccaactttttatacgatgccccagttccccataactttgcacacaagcttctgtgttcagttgaattgtaactgctttttgtatttggagagagtgactattgaacttgaaaccttttattccgggcgtcttggtagtttctggtgggattcagtgggtgagagggaagaaggggaggttggggggctccttcccttcagaacttgaagtttctcccactgcctcctctccagtggtctcccaggtgccagacccaaaagcttttcctacagtgataccctttatttttacttccccttgactcatatgttttaacatgattttaacaaactgcacttattaagaaatgtgtttgccctgttttgtttggtttcgttttgttttctttgaataaatgacatggcacctcctagcaggaaggaagcagggttgaaa

SEQ ID NO: 2142 - DNA, 3716 bp, Homo sapiens
cggacgaggcacgagtgaggggggaggcggtggcggcggccattttgagccgctgccgccattggagtgggccccccccctttcccccttcgcctcctgacaggaaaggtttaagggggacagagccctgggaggccgggccgggctcgggggccaccccgggggcccgggccatggatgtgcgccgtctgaaggtgaacgaacttcgcgaggagctgcagcgccgcggcctggacactcgaggcctcaaggccgagcttgctgagcggctgcaggcggcgttggaggccgaggagcctgacgacgagcgggagctcgacgccgacgacgaaccggggcgacccgggcacatcaacgaggaggtcgagaccgaggggggctccgagctggaggggaccgcgcagccaccgccgcccgggctgcagccgcacgcggagcccggcggctactcggggccggacggacattatgccatggacaatattaccaggcagaaccaattctacgatacccaagtcatcaaacaagaaaacgagtcaggctacgagaggagaccactggaaatggagcagcagcaggcctatcgtccagaaatgaagacagagatgaagcaaggagcacccaccagcttcctcccgcctgaagcttctcaactcaagccagacaggcagcaattccagagtcgaaagaggccttatgaagaaaaccggggacgggggtactttgagcaccgagaggataggaggggccgctctcctcagcctcctgctgaagaggatgaagatgactttgatgatacccttgttgctattgacacctataactgcgacctccacttcaaggtggcccgagatcggagtagtggctatccgctcacaattgagggctttgcatacctgtggtcaggagcccgtgccagctatggggtcagaaggggccgtgtatgcttcgagatgaagatcaatgaggaaatctccgtgaagcaccttccgtctacagagcctgacccccacgtggtccgtatcggctggtccctggactcctgcagcacccagctaggcgaagagcctttctcctatggctatggaggcactgggaagaagtccaccaatagccggtttgaaaactacggagacaagtttgcagagaacgatgtgattggctgctttgcggattttgaatgtggaaatgacgtggaactgtcttttaccaagaatggaaagtggatgggcattgctttccgaatccagaaggaagccttggggggtcaggccctctatcctcatgtcctggtgaagaattgcgcagtggagttcaacttcggacagagagcagagccctactgttctgtcctcccggggtttaccttcatccagcaccttccccttagtgagcgtatccggggcaccgttggaccaaagagcaaggcagaatgtgagattctgatgatggtgggcctgcctgctgctggcaagaccacatgggccatcaaacatgcagcctccaacccttccaagaagtacaacatcctgggtaccaatgccatcatggataagatgcgggtgatgggcctacgccggcagcggaactatgctggccgctgggatgtcctgatccagcaggccacccagtgcctcaaccgcctcatccagattgctgcccgcaagaaacgcaactatatcctagatcagacaaatgtttatgggtcagcccagagacgaaaaatgagaccatttgaaggcttccagcgcaaagctattgtaatttgtcccactgacgaggacctaaaagaccgaacaataaagcgaaccgacgaggaagggaaggatgtcccagatcatgcggtcttagaaatgaaagccaacttcacgttgccagatgttggggacttcctggatgaggttctgttcattgagctgcagcgggaggaagcggacaagctagtgaggcagtacaacgaggaaggccgcaaggctgggccaccccctgaaaagcgctttgacaaccgaggtggtggtggcttccggggccgcgggggtggtggtggcttccagcgctatgaaaaccgaggaccccctggaggcaaccgtggcggcttccagaaccgagggggaggcagcggtggaggaggcaactaccgaggaggtttcaaccgcagcggaggtggtggctatagccagaaccgctggggtaacaacaaccgggataacaacaactccaacaacagaggcagctacaaccgggctccccagcaacagccgccaccacagcagcctccgccaccacagccaccaccccagcagccaccgccaccacccagctacagccctgctcggaaccccccaggggccagcacctacaataagaacagcaacatccctggctcaagcgccaataccagcacccccaccgtcagcagctacagccctccacagacctaccctcagcccagctataaccagtatcagcagtatgcccagcagtggaaccagtactatcagaaccagggccagtggccgccatactacgggaactacgactacgggagctactccgggaacacacagggtggcacaagtacacagtagccagtgtgacccagaggctcccggaggcccctgccggcttcctccaccagcgcctgcctcggcccctcctctgcccccgccagatcccgtggtgctggggatggggtcatcccagggctgcctccctccagcccactgcctcccctctgaggggcttccttcccctccatagggccaggcatttttttctggattcaaacaggcaacaatgaccttttattttctgtttgtccccacctccccagccttccacctcctgttcttcctaccttcttcctttttgactaaataatccccacctcccttgatcatacagtgaggctacagtgactgaggggagaatcccctcctgttcactctcccaaccctgctccagcccctcagcttcccagaccctcatgcagttggttgtaaattctcccaggagctgttttactgtctacttttcaggattaaaaaaaaaatcaaaacttaaaaaaaaaaaagtttaaaaagcaaaatggggagggggaggaagcagtgacttttttttggtaattatgcgcttttttttaatttttagaatttgtctttttactgtgggtgggctgttgatatttcatcaagataagcatttctttcctgagttcaggtgactgaggaagagccacaaaacaaaacacaacaaaaccaaaccacagaatcatctttaacccaactttttatacgatgccccagttccccataactttgcacacaagcttctgtgttcagttgaattgtaactgctttttgtatttggagagagtgactattgaacttgaaaccttttattccgggcgtcttggtagtttctggtgggattcagtgggtgagagggaagaaggggaggttggggggctccttcccttcagaacttgaagtttctcccactgcctcctctccagtggtctcccaggtgccagacccaaaagcttttcctacagtgataccctttatttttacttccccttgactcatatgttttaacatgattttaacaaactgcacttattaagaaatgtgtttgccctgttttgtttggtttcgttttgttttctttgaataaatgacatggcacctcctagcaggaaggaagcagggttgaaa

SEQ ID NO: 2143 - DNA, 1800 bp, Homo sapiens
cggacgaggcacgagtgaggggggaggcggtggcggcggccattttgagccgctgccgccattggagtgggccccccccctttcccccttcgcctcctgacaggaaaggtttaagggggacagagccctgggaggccgggccgggctcgggggccaccccgggggcccgggccatggatgtgcgccgtctgaaggtgaacgaacttcgcgaggagctgcagcgccgcggcctggacactcgaggcctcaaggccgagcttgctgagcggctgcaggcggcgttggaggccgaggagcctgacgacgagcgggagctcgacgccgacgacgaaccggggcgacccgggcacatcaacgaggaggccgagttacagccagccaccctacaaccagggaggttacagccagggctacacagccccaccgcctccacctccaccaccacctgcctacaactatgggagctacggcggttacaacccggccccctataccccaccgccaccccccactgcacagacctaccctcagcccagctataaccagtatcagcagtatgcccagcagtggaaccagtactatcagaaccagggccagtggccgccatactacgggaactacgactacgggagctactccgggaacacacagggtggcacaagtacacagtagccagtgtgacccagaggctcccggaggcccctgccggcttcctccaccagcgcctgcctcggcccctcctctgcccccgccagatcccgtggtgctggggatggggtcatcccagggctgcctccctccagcccactgcctcccctctgaggggcttccttcccctccatagggccaggcatttttttctggattcaaacaggcaacaatgaccttttattttctgtttgtccccacctccccagccttccacctcctgttcttcctaccttcttcctttttgactaaataatccccacctcccttgatcatacagtgaggctacagtgactgaggggagaatcccctcctgttcactctcccaaccctgctccagcccctcagcttcccagaccctcatgcagttggttgtaaattctcccaggagctgttttactgtctacttttcaggattaaaaaaaaaatcaaaacttaaaaaaaaaaaagtttaaaaagcaaaatggggagggggaggaagcagtgacttttttttggtaattatgcgcttttttttaatttttagaatttgtctttttactgtgggtgggctgttgatatttcatcaagataagcatttctttcctgagttcaggtgactgaggaagagccacaaaacaaaacacaacaaaaccaaaccacagaatcatctttaacccaactttttatacgatgccccagttccccataactttgcacacaagcttctgtgttcagttgaattgtaactgctttttgtatttggagagagtgactattgaacttgaaaccttttattccgggcgtcttggtagtttctggtgggattcagtgggtgagagggaagaaggggaggttggggggctccttcccttcagaacttgaagtttctcccactgcctcctctccagtggtctcccaggtgccagacccaaaagcttttcctacagtgataccctttatttttacttccccttgactcatatgttttaacatgattttaacaaactgcacttattaagaaatgtgtttgccctgttttgtttggtttcgttttgttttctttgaataaatgacatggcacctcctagcaggaaggaagcagggttgaaa

SEQ ID NO: 2144 - DNA, 3592 bp, Homo sapiens
gaggaagaggctgaggaggcgcggggggcgggggaggctcaggagcgggcggtgacggcgacggcggcggcagaggaggcagcggctgggccgggccccgtgcgtctgtccgcgccccgtggatgcgaatcggccgcggcggaggcggcggcggcggaggaggcggcggcgggaggaggagtcggtgagccggctccgggccggaggggcgcggaggatgaggccgctgcctggcgctcttggcgtggcggcggccgccgcgctgtggctgctgctgctgctgctgccccggacccgggcggacgagcacgaacacacgtatcaagataaagaggaagttgtcttatggatgaatactgttgggccctaccataatcgtcaagaaacatataagtacttttcacttccattctgtgtggggtcaaaaaaaagtatcagtcattaccatgaaactctgggagaagcacttcaaggggttgaattggaatttagtggtctggatattaaatttaaagatgatgtgatgccagccacttactgtgaaattgatttagataaagaaaagagagatgcatttgtatatgccataaaaaatcattactggtaccagatgtacatagatgatttaccaatatggggtattgttggtgaggctgatgaaaatggagaagattactatctttggacctataaaaaacttgaaataggttttaatggaaatcgaattgttgatgttaatctaactagtgaaggaaaggtgaaactggttccaaatactaaaatccagatttcatattcagtaaaatggaaaaagtcagatgtgaaatttgaagatcgatttgacaaatatcttgatccgtccttttttcaacatcggattcattggttttcaattttcaactccttcatgatggtgatcttcttggtgggcttagtttcaatgattttaatgagaacattaagaaaagattatgctcggtacagtaaagaggaagaaatggatgatatggatagagacctaggagatgaatatggatggaaacaggtgcatggagatgtatttagaccatcaagtcacccactgatattttcctctctgattggttctggatgtcagatatttgctgtgtctctcatcgttattattgttgcaatgatagaagatttatatactgagaggggatcaatgctcagtacagccatatttgtctatgctgctacgtctccagtgaatggttattttggaggaagtctgtatgctagacaaggaggaaggagatggataaagcagatgtttattggggcattccttatcccagctatggtgtgtggcactgccttcttcatcaatttcatagccatttattaccatgcttcaagagccattccttttggaacaatggtggccgtttgttgcatctgtttttttgttattcttcctctaaatcttgttggtacaatacttggccgaaatctgtcaggtcagcccaactttccttgtcgtgtcaatgctgtgcctcgtcctataccggagaaaaaatggttcatggagcctgcggttattgtttgcctgggtggaattttaccttttggttcaatctttattgaaatgtatttcatcttcacgtctttctgggcatataagatctattatgtctatggcttcatgatgctggtgctggttatcctgtgcattgtgactgtctgtgtgactattgtgtgcacatattttctactaaatgcagaagattaccggtggcaatggacaagttttctctctgctgcatcaactgcaatctatgtttacatgtattccttttactactattttttcaaaacaaagatgtatggcttatttcaaacatcattttactttggatatatggcggtatttagcacagccttggggataatgtgtggagcgattggttacatgggaacaagtgcctttgtccgaaaaatctatactaatgtgaaaattgactagagacccaagaaaacctggaactttggatcaatttctttttcataggggtggaacttgcacagcaaaaacaaacaaacgcaagaagagatttgggctttaacacactgggtactttgtgggtctctctttcgtcggtggcttaaagtaacatctatttccattgatcctaggttcttcctgactgctttctccaactgttcacagcaaatgcttggattttatgcagtaggcattactacagtacatggctaatcttcccaaaaactagctcattaaagatgaaatagaccagctctcttcagtgaagaggacaaatagtttatttaaagcatttgttccaataaaataaatagagggaaacttggatgctaaaattacatgaataggaatcttcctggcacttagtgtttctatgttattgaaaaatgatgttccagaaagattacttttttcctcttatttttactgccattgtcgacctattgtgggacatttttatatattgaatctgggttcttttttgacttttttttttcccaatccaacagcatccttttttttaaaagagagaattagaaaatattaaatcctgcatgtaatatatctgctgtcatcttagttggaccaacttcccatttatttatcttaaaactatacagttacatcttaattccatccaaagaagatacagtttgaagacagaagtgtactctctacaatgcaatttactgtacagttagaaagcaaagtgttaaatggagaagatacttgtttttattaaacattttgagatttagataaactacattttaactgaatgtctaaagtgattatcttttttccccccaagttagtcttaaatcttttgggtttgaatgaaggttttacataagaaattattaaaaacaaggggggtgggtaataaatgtatataacattaaataatgtaacgtaggtgtagattcccaaatgcatttggatgtacagatcgactacagagtacttttttcttatgatgattggtgtagaaatgtgtgatttgggtgggcttttacatcttgcctaccattgcatgaaacattggggtttcttcaaaatgtgtgtgtcatacttcttttgggaggggggttgttttcttctgtttattttctgagactcctacaggagccaaatttgtaatttagagacacttaattttgttaatcctgtctgggacacttaagtaacatctaaagcattattgctttagaatgttcaaataaaatttcctgaccaaattgttttgtggaaatagatgtgtttgcaatttgaagatatctttctgtccagaaggcaaaattaccgaatgccatttttaaaagtatgctataaactatgctactctcatacaggggacccgtattttaaaatctccagacttgcttacatctagattatccagcacaatcataaagtgaatgacaaaccctttgaatgaaattgtggcacaaaatctgttcaggttggtgtaccgtgtaaagtggggatggggtaaaagtggttaacgtactgttggatcaacaaataaaggttacagttttgtaagagaaaaaaaaaaaaaaaaaa

SEQ ID NO: 2145 - DNA, 5671 bp, Homo sapiens
ccctgaggcgacagcagctgcgggaggcgacgggctgcggcctgcggaacctgaggcagctggggagggccgggcgcgccggccggatagcgagccgcgctggcggcggcggtggccgcgatgatggagatccagatggacgagggcggcggcgtggtggtgtaccaggacgactactgctccggctcggtgatgtcggagcgggtgtcgggcctggcgggctccatctaccgcgagttcgagcgcctcatccactgctacgacgaggaggtggtcaaggagctcatgccgctggtggtgaacgtgctggagaacctagactcggtgctcagcgagaaccaggagcacgaggtggagctggagctgctgcgcgaggacaacgagcagctgctcacccagtacgagcgtgagaaggcgctgcgcaggcaggcggaggagaaattcattgagtttgaagatgctctggaacaagagaagaaagagctgcaaatccaggtggagcactacgagttccagacgcgccagctggagctgaaggccaagaactatgccgatcagatttcccggttggaggagcgggagtcggagatgaagaaggagtacaatgccctgcaccagcggcacacagagatgatacagacctacgtggagcacattgagaggtccaagatgcagcaggtcggaggaaacagccagaccgagagcagcctgccggggcggagcaggaaggagcgccccacctccctgaacgtgttccccctggctgacggcacggtacgtgcacagatcgggggcaagctcgtgcctgcgggggaccactggcacctgagtgacctcggccagctgcagtccagctccagctaccagtgtccacaggatgaaatgtccgagtcaggccagtcctcggcggccgccacacccagcaccacaggcaccaagtccaacacgcccacatcctccgtgccctcggccgccgtcacacccctcaacgagagcctgcagcccctgggggactatggcgtgggctccaagaacagcaagcgtgcccgggagaagcgcgacagccgcaacatggaagtacaggtcacccaggagatgcgcaacgtcagtataggcatgggcagcagtgacgagtggtctgatgttcaagacattattgactccacgccagagctggacatgtgtccagagacccgcctggaccgcacaggaagcagcccaacccagggcatcgtgaacaaagctttcggcatcaacaccgactccctgtaccatgagctgtcgacggcagggtctgaggtcatcggggatgtggacgaaggggccgacctcctaggtgaaacctccgcaccttctgtttcaggaatgggcaaagaagtggggaatctgctactggaaaactcacagcttctggaaaccaaaaacgccttgaatgtggtgaagaatgacctgattgccaaggtcgaccagctgtccggggagcaggaggtgctgaggggcgagttggaggctgctaagcaggccaaagtcaagctggaaaaccgtatcaaggagctggaagaggaactgaaaagagtgaagtccgaggccatcatcgcccgccgtgaacccaaagaagaggcggaggatgtaagcagctatctctgtacagaatcggacaaaatccccatggcccagcgccgccgcttcacgcgggtggagatggcccgtgtgctcatggagcggaaccagtacaaggagcggctgatggagctgcaggaggctgtgcggtggactgagatgatcagagcgtcccgagagcacccatccgtccaggagaagaagaagtcgaccatctggcagttcttcagccgcctcttcagctcttcctccagcccccctccggccaagcgcccctatccctcggtgaacatccactacaagtcacccaccactgccggcttcagccagcgccgcaaccatgccatgtgcccgatctcggcaggcagccggcccctggaattcttccctgacgacgactgcacgtcctccgcccgtcgagagcagaagcgcgagcagtaccgccaggtgcgtgagcacgtgcgtaacgacgacggccgtctgcaggcctgcggctggagcctgcccgccaagtacaagcagctgagtcccaacgggggccaggaggacacgcggatgaagaacgtgccggtgccggtgtactgccgccctctggtggagaaggaccccaccatgaagctgtggtgtgccgcgggcgtcaacctgagcgggtggaggcccaatgaggacgacgctgggaatggagtcaagccagcgccaggccgcgatcccctgacctgcgaccgcgaaggagacggcgagcccaagagcgcccacacgtctcccgagaagaagaaggccaaggagctccctgaaatggacgccacctccagccgggtgtggatcctgaccagcaccctgaccaccagcaaggtggtgatcatcgacgccaaccagccgggcacggtggtggaccagttcaccgtctgcaacgcgcacgtgctgtgcatctccagcatccccgcggccagcgacagcgactaccctcccggggagatgttcctggacagcgacgtgaacccagaggacccgggcgcagatggcgtgctggccggtatcaccctggtgggctgtgccacccgctgcaacgtgccgcggagcaactgctcctcccgaggggacaccccagtgctagacaaggggcagggggaggtggccaccatcgccaacgggaaggtcaacccgtcccagtccacagaggaggccacagaggccacggaggtgccagaccctgggcccagcgagccagagacagccacattgcggcccgggcctctcacagagcacgtcttcactgacccagccccgaccccgtcctctggcccccagcctggcagcgagaacgggccagagcctgacagcagcagcacacggccagagccagagcccagcggggaccccacgggagcaggcagcagtgctgcacccaccatgtggctgggagcccagaacggctggctctatgtgcactcggctgtggccaactggaagaagtgcctgcactccatcaagctgaaggattctgtgctgagcctggtgcatgtcaaaggccgtgtgctggtggctctggcggacgggaccctggccatcttccaccgtggtgaagatggccagtgggatctgagcaactatcacctaatggacctgggccacccgcaccactccatccgctgcatggctgttgtgtacgaccgcgtgtggtgtggctacaagaacaaggtgcacgtcatccagcccaagaccatgcagatagaggcgaccatgactccacagaagtcatttgacgcccacccgcggcgggagagccaggtgcggcagctggcgtggatcggcgatggcgtatgggtgtccatccgcctggactccaccctgaggctctaccatgcacacacgcaccagcatctacaggacgtggacattgagccctacgtcagcaagatgctaggcactggcaagctgggtttctccttcgtacgcatcacggccctgcttgtcgcgggcagccggctctgggtgggcaccggcaacggagtggtcatctccatccccctgacagagactgtggtcctgcaccgaggccagctcctggggctccgagccaataagacatcccccacctctggggagggcgcccgtcccgggggcatcatccacgtgtatggcgatgacagcagtgacagggcggccagcagcttcatcccctactgctccatggcccaggcccagctatgcttccatgggcaccgcgatgccgtgaagttctttgtctcggtgccagggaacgtgctggccaccctgaatgggagtgtgctggacagcccagccgagggccctgggccagctgcccctgcctcggaggtcgagggccagaagctgcggaacgtgctggtgctgagcggcggggagggctacatcgacttccgcattggagacggagaggacgacgagacggaggagggcgcaggggacatgagccaggtgaagcccgtgctgtccaaggcagagcgcagtcacatcatcgtgtggcaggtgtcctacacccccgagtgaagctgctgccctgcctggcccgacctgtacataggacccccgaccacctgacccccgcccggcccgcggggtagccagccaggcgccgccgcccctcttctaacctctcaacctgcagctttcacctgagtctggcccctccagcgggcagggagtgcggggatgcggatcagctgggaggaggaggggaggggtgcttccacccgaggggaagatgctctcgggacagtttcccgggcagctcctggccagcttccagcccagagtcctcaagtccagggcaccttgggcccagcgcaggcagaatccgaggtggtcctggctctaccctgggcctcctactccccagcacccctggaggaggcaggggctccccgccgccgaggctgcctgccctgggcccacctctgcatgctgctcatggggccaccctgcctcctgggccctcactctgcctaggggagctgggccaggcactagcctttgcccagggaggtgggcctcaggctgcccaggtgcctgcaccccagccggccttctctggggcctccccgtcgtcaagcctctatcctgtctgtccccaccccagctgtcccctgcccagggaactggcataaaagcacgaggcccggctccctggggcagctgcttgagaacagagactgctaccccatcctgcccatgcaggcaggctcttgccagccccgttctgacccgtgtccccccaggctctgcctgggcagaagactcaccttggaggagtgggccctggagtcctgtccctcccagaagcccccagggtgggatttctcaggctgccagggcaggcccaggcctcaggaagaaggggaggcccctggcctctccgggatcagtcctaggacacaggctcagcctcaggttgatgggggatgatgtgctcccggggcctgcctcctgcacggggctccacggagcccagctcccagacacgctactaagtgcctagggttgcccgctgtggcctgctcccagggagcaacagagaggccaccaagcagaggcccgtggggctgaggatggagccgcccccagccgactccaagcccgcagagggcagacgccaccctggactgctctccctgcccagctgggcctctctggcctattcctaccttccaggcccactgcactcctgtctgggaggcccttatgagggcagcccagcccccgcacccacccccaaccagagaagcacagatcttggggagctgccccacaagccccgctggccaccgagggctgcagccgctgcgctgccggcttctccccaccaccctgccacctccactgtgatgtatgtccgctccctcgtctgttcccccaggatctcgaagtgactccgggctgagcagtggggcggctgggggaggggtgacgattctcctcaggctttggccctgcaagcaaacccacatatctgctctgtatgtaataaatgtcttaacgtcgtaaaaaaaaaaaaaaaaaaaaaaaaaaaaaa

SEQ ID NO: 2146 - DNA, 5653 bp, Homo sapiens
ccctgaggcgacagcagctgcgggaggcgacgggctgcggcctgcggaacctgaggcagctggggagggccgggcgcgccggccggatagcgagccgcgctggcggcggcggtggccgcgatgatggagatccagatggacgagggcggcggcgtggtggtgtaccaggacgactactgctccggctcggtgatgtcggagcgggtgtcgggcctggcgggctccatctaccgcgagttcgagcgcctcatccactgctacgacgaggaggtggtcaaggagctcatgccgctggtggtgaacgtgctggagaacctagactcggtgctcagcgagaaccaggagcacgaggtggagctggagctgctgcgcgaggacaacgagcagctgctcacccagtacgagcgtgagaaggcgctgcgcaggcaggcggaggagaaattcattgagtttgaagatgctctggaacaagagaagaaagagctgcaaatccaggtggagcactacgagttccagacgcgccagctggagctgaaggccaagaactatgccgatcagatttcccggttggaggagcgggagtcggagatgaagaaggagtacaatgccctgcaccagcggcacacagagatgatacagacctacgtggagcacattgagaggtccaagatgcagcaggtcggaggaaacagccagaccgagagcagcctgccggggcggaggaaggagcgccccacctccctgaacgtgttccccctggctgacggcacggtacgtgcacagatcgggggcaagctcgtgcctgcgggggaccactggcacctgagtgacctcggccagctgcagtccagctccagctaccagtgtccacaggatgaaatgtccgagtcaggccagtcctcggcggccgccacacccagcaccacaggcaccaagtccaacacgcccacatcctccgtgccctcggccgccgtcacacccctcaacgagagcctgcagcccctgggggactatggcgtgggctccaagaacagcaagcgtgcccgggagaagcgcgacagccgcaacatggaagtacaggtcacccaggagatgcgcaacgtcagtataggcatgggcagcagtgacgagtggtctgatgttcaagacattattgactccacgccagagctggacatgtgtccagagacccgcctggaccgcacaggaagcagcccaacccagggcatcgtgaacaaagctttcggcatcaacaccgactccctgtaccatgagctgtcgacggcagggtctgaggtcatcggggatgtggacgaaggggccgacctcctaggggagttctcagtgcgcgatgatttctttggaatgggcaaagaagtggggaatctgctactggaaaactcacagcttctggaaaccaaaaacgccttgaatgtggtgaagaatgacctgattgccaaggtcgaccagctgtccggggagcaggaggtgctgaggggcgagttggaggctgctaagcaggccaaagtcaagctggaaaaccgtatcaaggagctggaagaggaactgaaaagagtgaagtccgaggccatcatcgcccgccgtgaacccaaagaagaggcggaggatgtaagcagctatctctgtacagaatcggacaaaatccccatggcccagcgccgccgcttcacgcgggtggagatggcccgtgtgctcatggagcggaaccagtacaaggagcggctgatggagctgcaggaggctgtgcggtggactgagatgatcagagcgtcccgagagcacccatccgtccaggagaagaagaagtcgaccatctggcagttcttcagccgcctcttcagctcttcctccagcccccctccggccaagcgcccctatccctcggtgaacatccactacaagtcacccaccactgccggcttcagccagcgccgcaaccatgccatgtgcccgatctcggcaggcagccggcccctggaattcttccctgacgacgactgcacgtcctccgcccgtcgagagcagaagcgcgagcagtaccgccaggtgcgtgagcacgtgcgtaacgacgacggccgtctgcaggcctgcggctggagcctgcccgccaagtacaagcagctgagtcccaacgggggccaggaggacacgcggatgaagaacgtgccggtgccggtgtactgccgccctctggtggagaaggaccccaccatgaagctgtggtgtgccgcgggcgtcaacctgagcgggtggaggcccaatgaggacgacgctgggaatggagtcaagccagcgccaggccgcgatcccctgacctgcgaccgcgaaggagacggcgagcccaagagcgcccacacgtctcccgagaagaagaaggccaaggagctccctgaaatggacgccacctccagccgggtgtggatcctgaccagcaccctgaccaccagcaaggtggtgatcatcgacgccaaccagccgggcacggtggtggaccagttcaccgtctgcaacgcgcacgtgctgtgcatctccagcatccccgcggccagcgacagcgactaccctcccggggagatgttcctggacagcgacgtgaacccagaggacccgggcgcagatggcgtgctggccggtatcaccctggtgggctgtgccacccgctgcaacgtgccgcggagcaactgctcctcccgaggggacaccccagtgctagacaaggggcagggggaggtggccaccatcgccaacgggaaggtcaacccgtcccagtccacagaggaggccacagaggccacggaggtgccagaccctgggcccagcgagccagagacagccacattgcggcccgggcctctcacagagcacgtcttcactgacccagccccgaccccgtcctctggcccccagcctggcagcgagaacgggccagagcctgacagcagcagcacacggccagagccagagcccagcggggaccccacgggagcaggcagcagtgctgcacccaccatgtggctgggagcccagaacggctggctctatgtgcactcggctgtggccaactggaagaagtgcctgcactccatcaagctgaaggattctgtgctgagcctggtgcatgtcaaaggccgtgtgctggtggctctggcggacgggaccctggccatcttccaccgtggtgaagatggccagtgggatctgagcaactatcacctaatggacctgggccacccgcaccactccatccgctgcatggctgttgtgtacgaccgcgtgtggtgtggctacaagaacaaggtgcacgtcatccagcccaagaccatgcagatagagaagtcatttgacgcccacccgcggcgggagagccaggtgcggcagctggcgtggatcggcgatggcgtatgggtgtccatccgcctggactccaccctgaggctctaccatgcacacacgcaccagcatctacaggacgtggacattgagccctacgtcagcaagatgctaggcactggcaagctgggtttctccttcgtacgcatcacggccctgcttgtcgcgggcagccggctctgggtgggcaccggcaacggagtggtcatctccatccccctgacagagactgtggtcctgcaccgaggccagctcctggggctccgagccaataagacatcccccacctctggggagggcgcccgtcccgggggcatcatccacgtgtatggcgatgacagcagtgacagggcggccagcagcttcatcccctactgctccatggcccaggcccagctatgcttccatgggcaccgcgatgccgtgaagttctttgtctcggtgccagggaacgtgctggccaccctgaatgggagtgtgctggacagcccagccgagggccctgggccagctgcccctgcctcggaggtcgagggccagaagctgcggaacgtgctggtgctgagcggcggggagggctacatcgacttccgcattggagacggagaggacgacgagacggaggagggcgcaggggacatgagccaggtgaagcccgtgctgtccaaggcagagcgcagtcacatcatcgtgtggcaggtgtcctacacccccgagtgaagctgctgccctgcctggcccgacctgtacataggacccccgaccacctgacccccgcccggcccgcggggtagccagccaggcgccgccgcccctcttctaacctctcaacctgcagctttcacctgagtctggcccctccagcgggcagggagtgcggggatgcggatcagctgggaggaggaggggaggggagcttccacccgaggggaagatgctctcgggacagtttcccgggcagctcctggccagcttccagcccagagtcctcaagtccagggcaccttgggcccagcgcaggcagaatccgaggtggtcctggctctaccctgggcctcctactccccagcacccctggaggaggcaggggctccccgccgccgaggctgcctgccctgggcccacctctgcatgctgctcatggggccaccctgcctcctgggccctcactctgcctaggggagctgggccaggcactagcctttgcccagggaggtgggcctcaggctgcccaggtgcctgcaccccagccggccttctctggggcctccccgtcgtcaagcctctatcctgtctgtccccaccccagctgtcccctgcccagggaactggcataaaagcacgaggcccggctccctggggcagctgcttgagaacagagactgctaccccatcctgcccatgcaggcaggctcttgccagccccgttctgacccgtgtccccccaggctctgcctgggcagaagactcaccttggaggagtgggccctggagtcctgtccctcccagaagcccccagggtgggatttctcaggctgccagggcaggcccaggcctcaggaagaaggggaggcccctggcctctccgggatcagtcctaggacacaggctcagcctcaggttgatgggggatgatgtgctcccggggcctgcctcctgcacggggctccacggagcccagctcccagacacgctactaagtgcctagggttgcccgctgtggcctgctcccagggagcaacagagaggccaccaagcagaggcccgtggggctgaggatggagccgcccccagccgactccaagcccgcagagggcagacgccaccctggactgctctccctgcccagctgggcctctctggcctattcctaccttccaggcccactgcactcctgtctgggaggcccttatgagggcagcccagcccccgcacccacccccaaccagagaagcacagatcttggggagctgccccacaagccccgctggccaccgagggctgcagccgctgcgctgccggcttctccccaccaccctgccacctccactgtgatgtatgtccgctccctcgtctgttcccccaggatctcgaagtgactccgggctgagcagtggggcggctgggggaggggtgacgattctcctcaggctttggccctgcaagcaaacccacatatctgctctgtatgtaataaatgtcttaacgtcgtaaaaaaaaaaaaaaaaaaaaaaaaaaaaaa

SEQ ID NO: 2147 - DNA, 14734 bp, Homo sapiens
cggcggcagtggcggcaccgcctcctcctcacattcccggggtggcggggttagatgagcggccccagtcgcggcgccgggggcgctgttcatgccggttcccgacggctccgtggctgctgcggggctggggctggggctacccgccgcggactccccgggtcactaccagctgctgctgtcaggccgggccctggccgaccgctaccggaggatttataccgctgcgctcaatgacagggaccaggggggcggcagcgctggacacccagcctccaggaataagaaaattttaaataagaagaaattgaaaagaaaacagaagagcaaatcaaaagtgaagacaagaagcaagtctgaaaacttagagaatacagtaatcataccagatatcaaactacatagcaatccttctgctttcaatatttactgtaatgtacgccattgcgttctggaatggcagaaaaaggaaatatcattggcagccgcatctaagaactctgtgcagagtggagaatcagatagtgatgaagaagaggaatccaaagagccccctatcaagcttccaaagattattgaggttggcctttgtgaagtttttgaattgatcaaagagacacgattttctcatccatccctgtgtctcaggagtctccaagccctgctcaacgtgctgcagggccagcagccagaagtgctccagtctgagccacctgaggtcctagagtctctcttccagcttcttttggaaatcaccgttcgaagtactgggatgaatgacagcacaggacagtccttaacagcactttcctgtgcttgcctctttagtctggtggcttcttggggagaaacaggaaggacacttcaggccatctctgctatcctcaccaacaatggaagccatgcttgccaaactattcaggtgccaacaattctaaattcgctacagagaagtgtacaagcagttttggtgggaaaaattcaaattcaggactggtttagtaatggcattaagaaagcagctttaatgcacaagtggccattaaaagaaatatctgttgatgaagatgaccaatgtctacttcagaatgatggattttttctttatctattatgcaaggatggattatataaaataggctctggatacagtggaacagttaggggccatatatacaattctacatcccgtattagaaacagaaaagaaaaaaagtcttggttagggtatgctcagggttatttattatatagagatgtgaataaccacagcatgacagccataaggataagccctgaaacactggagcaagatggtactgtgatgttaccagattgccacactgaaggtcaaaatattttattcactgatggagaatatattaatcagatagctgcttcaagagatgatggctttgttgtcagaatatttgccacaagcactgaacctgttctacagcaagaattgcaacttaaactggctagaaaatgcttacatgcctgtggtatctcactattcgatctggaaaaggacttgcatattataagtacaggatttgatgaggagtcagcaattcttggtgcaggacgagagtttgcgctaatgaaaacagcaaatggaaagatatattacactggcaaataccagagtcttggaatcaaacaaggtggtccttcagcaggaaaatgggttgagctaccaattacaaaatctccaaagatagtacacttctcagttggacacgatggctctcacgcccttttagttgcagaagatgggagcatattctttacaggatctgctagtaaaggagaagatggagaatcaactaagagcagacggcaatccaaaccttataaacctaaaaagataattaagatggaaggaaagattgtggtatatacagcctgcaataatggaagtagttctgttatttctaaagatggagaactctacatgtttggaaaagatgccatttactctgatagttcaagtttggtaactgatttgaagggccattttgtaactcaggtagctatgggcaaagctcacacttgtgttttaatgaagaatggagaggtgtggacatttggtgtaaataataaaggacagtgtggacgagatactggtgccatgaaccaaggtgggaaagggtttggagttgaaaatatggcaacagcaatggatgaagacctggaagaagaactagatgaaaaagatgagaagtctatgatgtgccctccaggcatgcacaaatggaagctggagcagtgcatggtttgcactgtctgtggagactgtacaggttatggagccagctgtgtcagtagtggacggccagacagagtccccggagggatctgtggttgtggttccggagaatctggttgtgctgtgtgtggatgttgcaaggcctgtgcaagagagttagatggtcaagaggcaagacaaagaggaattcttgatgcagtgaaagaaatgatacctttagatcttcttttagctgtcccagtgcccggggttaacattgaagaacaccttcagttacgacaagaagaaaaacggcaacgtgtaatcagaaggcacagattagaggaaggaagaggcccccttgtatttgctggtcctatttttatgaaccatcgagaacaggctctagccagactcagatcccatccagcacagctaaagcataaacgggacaagcacaaagatggaagtggagaaagaggcgaaaaggatgcaagcaaaatcacaacataccctccaggctctgtgcgatttgactgtgagctccgggcagtccaagtcagctgtggatttcaccattcagtggttttaatggaaaatggagatgtctatacatttggttatgggcagcatgggcagctaggacatggagatgtcaactccaggggatgtcccactcttgttcaagcattgccaggccctagcacacaagtcactgcaggcagcaaccatacggcagtacttttaatggatggacaggtcttcacatttggaagtttttctaaaggacaactgggcagaccaattttggatgtgccatattggaatgcaaagccagctcccatgcctaacattggatcaaaatatggaagaaaagctacttggataggtgcaagtggggaccaaacttttttacgaattgatgaagcacttattaattctcatgtacttgctacatcagaaatttttgccagtaaacacataataggcttggtacctgcttctatatcagaacctcctccatttaaatgccttctgataaataaagtggatgggagttgtaaaacttttaatgactcagaacaagaggatctgcaaggatttggtgtgtgtcttgatcctgtatatgatgtaatttggaggtttcgaccaaatactagagagctgtggtgttacaatgcggtggttgctgatgccaggcttccctctgcagcagacatgcagtccagatgtagtatcctaagtcctgaacttgccttaccaacaggatcaagggccctcactacccgatctcatgcagctttgcacattttaggttgtcttgataccttggcagctatgcaggacttaaaaatgggtgttgcaagtacagaggaagagactcaagcagtaatgaaggtttattctaaagaagattatagtgtggtaaacaggtttgaaagtcatggaggaggctggggttattctgcccattcagtagaagctatacgtttcagtgccgacactgatattttacttggtggtcttggtctgtttggaggtagaggagaatatactgctaaaattaagctgtttgaattgggtcctgatggaggagatcatgaaactgatggtgaccttcttgcagagactgatgtattggcttatgactgtgctgctagagaaaaatatgcaatgatgtttgatgagcctgttctcctgcaagctgggtggtggtatgtggcatgggcccgagtgtcaggacccagcagtgactgtggatctcatggacaggcatctattaccacagatgatggggttgttttccagttcaagagttcaaagaaatcaaataatggtacagatgttaatgcgggtcagatacctcagttattatacagacttccaaccagtgatggcagtgcttcaaaaggcaaacagcaaaccagtgaacctgtacacattttaaagaggtcttttgcaagaactgtctcagtggaatgttttgagtcattgttgagtattcttcactggagctggaccaccttagtcttaggagttgaagaacttagaggattaaaaggattccagttcacagctacactcctagatttagagagactgcgctttgtgggtacctgttgtctgaggttattgcgtgtctatacctgtgaaatttacccagtgtcagctacaggaaaagcagttgtagaagaaactagcaaattagcagagtgtattggaaaaaccagaactttgttaagaaaaattttatcagaaggagttgatcactgcatggtgaaattggataatgatcctcaaggatatctcagtcaacccttgagtcttctagaagctgtccttcaggaatgtcataatactttcactgcctgctttcattctttctacccaactcctgccttacagtgggcttgcctttgtgatctgctgaattgtttggatcaggatatccaagaagcaaacttcaagacatcaagtagccgactccttgcagctgttatgtcagctctgtgtcacacgtctgttaagctgacttccatcttcccgattgcgtatgatggagaagtattactacgatcaattgttaaacaagttagtacagagaacgactcaacactagttcatcgttttccccttttggtggcacatatggaaaaactcagccagagtgaagagaatatctcagggatgacaagcttccgtgaagttctggagaaaatgctggtcattgttgtgctaccagtcaggaacagcctgaggagagaaaatgaactcttctcctcccacctcgtctctaacacctgtggattactggccagcattgtcagtgaactgacagcgtcagccctgggatctgaggttgatggacttaattctcttcactctgtaaaagctagtgctaaccgatttacaaaaacaagtcagggcagaagttggaacactgggaacgggtcccctgatgcaatctgtttttcagtagacaaacctggaatagttgtggttggtttctctgtctatggaggaggtggaattcatgaatatgaattagaggtgttggttgatgatagtgaacatgcaggagattcaactcattcccacagatggacatctctggaattagtgaaaggaacgtacacaacggatgactcacccagtgatatagctgagatcagacttgacaaagtggttcctttaaaggaaaatgttaaatatgctgtgcgcttgaggaactatggaagccgtacagccaatggagatggaggaatgaccacagttcagtgccctgatggtgtgacattcacattcagcacgtgcagcttgagcagtaacggcacaaaccaaaccagaggacagatcccacagatactctactataggagtgaatttgatggagatttacaatcccaacttctgagtaaagccaatgaagaagataaaaactgtagcagagcattgtctgttgtaagcactgtcgttcgagcctctaaggacctcctgcacagagctcttgctgtggatgctgatgacattccagaactgctgagttcttccagtctgttttccatgctgctcccccttattatagcctacataggaccagtagctgctgctattcccaaggtggctgtagaagtctttggccttgtccaacaattgcttccgtcagttgccattttgaatcagaagtatgcaccgcctgccttcaaccctaatcagtcgacagatagcaccacaggaaaccagcctgaacagggcctctctgcttgtacaacctccagtcactatgctgtcatagagagtgagcacccgtataaacctgcctgtgtgatgcattacaaggtgacattcccagaatgtgtgaggtggatgacaatcgaatttgaccctcagtgtggtactgcacagtcagaagatgtccttcgtttgttgattcctgtcagaactgttcagaattcaggatatggaccaaaattgacatctgttcatgaaaatcttaattcatggatagaattaaagaaattttcaggatcctctgggtggcctactatggttttggtgttgccaggaaatgaggcccttttttcattggagactgcatcagattatgtgaaagatgacaaagcttctttctatggttttaagtgttttgcaattggatatgaatttagccctggacctgatgagggagtcatccaattggaaaaagaattagccaatcttggtggggtttgtgcagcagctctgatgaagaaggacctagcacttcctattggtaatgaattagaagaagaccttgaaattcttgaggaggctgcattgcaggtgtgcaaaacccattctggaattcttggaaagggtctagctctttctcattcaccaactatattagaagcacttgagggaaatttaccactccaaatccaaagcaatgaacagtcttttctggatgattttattgcctgtgtcccaggatcaagtggtggaaggcttgcaaggtggcttcagccagattcatatgcggatcctcagaaaacatctttgatcctgaataaggatgatattcgttgtggttggcctaccaccataactgttcaaacaaaagaccagtatggggatgtggtacatgttcccaatatgaaggtggaagtgaaagctgtccctgtttctcagaaaaaaatgtctttacaacaagatcaagcaaagaaacctcaaaggattcctggcagtcctgcagtaacagctgcatcttctaatactgacatgacttatggagggctggcatcaccaaagctagatgtttcatatgaaccaatgatagtgaaggaagctcgatatattgccataacaatgatgaaggtttatgaaaattattcatttgaagaactacgttttgcatcaccaactcctaagagacccagtgagaatatgctgatccgtgtcaataatgatgggacttattgtgcaaattggactccaggggctattggactctacactcttcatgttaccattgatggcattgaaatcgatgctggtctggaagtaaaagtaaaagacccaccaaaagggatgataccaccaggaactcagttggtcaaaccaaagtctgaacctcagcctaataaggttcgaaaatttgtggccaaggacagtgcggggcttcgcatccgtagccacccttcccttcagagtgagcagataggcatagtgaaagtcaatggaactatcacttttattgatgagatccataatgatgatggtgtgtggctgaggctgaatgatgagacaataaagaagtatgtccctaacatgaatggttacactgaagcctggtgcctctcttttaatcaacatcttggcaagagtcttctggtccctgttgacgaatctaaaactaatactgatgactttttcaaagacataaactcctgctgcccacaggaagcaacaatgcaagaacaagatatgccattcttgcgaggagggccaggcatgtacaaggtagtgaagacgggaccttcaggtcacaacatcagaagctgccctaaccttagaggtatcccaattggaatgttagttctgggaaacaaagtcaaagcagtgggagaggtaaccaattctgaagggacatgggtgcaactggatcagaacagcatggtagagttctgtgagagtgatgaaggagaggcatggtccttagctagagacagaggcggaaaccagtacctccgacatgaagatgaacaagctcttctggatcagaattctcaaactcctcctccaagccctttctcagtgcaagcttttaataaaggggcaagttgcagtgcccaaggatttgattatggactcggaaatagcaaaggtgatcgaggaaacatctcaacatcttctaaaccagcctctacatcaggaaaatcagagctgtcctctaaacacagcagatcgcttaaacctgatggacgtatgagccggactactgctgatcagaagaagccaaggggcacagaaagtttatctgctagtgaatccctcatcttaaaatctgatgctgcaaagttgaggtcagattcccacagtaggtcattatcccccaaccataacaccttgcagacattgaaatctgatgggaggatgccttctagctccagagctgaatccccaggaccaggttctcggttgtcatctcctaagccaaagactctcccagccaataggtctagcccatcgggtgctagttctccacgctcctcctcaccacatgataaaaatctacctcaaaaaagtactgctcctgttaagacaaagcttgatcctcctcgggaacgttctaaatcagactcttacacacttgatccagataccctccgcaagaagaaaatgcccctcacagaacctttgagaggacggtcaacgtcaccaaaaccaaaatcagtaccaaaggattctacagattcccctggatctgaaaatagagctccctctccccatgtggtacaggaaaacctccacagtgaggtggtcgaagtctgcacctcaagtactttaaaaacaaatagtctaacagacagcacctgcgatgacagcagtgaatttaagagtgtggatgaaggttcaaataaagttcattttagcattggaaaagcaccactgaaagatgaacaggaaatgagagcatctcccaaaataagtcgaaaatgtgctaatagacacaccaggcccaaaaaagaaaaatcgagttttcttttcaaaggagatggatccaagcctttagagccagccaagcaagccatgtctccttctgtggccgaatgtgccagagctgtgtttgcttccttcctctggcatgaaggcatagtacatgatgcaatggcttgttcttctttcctaaagtttcatcctgaactttccaaagaacatgctcctataaggagtagtttaaatagccaacaacctacagaggaaaaagaaaccaagttaaaaaatagacattcattagaaatatcatctgcactgaatatgtttaatattgcaccccatggaccagatatatctaagatgggtagcatcaacaaaaacaaggtattgtctatgcttaaggaaccacctctgcatgaaaaatgtgaggatgggaaaaccgagaccacttttgaaatgtccatgcataacacaatgaagtctaagtctcctcttcccttaactttacaacatttagtggctttttgggaagacatctctttggctactatcaaagctgcttcccagaatatgatttttccaagtcctggttcctgtgcagttcttaaaaagaaagagtgtgagaaagagaataagaagtccaaaaaggaaaaaaagaaaaaagaaaaggcagaagttaggcccaggggtaatttgtttggagagatggcccagctggcagtaggaggaccagagaaagataccatctgtgaactgtgtggggagtcacatccatacccggtgacctatcacatgagacaagctcacccaggttgtggccgatatgctggtggacaaggttacaatagcattgggcatttttgtggaggatgggctggtaactgtggtgatggtggcataggaggaagcacttggtatctggtatgtgatcgctgtagagaaaaatacctccgcgaaaaacaggctgctgcaagggagaaggtcaaacaatctaggagaaaaccaatgcaagtcaagacccctcgtgccttgcccaccatggaagctcaccaggtgattaaagccaatgcactcttcctgctgtccctgagcagtgcagcagaaccgagcattctgtgttaccatcctgcaaagccattccaatctcagttgcccagtgtaaaagaaggcatttctgaggatcttcctgtgaaaatgccttgtctctacctgcagacattagctaggcatcatcatgaaaattttgtgggctatcaagatgacaatctattccaggatgaaatgagatatctacgttcaacatctgtacctgccccgtatatatcagtaactcctgatgcaagtcctaatgtatttgaagagccagagagcaatatgaagtctatgccaccaagtttagaaaccagtcccataactgatactgatcttgcaaagagaactgtcttccaaagatcatactcagttgttgcttccgaatatgataaacaacactccattttacctgcacgagttaaagctattcctagaagaagagttaacagtggagacactgaagttggttcttcccttttgagacatccgtctcctgagctttctcggctaatctcagcccacagctctctttctaaaggagaacgaaatttccagtggccagttttagcttttgttatacaacatcatgatctagaaggtcttgaaatagcaatgaaacaggccctaaggaaatctgcttgtcgagtttttgctatggaggctttcaactggcttctgtgtaatgtcatccaaaccacttctctccatgatattctgtggcattttgtggcatcactgactcctgcaccagtggaaccagaggaagaagaggatgaagaaaataaaacaagcaaagaaaattcagaacaagagaaagatacaagagtatgtgaacatccactctcagacatagtgattgccggggaagctgctcatcctttaccacacacctttcaccgcttgctgcagaccatctcagaccttatgatgtctctccccagcggcagttcattacagcaaatggccctgaggtgctggagtctcaaattcaagcaatctgatcaccagttccttcatcagagcaacgtctttcatcacattaacaatattttgtcaaagtcagatgatggcgatagtgaagagagttttagcatcagtatacagtctggctttgaagctatgagtcaggaattatgcatagtaatgtgcttaaaggacttaaccagcattgttgacataaaaacttcaagccgacctgccatgattggcagtttgacagacggctccacagaaaccttttgggaatcaggagatgaagataaaaacaaaactaagaacatcaccatcaactgtgtaaaaggaatcaatgcccgctatgtgtctgttcacgtggacaattcccgagatcttgggaataaagttacctcaatgaccttcttaactggcaaagcagtagaagatttgtgcagaataaagcaggttgatctggattccaggcacattggctgggtaacaagtgaacttccaggaggggataatcacatcataaaaattgaattaaaaggcccagaaaatacactgagagttcgacaagtcaaagtcctgggctggaaagatggtgaaagcacaaaaatagctggccagatttcagccagtgtggcccagcagaggaactgtgaagctgagactctgcgagtattcagactgattacgtctcaagtatttggaaagctcatctctggagatgctgaacctacaccagaacaagaggaaaaagcactattgtcatcacctgaaggagaagaaaaagtatacaatgcaacatcagatgctgacctgaaagaacatatggttggaatcatattcagcaggagtaagctgactaacttacaaaaacaggtgtgtgctcatattgtccaagctattcgcatggaagctaccagagtccgtgaagaatgggaacatgctatatcaagcaaagaaaatgccaattctcagccaaatgatgaagatgcctcctctgatgcctactgctttgagctgctctctatggttttagcactgagtggctctaacgttggccggcaatatctggctcaacagctaaccctgcttcaggatctcttctcgctgcttcacacagcctctcctagagtccagagacaggtaacctctttactaagaagagttttgcctgaagtaacccctagtcgtctggccagcatcataggagtgaaatccctccccccagcagatatcagtgatatcattcactcaacagagaaaggagactggaataagctgggtatcttggacatgtttctaggatgcattgccaaagcactcactgtacagctaaaagccaaaggaaccaccatcactggaacagctggtaccactgtgggcaaaggagttacaacagttactcttccgatgattttcaattccagttatctccgacgaggtgaaagtcattggtggatgaagggctcaacccctacccagatctcagagatcatcattaaacttatcaaggatatggcagcaggtcatctgtcagaagcttggtcccgagtgacaaaaaatgctattgcagaaaccatcattgccttgaccaagatggaagaagaatttaggtctccagtgagatgtattgcaacaactagactctggcttgctctcgcatccctatgtgttcttgatcaggaccacgtagatcgtctctcctcggggagatggatgggaaaggatggacaacaaaaacaaatgcctatgtgtgataaccatgatgatggtgaaactgcagcaatcattttatgcaatgtctgtggaaatttatgtacagactgtgacagattccttcaccttcatcgaagaaccaaaactcatcaaagacaggtcttcaaagaagaagaagaagctataaaggttgaccttcatgaaggttgtggtagaaccaaattgttctggttgatggcactggcagattctaaaacaatgaaggcaatggtggaattccgagaacacacaggcaaacccaccacgagtagctcagaagcatgtcgcttctgtggttccaggagtggaacagagttatctgctgttggcagtgtttgttctgatgcagattgccaggaatacgctaagatagcctgtagtaagacgcatccttgtggccatccatgcgggggtgttaaaaacgaagagcactgtctgccctgtctacacggctgtgacaaaagtgccacaagcctgaagcaagacgccgatgacatgtgcatgatatgtttcaccgaagcgctctcggcagcaccagccattcagctggattgtagtcacatattccacttacagtgctgtcggcgagtattagaaaatcgatggcttggcccaaggataacatttggatttatatcttgtcccatttgcaagaacaaaattaatcacatagtactaaaagacctacttgatccaataaaagaactctatgaggatgtcagaagaaaagccttaatgagattggaatatgaaggtctgcataagagtgaagctatcacaactcctggtgtgaggttttataatgacccagctggctatgcaatgaatagatatgcatattatgtgtgctacaaatgcagaaaggcatattttggtggtgaagctcgctgcgatgctgaggctggacggggagatgattatgatcccagagagctcatttgtggtgcctgttctgatgtttccagggctcagatgtgtcccaaacatggcacagactttttggaatataaatgtcgctactgctgttcagtggctgtttttttctgttttggaacaacacatttttgtaatgcttgtcatgatgattttcaaagaatgactagcattcctaaggaagaactaccacactgtcctgcaggtcccaaaggcaagcagttagaaggaactgaatgtccactccatgttgttcatccacccactggggaagagtttgctctgggatgtggagtgtgcagaaatgcccacactttttagaacacgcagatcctttgtctacagagagaaaaattgccttcatcccccaagaggatgcggtgaagtttaaactctgctcaggataaggacgggaccatttttacatccatgaaaatgaaccattcacagtgcaagaaggataccaaataccatgtacataattcttgctatgaaaagtttccccattattttggtttatcttcttttgaacaaatgacatcaaacttgtgaggtgtttgcatgtggccattaccgtcattggcctgtgaagcattggacatttatagataattgatataaaagaatcgccatgcccatggactaagaacgatgctggctttcaagcaaaaaagaaaaataatcattgtttattgtatactgcctttttgtaatcctgtacaattgcatcacgggtggggataaaaagaggaatattctggtttatttcctagactgttatttaaaaaaaaaaaaaacattgtgttaggacagcatataaatgtaataagtatcacactgtatataaacatatcaatgtttgtcctgtataagaattactaaattacaaatgcaatttcatttaaacttctaggttaagtttgagcctgaaattttaatgaagtgcaatactgagtgtgcctcattatcttgcagctgtaaacatattggaatgtacatgtcaataaaaccactgtacatttttatacagtgataaagtct

SEQ ID NO: 2148 - DNA, 2142 bp, Homo sapiens
cttacggcggccggccttctttgtaggcctggcaccgtagaggtagaggagctacattggccgcgtcccctgtccctctgccctcttgcccatctgcccaaacttttgtatttgatctctgttttgatgtcgaaccccaaagcactgtaattggggggggcggggggggtggtggaacctgcggacctgagagcagcgcgcgtgcgcacgacacgcgctgtgcgccggaagagcacgcccagtccgggctgcgcggaggaagcgctggggtcccggagggcgggggtggcggcgccggaggtcgccatggctaccgagcccgaagccgcggagccggtggtgccttcgctcgtggatcgatacttcactcgctggtacaaaccggatgtcaaaggaaaattttgtgaggaccactgtatactacagcactctaaccgaatatgtgtcatcacattggcagaatctcatccagttcttcaaagtggaaaaacaattaaaagcatttcctatcagatcagtaccaactgtagcagacttcagaacaaggtctctgggaaatttaagcggggggcacagtttctaacagagcttgcacctctctgtaagatttactgctcagatggtgaagaatatactgtgtctagttgtgttagaggacgtttgatggaagtgaatgaaaacatcctccataagccatctattcttcaagaaaagccatctactgaaggctacattgcagttgtgttacccaaatttgaagaaagtaaaagcataacagaagggttactgacacaaaaacaatatgaagaagtcatggtgaaacgcattaatgccacaacagctacgtcatgaggattgacatggaacaaaaagcaaagtgggattcttgttacctggcctaaaccatcagggtactaaaggagaagaaccagtatatgtaaagcatacctaacagccagccatatgcaggggaggcctagtgcttcacttagttttccctctctgtcttcataatgagccttggttcccatttgtctacagcctgccagatctggcctgcccatgtactcacactgttctcttgcatctctctaacaactggcatgcaaggcatgtttttctgattaaaaacaaacaaagctctttgaagaagatttagaaaatacagaagagttttaagtagccaagtaaaaataatttacccatcatcccataatccagaagtaaatacatttgacccttgagcaacataggtttgaactgcaagggtccacttatgcatggactattttcaactataaacgagtcaaaaatatatcaatcattaaccaaacacgaaacccacttatagagcaggttcatatactcaggttccaaagggccaactgcaggacttgagttctcacgtatggatttgggtatatgtggaagttcctggaaccaatcccctatgtaaaccaagggataactactacattttaacctacttctgtttgaacatatggtatggttattgcttttgcctcgttttcctaacagtttgaagtttaaaaaaacctaacccacctttcttacccagtcttctataatgtgcctaccaaaaagcctagtcctagcccatctgcctcaactcctctcccttttaggttgtagggaagaggccggagtgtagagtatattatatcttctgtcccccttatgccaacaagatggccttcccctctgaaacaaagtaaaactgcaacactgtgacttcttaaatgagggatatgtgaaaaggctatgaaaaatacaaaggctttcctaggaaatgtgttataatgcagcgggaagctaattcttgaaatatgcacattatagttactcagtctcacatactctagttactggcaaagaagttactgagaatatgtcattcaaaggcataggggcctttgaatggaacaaatgctttcacatcatttaaagtaaaaaaaaaacctccaacaactgtgaatttatagtttaagagtgatttacactgaatttcaaataaaaggactataaaacgtgttatttttctgtaagggctataacatacatgtcaatatcactgtttttaaataaaatatacttttatacagaagaaaaaaaaaaaaaaaa

SEQ ID NO: 2149 - DNA, 1066 bp, Homo sapiens
ggctgcagaggggaaggcggctaccagtgtaaagccagagctgaggttcttgatagtccacaatgggtgaaccacagcaagtgagtgcacttccaccacctccaatgcaatatatcaaggaatatacggatgaaaatattcaagaaggcttagctcccaagcctccccctccaataaaagacagttacatgatgtttggcaatcagttccaatgtgatgatcttatcatccgccctttggaaagtcagggcatcgaacggcttcatcctatgcagtttgatcacaagaaagaactgagaaaacttaatatgtctatccttattaatttcttggaccttttagatattttaataaggagccctgggagtataaaacgagaagagaaactagaagatcttaagctgctttttgtacacgtgcatcatcttataaatgaataccgaccccaccaagcaagagagaccttgagagtcatgatggaggtccagaaacgtcaacggcttgaaacagctgagagatttcaaaagcacctggaacgagtaattgaaatgattcagaattgcttggcttctttgcctgatgatttgcctcattcagaagcaggaatgagagtaaaaactgaaccaatggatgctgatgatagcaacaattgtactggacagaatgaacatcaaagagaaaattcaggtcataggagagatcagattatagagaaagatgctgccttgtgtgtcctaattgatgagatgaatgaaagaccatgaaagatgtttctttttctttttttccttttgataatagcatcatatattagttcattttcttttggacagtcttaagagaagtttcactaaaaatgtaaacagctttaatcttgactccaaatttttcaattatgagatgtcataggcagtaatttcgctgtataacaagcatagacaaatgagtgtccctgcactaagaagaatcactttaaaaagcaaagtgttagctgctgttgtatgggacattcctatgttttagagttgcagtaaaactttgatgataacctcaataatagcaaagt

SEQ ID NO: 2150 - DNA, 2158 bp, Homo sapiens
ccgaggccagagagaaaagactgcgaggtggccgcagctgtggccggagagcacaaagaatgaaccagcagtggaagagaaaatactgtaagctggctgactgctggtgaagaaaatgctttatttttgtggcaggcatctgtgggatctgtaatagaaatatattggagtaattcaagattctgtggttggcccttttgactgctctctctacaggtttaatttgggcatttactcattttcatggctccaaggaccatgtatgtgttggggatcttcaatattcatgttattttctcctttggtcttatatgattgttacctttatgaagctttagtgattacaaagcactttttttgtccatttttacctgagctttgtaaactctgatttgcaggatggctggctgtggtgaaattgatcattcaataaacatgcttcctacaaacaggaaagcgaacgagtcctgttctaatactgcaccttctttaaccgtccctgaatgtgccatttgtctgcaaacatgtgttcatccagtcagtctgccctgtaagcacgttttctgctatctatgtgtaaaaggagcttcatggcttggaaagcggtgtgctctttgtcgacaagaaattcccgaggatttccttgacaagccaaccttgttgtcaccagaagaactcaaggcagcaagtagaggaaatggtgaatatgcatggtattatgaaggaagaaatgggtggtggcagtacgatgagcgcactagtagagagctggaagatgctttttccaaaggtaaaaagaacactgaaatgttaattgctggctttctgtatgtcgctgatcttgaaaacatggttcaatataggagaaatgaacatggacgtcgcaggaagattaagcgagatataatagatataccaaagaagggagtagctggacttaggctagactgtgatgctaataccgtaaacctagcaagagagagctctgctgacggagcggacagtgtatcagcacagagtggagcttctgttcagcccctagtgtcttctgtaaggcccctaacatcagtagatggtcagttaacaagccctgcaacaccatcccctgatgcaagcacttctctggaagactcttttgctcatttacaactcagtggagacaacacagctgaaaggagtcataggggagaaggagaagaagatcatgaatcaccatcttcaggcagggtaccagcaccagacacctccattgaagaaactgaatcagatgccagtagtgatagtgaggatgtatctgcagttgttgcacagcactccttgacccaacagagacttttggtttctaatgcaaaccagacagtacccgatcgatcagatcgatcgggaactgatcgatcagtagcagggggtggaacagtgagtgtcagtgtcagatctagaaggcctgatggacagtgcacagtaactgaagtttaaataaaaatgtcttcagctccatgctcaaggttgaaagggttacctgtaaatttctgcccacataacattatactcatccctagtagtgcattttgggagttggggtgggaaggggtatgggaaggatagactcataattaaaatgtctaacatgtctctgttgagaaatttatttaatgtaaggaacttgggtgttaatagttgagagctgtttagtaataacccagttttcttgaggtctgtttactttatactttttaaaaacttctgtagttcttttggccagtgtgtttgtattatctgtgcattaatggtcctcatctgactcctgcattgtgtcttatttttctgcatggattggcataagaccattactaaaatttggcacctgtgagatgtttgatattatgaacaggaaacataatttaatgtatgaatagatgtgaatttgggatttcaaaatagatgaataacaactattttatagtaaagttattgaaatggaaatgaaaacagccagtaacttatgtttcagaatgtttgtaacacacttcatggtgttcccataggctttgctgtctagtcttatagtttgaggtttttttggtctgcatttttctttttgattacaaaatttataatttaataaatactagagtttatcaaaaaaaaaaaaaaaaag

SEQ ID NO: 2151 - DNA, 16341 bp, Homo sapiens
aggagcggcggggaggaaacgccgcgcagcgccgggctggggcgggcggcccgggacaccgacagatttttctgtgaccatgaaagagagaaataaagaatgatccatgatttctaaacaccttttcctgaggatatagtcatgttggaaggccttgtagcctgggttctcaatacctatttgggaaaatatgtcaataacctgaacactgaccagctctcagttgcacttctcaaaggtgctgttgaattagaaaacttgccattaaagaaagatgccttgaaagaattggaattaccatttgaagtcaaagctggcttcattgggaaagtaacccttcagattcccttttatcgcccccatgtggacccttgggtgatctccatctccagccttcacttaattggagccccagagaaaatacaggatttcaatgatgaaaaggagaagctgttggaaagggaacgtaagaaagcactacttcaagccctggaggagaaatggaagaatgaccgccagcagaaaggggagtcctattggtattcagttaccgcctccgtagttacaaggattgtggagaatattgaattaaaaattcaagatgtccatttacgctttgaagatggtgtcaccaatccctcccatccttttgcttttggcatctgcattaagaatgtgtccatgcaaaatgctgtgaatgagcctgtacagaaactaatgcggaaaaagcaattagacgtagcagaatttagcatctattgggatgtcgattgcactttactgggggatttgcctcagatggagttacaggaggccatggccaggagcatggagagtcgcagccatcactacgtcctggagcctgtgtttgcatctgctcttttgaagagaaactgctccaagaagcccctgcggtctcggcacagtccccgtattgattgtgatattcagctggagaccattcccttgaaactctctcagctgcaataccggcaaatcatggaattcctcaaggagctggaacgaaaggagaggcaggtgaagttccgaaggtggaaacccaaggtggcgatatctaagaactgccgagaatggtggtattttgctttgaatgctaacttgtatgagatcagagagcagaggaaacgttgcacctgggactttatgttgcaccgcgctcgtgatgctgtatcttacactgacaaatatttcaacaagttaaaaggaggcctgctgtccacagatgacaaggaggaaatgtgtcggattgaagaggaacagagctttgaggaattgaagattttgcgtgaactggttcatgatcgatttcacaaacaggaagaactagcagagagtctgcgggagcctcagtttgattctccaggagcctgtccgggagccccagaacccggtggaggcagtgggatgctgcagtatctccagtcctggtttcctggatggggtggctggtacgggcagcagaccccagaagggaatgtggttgagggactgtcagcagagcaacaggagcagtggattcctgaagagatcctgggcactgaggagttttttgaccccactgcagatgcctcgtgtatgaacacgtatacaaagcgagatcatgtctttgccaaactgaatttgcagttgcagcgaggtacagtgactctgttacacaaggagcaaggaactcctcaaatgaatgaaagtgctttcatgcagctcgagttttcagatgtaaaacttctagcagagtctcttcctcgaagaaattcctcgttgctttcagtccggttgggtggactgtttcttcgagacctggctacagaaggaactatgtttcctcttctagtcttccctaatccacaaaaagaagttggcagagtctcacaatcttttggtctacaaactacatctgcagacagaagtgatcattacccagctgcagatccagatggccccgtttttgagatgctgtatgagagaaatccggcgcacagccactttgagaggcggctcaatgtcagcacaaggcccttgaacatcatatacaatccgcaggccattaaaaaagtagcagactttttctacaagggaaaggttcatacctcaggttttggttatcagtctgaacttgagctgagagtggctgaagctgcccgaagacaatataacaagctgaagatgcagaccaaggcagaaatccggcaaactcttgatcgtttgctagtgggtgatttcattgaggagagtaaacgatggaccgtgcggctggatatttctgcccctcaggtgatatttcctgatgatttcaaattcaagaatcctgtgttagttgtcgtggatctaggaagaatgcttttgacgaacacccaagataactccaggaggaaaagtagggatgggtcagcatctgaagagacccagtttagtgatgatgaatataagacccccctggccacacctcctaacaccccacctcccgagtcaagcagcagcaacggagagaaaacacctcccttttctggagttgagttcagtgaagaacagcttcaagcacatttaatgagcacaaagatgtatgagaggtactcgctgtcatttatggacctccagatcatggttggacgagtgaaagacaattggaagcatgtccaggatattgacgtgggaccaacacatgtggtagagaagttcaacgttcacctacagttagagcgtcgattgatttatacttcagatcccaaatatccaggagccgtgctctcaggcaacttaccagacttaaaaatccacattaatgaagataaaatatctgcactaaagaattgctttgctctcctcaccaccccagaaatgaaaacttctgacactcagattaaagaaaagatttttccccaggaggagcagcggggaagtttgcaagactccgtaatgaatttaacccagagcattgtgttgttggagcagcatacccgcgaggttctggtggagtcgcagctcctcctggcggaatttaaagtgaactgtatgcagcttggtgttgagagcaatggccggtacatttctgtgctcaaggtgtttggtaccaatgctcactttgtgaagaggccttatgatgctgaagtctccctaactgttcatggtttgctcctggtggataccatgcagacatatggtgctgattttgaccttttgatggcttcacataagaacttgagctttgatattccaacgggaagccttcgggatagcagggcccagtctcctgtctctggaccgaatgtggcccacttaactgatggagctacactgaacgaccgatcagctactagtgtttcacttgacaaaattcttaccaaagagcaagagtcccttattaagttggaatatcagtttgtgagttcagagtgcccatcgatgaatttagacagtactcttcaggtgatttccctacaggtgaataatttagatattatcctcaatccagagacgattgtggagctaattggttttcttcaaaaatcctttcccaaggaaaaagatgatttaagtcctcaacctttaatgactgattttgaaagaagcttcagagaacaaggaacttaccagtctacatatgaacaaaacactgaggttgcagtggaaatccataggctgaacttactgcttcttcggacagtgggcatggcaaatagagagaaatatggcagaaaaattgcaactgcaagtataggtggcaccaaagttaatgtctcaatgggtagcacgtttgacatgaatggttctcttggctgtttacagcttatggatttgacacaagataacgttaaaaaccagtatgttgtcagcattgggaattctgtaggctatgaaaatatcatcagtgatattggctactttgaatctgtgtttgtcagaatggaagatgcagccctcactgaagctttgagtttcacgtttgttgagagatctaaacaggagtgttttctcaacctgaagatggcttctttacattataaccactctgctaagtttttgaaggagttgacgttatccatggatgaactggaagaaaattttcgaggtatgctgaaaagcgcagccaccaaagtcaccacagtactagctaccaagactgccgagtatagcgagatggtatcgctctttgaaactccaaggaagactcgggaaccctttatcttagaggaaaatgaaatatatgggtttgacctagcttcgtctcatttggacactgtaaagctaatcttgaacataaacattgaatcaccagttgtttctatccctcggaagccggggagtcctgagttgttggtgggacacttgggacagatattcatccagaattttgtggcgggagatgatgaatccagaagtgaccgtctgcaggtggaaatcaaggacattaaactgtattctttgaattgcacccagttggcaggtagagaagctgttgggtctgaaggaagccggatgttttgcccaccttccgggtctggcagtgccaacagtcaggaggaagctcatttcacacgacatgatttctttgaatctttgcatagaggtcaagcttttcacatcctgaacaacaccaccattcagtttaaactggagaagatccctatagagagagaatctgaattgactttttctcttagcccagatgacctgggaacttctagcatcatgaagattgaaggaaaatttgtcaatccagttcaggtggtgttagcaaagcatgtatatgagcaggttttacaaaccctggacaatctcgtgtacagtgaagatctgaataagtatccagccagtgctacctcctccccttgccctgattctcctctgcctcccctcagtacctgtggagaatcttctgttgaaaggaaggagaatggattgttcagccactccagcctttctaacacctctcagaagtcattgtcagtgaaggaagtcaaatcctttactcagattcaagccaccttttgtatatcagagcttcaggttcagctaagtggagatctgactttgggggcccaaggtcttgtgagcttaaagtttcaggactttgaggtggaattcagtaaagaccatccccagactttatctattcagattgccctgcattctctgctgatggaggacttattggagaagaatccagattctaaatataagaacctgatggtgtctcgaggagcccctaagccatctagtttagcacaaaaagaatacctttctcagtcttgcccctcagtgtccaatgtggaatatcctgatatgcctcggtctctcccttcccacatggaagaagctcctaatgtcttccagttgtatcaaaggcccacctctgcgtcccggaaaaagcaaaaggaagtccaagacaaggactatcccttgaccccacctccttctccaacagtggatgagcccaagatacttgttggaaagagtaaatttgatgattccttagtccacatcaacatattcttggtagataagaaacatccagaattctcttccagttacaatcgagttaaccggagcattgatgttgattttaattgcttggatgtgctgatcacactgcaaacctgggttgtgatattagacttttttggaatcggctccactgcagacaaccacgcaatgaggctgcctcctgagggcattctgcacaacgtgaagttggagccacatgcctccatggagtctggacttcaggatccagtgaacaccaaactggatctcaaggttcattcactttctctagtgctgaataagaccaccagtgagcttgccaaagcaaatgtgtccaaattagtagcacacctggaaatgattgagggagacctggccttacagggcagcattgggagtctgtctctaagtgacctcacatgccatggagagttctacagagaacggttcactaccagtggtgaagaagcactcatcttccagacttttaaatacggacggcctgaccctctgctccggagagaacacgacattcgcgtgagcctccggatggcctctgtgcagtatgtgcatactcagcgtttccaggcagaggtggtggccttcattcagcatttcactcagctgcaggatgtcttagggcgccagcgagctgctattgaggggcagacggtgagagatcaagcccagcgctgttcacgggttctcctggatattgaggctggtgctcccgttctcttgatcccagaaagttccagatcaaataatctgattgtagcaaatttggggaagttgaaagtcaaaaataagtttctgtttgctggttttcctggcaccttttccctacaagataaggaatctgtgccttcagcttccccaacgggtattcccaaacacagtctgaggaaaacgacaagcacggaggagcccaggggaacccattcccaggggcagttcacgatgcctcttgctggaatgagcctaggaagcctgaagagtgagtttgtgcccagtacctccaccaagcagcaagggccgcaacccacactgtctgttggccaagagtccagtagtccagaagaccatgtctgcctgctggattgcgttgtcgtggatctccaggacatggacatctttgctgcagagagacatccgagagaatactcgaaggcaccagaggatagtagtggagatctgatcttcccttcctattttgtgcgacagacaggaggaagcctcttaaccgagccttgtaggctgaaattgcaggtggaaaggaatttggacaaagaaataagtcatactgtgccagacatatctatccatggcaatctctcctcagtccactgctctctggatctgtataaatacaagctgatccgcggcttattagagaacaacctgggagaacccatagaggaatttatgcggccttatgatttacaagatccaagaattcatactgtcctgagtggagaagtgtacacctgtatgtgcttcctcattgatatggtgaatgtaagtctggagcttaaagatccaaaaagaaaagaaggtgctgggtccctagccagatttgacttcaagaaatgcaaactgctctatgaaagtttttccaaccaaaccaagtccattaacttggtttcccattccatgatggcttttgacacccgttatgctgggcagaagaccagccctggcatgacgaatgtgttcagctgtatctttcagcccgctaagaacagcagcaccacccaagggtccattcagattgaactacatttcagatctaccaaggattcctcctgctttacagtagttctcaacaatctccgtgtgtttctcatatttgactggctactgttagtccatgattttctccacactcccagtgatattaagaaacaaaatcatgttactccttctcgccaccgtaactctagcagcgaatctgctatagttcccaaaactgtgaagagtggagtagttaccaagcggtcttcccttcctgtgtccaatgaaaggcacctggaggtcaaggtcaatgtaacaggtacggagtttgtggtcattgaagatgtgtcctgcttcgacaccaatgccattattctgaaaggcaccacagtgctcacctataagccccggtttgttgatcgccccttttcaggaagtttgtttggcattgaggtgttttcatgccgactagggaatgagcatgatacagctctttcaattgtggatcccgtacaaattcaaatggagttggtggggaattcttcttatcaaaatagttcaggattgatggatgcattcaatagtgaagatttcccacctgtcctggagattcagttacaagccctggatatcagactctcctataatgatgttcagctgtttcttgccattgcaaaatccatcccagagcaagctaatgctgcagtgccagactcagtggccctggagtcagactccgttggcacttaccttccaggtgcatctcgcgttggagaggaaatcagagaagggacaagacacaccttagatcctgtcttggagttacagctggctaggctgcaggagctgggattcagcatggatgattgtcgcaaagctcttttggcgtgtcaaggccaattgaaaaaggcagcaagttggttgtttaagaatgcggaacctctgaagtctctttccttggcctccaccagccgagatagcccaggggctgtggcagcgccattgatctctggcgtggagatcaaagctgagagtgtgtgcatctgtttcatcgatgactgcatggattgtgatgttcctctcgctgaactcaccttttcccgtctgaattttcttcagcgtgtaagaactagccctgaaggctatgcccacttcaccctttctggagattattataaccgtgctctttcaggctgggagccatttattgagccttggccatgctctgtatcctggcaacagcaggcagctagtcgtctccatcctcctcgactgaagctagaagccaaggccaaacctcgtttggatatcaatatcacttctgtgctaattgaccagtatgtaagtaccaaggaatcgtggatggcagattactgtaaagatgacaaggacatagagtcagctaaatcagaagactggatgggctcttcggtggatcctccatgttttggacaaagcctcccccttgtctaccttagaactaggagtacagccagtctgactaacctagagcaccagatctatgctagagcagaggtgaaaacccccaagcgccggcagccctttgtcccctttgctctgaggaaccacacggggtgcactttgtggtttgccaccctgaccaccacacccaccagagctgcactctctcacagtgggagtccaggggtagttccagaagggaacggaacatttctcgatgatactcacaatgttagtgaatggcgagaagtccttacaggtgaagagattccctttgaatttgaagcaagaggaaagttaagacacagacacacccatgacctccggattcatcaactgcaagtgagagtaaatggctgggagcaagtgagcccagtgtctgtggacaaagtcgggaccttttttcgatatgcagcaccagataaaaattcatcttcctctacgattggcagcccaagcagcagaacaaatattatacatccccaggtttatttctcttcactcccaccagtgcgggtggtctttgcagtgactatggaaggcagtgcacggaaagtcatcactgtccggtcagccctcattgtgaggaacagacttgagacaccaatggaactaagactggatagcccatcagctccagacaagccagtggtgcttcctgctatcatgccaggggattcgtttgctgtgcctttacacctcacttcttggcggctacaggcccggcccaaaggattgggtgtatttttctgtaaggctcccattcattggaccaatgtagtgaagactgcagaaattagtagcagtaaacgagagtgccactctatggacacagaaaaaagccgatttttcaggttttgtgtggctataaagaaagagaattatccagattatatgccctcaaacatattttctgacagtgcaaaacagattttcagacagcctgggcataccatatatctcctgccaactgtggtaatctgcaacttgctaccctgtgaacttgatttttatgttaaaggaatgccaattaatgggacgctgaaacctggcaaggaggcagctctccatacagctgatacatcccagaacattgagctgggggtatcactggagaatttccccctctgtaaagaattgctcattccacctggaacccaaaactatatggtgagaatgcgactctatgacgtcaaccgtcggcagctgaacctcaccatccggattgtgtgtcgagcagaaggatccttaaagatcttcatttctgctccatattggctgattaacaaaacagggttgccactgatcttcagacaggacaatgccaagacagatgctgcaggccagtttgaggagcatgagctggcccgtagcctgagtcctctcttattctgctatgctgacaaagagcagccaaacctctgcacgatgagaatcggaagggggattcatccagaaggcatgccgggctggtgtcagggcttctccctggatggtggtagtggtgtccgagctttgaaagtcatccagcaaggaaaccgcccagggctgatctataacattggtattgatgtcaagaaaggccgaggtcgatacattgatacctgcatggtcatctttgccccccgttacctgttagataataaatcatctcacaagcttgcatttgcacagagggaatttgccaggggacagggaacagccaatcccgaaggttacatttccacccttcctggttccagtgtggtgttccactggcctcggaatgactatgatcagctattgtgtgtcagactgatggacgttcccaattgtatttggtctggaggctttgaagtcaacaagaataattccttccatatcaacatgagggataccttgggaaaatgcttcttcctacgagtggaaattactctccgaggagctacgtataggatctcatttagtgacacagatcagttacctcctcctttccgaattgacaacttttctaaggtcccggttgtctttactcagcatggcgtagctgaacccaggctccggactgaagtgaagcccatgacttcattggattatgcctgggacgaacccaccttgccaccttttatcactctgactgttaaaggggcagggtcctctgagatcaactgcaacatgaatgatttccaggataatcggcagctttattatgaaaatttcatttacattgctgctacatatacattctctggcttgcaggagggaacaggcaggcctgtggcttccaacaaggccattacctgtgcggagctcgttttggatgtctcacccaagacacaaagagtcattttaaaaaagaaggaaccaggaaagcgttctcagctgtggaggatgacaggaacaggaatgctggcccatgagggctcctcagttcctcacaatcccaataagccctcagccgcccgctccaccgaggggtctgccatcttagatattgctggtctcgctgcagtgactgacaacagatacgagccactgatgctgagaaagcctgaccgcaggcgaagcacaactcagacgtggagtttccgagaaggaaaactgacctgtgggttacatgggttggtcgtccaggccaaaggaggactttctggtttgtttgatggagctgaagttgttcttggtcctgacacttccatggagcttttggggccagttccacctgaacaacaatttattaatcaaaaaatgagacctggttctggaatgttatccatcagagtcatcccagatggaccaactagagcactccagataacagatttctgccaccggaaaagcagccgttcatatgaagtggatgaacttcctgtcaccgaacaagagctgcagaaattaaagaatccagatacagagcaggaattggaagtgcttgtgaggttagaaggtggaattgggttgtccttaattaataaagtcccagaagaactggtctttgcaagtcttacaggaatcaatgtgcactatacacagctggcaaccagtcacatgcttgaactcagcatacaggatgtacaggtggacaatcagctcattggtaccacgcagcccttcatgctctatgtgactcccctgagcaatgagaatgaggtcatcgagaccggcccagctgtgcaagtcaacgcagtgaagttccccagtaagagtgcactgaccaacatctacaagcatctgatgatcacagctcagagattcacagtgcaaattgaggagaaactgctcctcaagctgctaagtttctttggctacgatcaagcagaatcagaggtggaaaaatatgatgaaaacctccatgaaaagacagctgagcaaggtggaacaccaattcgatactactttgaaaatctcaaaatcagcattcctcagatcaagctaagtgtgttcacctccaacaagctcccattggatcttaaggccctaaaaagcaccttggggtttcctttgatacggtttgaagacgctgtgattaatctagatccattcactcgggtacatccctatgagaccaaggagttcatcatcaatgatatcctcaaacatttccaggaggaactcctcagccaggcagctcgaatcctgggatcagtggattttcttggcaatcctatggggcttttgaatgatgtttctgaaggggttactggactgataaaatatggaaatgtcgggggcctcatcagaaatgttacacacggagtatcaaactctgctgccaagtttgctggaacattatcagatggcttagggaagacgatggacaatcggcatcagtcagagcgggagtacatcaggtaccatgcagccacaagtggtgaacaccttgtagccggcatccatggcctggctcatggtatcattggtggactgaccagtgttataacttcgacagtggaaggtgtgaaaacagaagggggtgtcagcggtttcatatctggccttggaaaagggcttgttggcactgtaaccaagccagtggcaggcgccctggattttgcatcagaaacagcccaggcggtgagagacacagccacactcagcggccccaggactcaagcacagagggttcggaaaccgcgttgctgcacggggccccaggggctgcttccccgatattctgagagccaggcggaaggacaggagcagctcttcaaactcacagacaacatacaggacgaattcttcatcgctgtggagaacattgacagctactgcgtgctcatctcctccaaagctgtttacttcctgaaaagtggagactacgtggatcgagaagccattttcctagaagtcaaatacgatgacctctaccactgccttgtctccaaagaccatgggaaggtgtatgtgcaggtgaccaagaaagccgtgagcacgagcagtggagtgtccatccccggcccctcccaccagaagcccatggtccatgtgaaatctgaggtccttgctgtcaagttgtcacaagaaataaactacgcaaagagcctctactatgaacagcagcttatgttaagactcagcgaaaaccgagagcagctggagctggactcctgaagccccgctgctgagatgggcgctcccgacacagcgcagacccaccaggaggaaagaggcccagctctcagctgacgatggaggcagaaccggagtcgggtttggggaagttgtcaaggaatgagggaaagtaaatcctcatgaggaaaagtacaaatggaaatcgtattaatttgtgaggcagggagttattttagattatgggaaataatttttaaaggtattggttaaataacgtttaaaaacatgtactgagatgaatctaatttttagattgccctgtattttgttaacatgtatatatgtacaacagtgtgtttgtaaatatataggaacgtttctgaacagggtctgtgctatgtgtaaaggtttgttaactgtaaagtaatataaagttatattggatcttctattgcactaattctagatgtctaattcaggatactgtctatagaaaggcattcttaaaagttaaagaatgttacgtcttagttttggagactaaagtattcccagtaaagtgggttgaggtgagggctgtggtcctgaaagggacgcctttgacatcgtggctgtccagttgggctgtgagctgtggcacccaggactggcgctggcccttcagaaggatctaggagaggggcttgggagcccacttttaatttctcacccccattttacaaagagtgcttagattcttacaaattatgatgtaagttatccatttggctttttcctaactagtcttaccaaacttagggggaaacctgtgctccattaccacatgggtgcaagtcagcattgtaagttttctcaggttattattattagagaggttggaaacattggtaaactctgttgattgagaaggaaaaaaaaagtcccattgaactgttgcaacaaatcagaaatccacataaaagtgctctcctgcctgggcagcaacaaccaagaacaaagccccgggactgttttctttttaataaagccacaggcaggcatcgtagctccacagcccgaggggacacaggatggaaaccccaggatgagaagggagcagggagagttccagaaagggggatgaaataggagtattaaaaagctgcgttggtaagtttttcatggaaccaagatttgacaaaggcatctcttatccttggttttaaattcctgctgggagcaaggcctggtatgagcgccctgggtcttgtttttggtgtttcgcttttctgtaaggattaagcagatagggagaagggaaaaggggcctcactttagaatgaatgagtcaccttgtgatttttaaatttttattttaataaagctaatcaatttctacaaccttgtcacatgtagctgagtctgggatgactcagtggatcagtggatgcgtggaaggttttggtgtttataactcatgacccaaatccttccaagacacaaatgaagctaatcttcttcccctccctttcctctcccacttcccctctgtgtctgtgtctgtgtgtgtgtgtgtgtgtgtgtgtgtgcgcgcgcgcgcgtgcatgcagagaggaaggaagggagctttagcacaagtagctacatagtgttcaaggatcagctttcttgaactccgaggcttggttgcctttgctgaactccaagttagtggattgcagaatggaaacttggcttttgcggcactgggtgagttttagtttgtgtgtgtcttgctggggggtggtgatgattgtctcagcactcacgcactgcacaagatggcagcaggatacagcactgcacaagatggcagctcctctgcagcttcctcctcagcctccctccttgcacccccacaggtttggcttgtggtttttgtcatcagtaacctactgcctgagatcatgatctcttaaaagatgagactctcggaagggttgattgtatgcgtcagtgagccttctatcaccttctggaacaaagtcacttgaaatctcttgatgagattaaggagtttagtgttactaagaaaatctgctttgggccgcagcagtgctgggtgttctcagacctgactgaggaagttagctgcgggctgccctgtgggctggtgcttcaggaggaatccagagaagtgttcagatgccccccttgggctcctttctaattttaatcagctctttaaatagctgcccatctcctgtgattgcacaaccaagcactttgacatttgcaccttaggagaggcagatgttaaaatggaatccaaagaccacctagggcggggctgggtgggagatgggagggccaactgcgagctgctccacttctcagctctcccctgccctgcagccctgggccagacaaggccagaaggtttcaggggcatttgacatcccctcctggttctcaccaggaaaacatccaaagctttggaggaaacaggccctgcccctggctccttaaatgccccgtctctttgtaaactgatattcagccagcaatgcctaagactttgttaagatcatttctactgcttttctttctgcttcaaacacacagttcgtctctgaggaaagtaaaataaatggaataagagtaaattgggtaaggagatatccaaagctacccagtcccttgacccagcacagttggccgacccgtgtcactccctggctgtcgctgcttctctgtgctcactgaagggtgagccaggccagtgcttccccagcccctgggcctggtcactacacagtggaaaacagacaagcggccccttccccaaatcccaagagtgtcttgctgcttggtgggtgctcatcgcaatgttctgaaggctccagggccactttgtttgtaagtatgatctgggcctcaaaataccatagtagctgcttgataaaattctaaaaatatctggttctctattatgtaaacactattacagtcaccagtgtgtgaagactcttgagtctggttctcatatcagagtcatcatttttcttcctgtggaataaaatgccttgtggacttcccaaaaaaaaaaaaaaa

SEQ ID NO: 2152 - DNA, 16266 bp, Homo sapiens
aggagcggcggggaggaaacgccgcgcagcgccgggctggggcgggcggcccgggacaccgacagatttttctgtgaccatgaaagagagaaataaagaatgatccatgatttctaaacaccttttcctgaggatatagtcatgttggaaggccttgtagcctgggttctcaatacctatttgggaaaatatgtcaataacctgaacactgaccagctctcagttgcacttctcaaaggtgctgttgaattagaaaacttgccattaaagaaagatgccttgaaagaattggaattaccatttgaagtcaaagctggcttcattgggaaagtaacccttcagattcccttttatcgcccccatgtggacccttgggtgatctccatctccagccttcacttaattggagccccagagaaaatacaggatttcaatgatgaaaaggagaagctgttggaaagggaacgtaagaaagcactacttcaagccctggaggagaaatggaagaatgaccgccagcagaaaggggagtcctattggtattcagttaccgcctccgtagttacaaggattgtggagaatattgaattaaaaattcaagatgtccatttacgctttgaagatggtgtcaccaatccctcccatccttttgcttttggcatctgcattaagaatgtgtccatgcaaaatgctgtgaatgagcctgtacagaaactaatgcggaaaaagcaattagacgtagcagaatttagcatctattgggatgtcgattgcactttactgggggatttgcctcagatggagttacaggaggccatggccaggagcatggagagtcgcagccatcactacgtcctggagcctgtgtttgcatctgctcttttgaagagaaactgctccaagaagcccctgcggtctcggcacagtccccgtattgattgtgatattcagctggagaccattcccttgaaactctctcagctgcaataccggcaaatcatggaattcctcaaggagctggaacgaaaggagaggcaggtgaagttccgaaggtggaaacccaaggtggcgatatctaagaactgccgagaatggtggtattttgctttgaatgctaacttgtatgagatcagagagcagaggaaacgttgcacctgggactttatgttgcaccgcgctcgtgatgctgtatcttacactgacaaatatttcaacaagttaaaaggaggcctgctgtccacagatgacaaggaggaaatgtgtcggattgaagaggaacagagctttgaggaattgaagattttgcgtgaactggttcatgatcgatttcacaaacaggaagaactagcagagagtctgcgggagcctcagtttgattctccaggagcctgtccgggagccccagaacccggtggaggcagtgggatgctgcagtatctccagtcctggtttcctggatggggtggctggtacgggcagcagaccccagaagggaatgtggttgagggactgtcagcagagcaacaggagcagtggattcctgaagagatcctgggcactgaggagttttttgaccccactgcagatgcctcgtgtatgaacacgtatacaaagcgagatcatgtctttgccaaactgaatttgcagttgcagcgaggtacagtgactctgttacacaaggagcaaggaactcctcaaatgaatgaaagtgctttcatgcagctcgagttttcagatgtaaaacttctagcagagtctcttcctcgaagaaattcctcgttgctttcagtccggttgggtggactgtttcttcgagacctggctacagaaggaactatgtttcctcttctagtcttccctaatccacaaaaagaagttggcagagtctcacaatcttttggtctacaaactacatctgcagacagaagtgatcattacccagctgcagatccagatggccccgtttttgagatgctgtatgagagaaatccggcgcacagccactttgagaggcggctcaatgtcagcacaaggcccttgaacatcatatacaatccgcaggccattaaaaaagtagcagactttttctacaagggaaaggttcatacctcaggttttggttatcagtctgaacttgagctgagagtggctgaagctgcccgaagacaatataacaagctgaagatgcagaccaaggcagaaatccggcaaactcttgatcgtttgctagtgggtgatttcattgaggagagtaaacgatggaccgtgcggctggatatttctgcccctcaggtgatatttcctgatgatttcaaattcaagaatcctgtgttagttgtcgtggatctaggaagaatgcttttgacgaacacccaagataactccaggaggaaaagtagggatgggtcagcatctgaagagacccagtttagtgatgatgaatataagacccccctggccacacctcctaacaccccacctcccgagtcaagcagcagcaacggagagaaaacacctcccttttctggagttgagttcagtgaagaacagcttcaagcacatttaatgagcacaaagatgtatgagaggtactcgctgtcatttatggacctccagatcatggttggacgagtgaaagacaattggaagcatgtccaggatattgacgtgggaccaacacatgtggtagagaagttcaacgttcacctacagttagagcgtcgattgatttatacttcagatcccaaatatccaggagccgtgctctcaggcaacttaccagacttaaaaatccacattaatgaagataaaatatctgcactaaagaattgctttgctctcctcaccaccccagaaatgaaaacttctgacactcagattaaagaaaagatttttccccaggaggagcagcggggaagtttgcaagactccgtaatgaatttaacccagagcattgtgttgttggagcagcatacccgcgaggttctggtggagtcgcagctcctcctggcggaatttaaagtgaactgtatgcagcttggtgttgagagcaatggccggtacatttctgtgctcaaggtgtttggtaccaatgctcactttgtgaagaggccttatgatgctgaagtctccctaactgttcatggtttgctcctggtggataccatgcagacatatggtgctgattttgaccttttgatggcttcacataagaacttgagctttgatattccaacgggaagccttcgggatagcagggcccagtctcctgtctctggaccgaatgtggcccacttaactgatggagctacactgaacgaccgatcagctactagtgtttcacttgacaaaattcttaccaaagagcaagagtcccttattaagttggaatatcagtttgtgagttcagagtgcccatcgatgaatttagacagtactcttcaggtgatttccctacaggtgaataatttagatattatcctcaatccagagacgattgtggagctaattggttttcttcaaaaatcctttcccaaggaaaaagatgatttaagtcctcaacctttaatgactgattttgaaagaagcttcagagaacaaggaacttaccagtctacatatgaacaaaacactgaggttgcagtggaaatccataggctgaacttactgcttcttcggacagtgggcatggcaaatagagagaaatatggcagaaaaattgcaactgcaagtataggtggcaccaaagttaatgtctcaatgggtagcacgtttgacatgaatggttctcttggctgtttacagcttatggatttgacacaagataacgttaaaaaccagtatgttgtcagcattgggaattctgtaggctatgaaaatatcatcagtgatattggctactttgaatctgtgtttgtcagaatggaagatgcagccctcactgaagctttgagtttcacgtttgttgagagatctaaacaggagtgttttctcaacctgaagatggcttctttacattataaccactctgctaagtttttgaaggagttgacgttatccatggatgaactggaagaaaattttcgaggtatgctgaaaagcgcagccaccaaagtcaccacagtactagctaccaagactgccgagtatagcgagatggtatcgctctttgaaactccaaggaagactcgggaaccctttatcttagaggaaaatgaaatatatgggtttgacctagcttcgtctcatttggacactgtaaagctaatcttgaacataaacattgaatcaccagttgtttctatccctcggaagccggggagtcctgagttgttggtgggacacttgggacagatattcatccagaattttgtggcgggagatgatgaatccagaagtgaccgtctgcaggtggaaatcaaggacattaaactgtattctttgaattgcacccagttggcaggtagagaagctgttgggtctgaaggaagccggatgttttgcccaccttccgggtctggcagtgccaacagtcaggaggaagctcatttcacacgacatgatttctttgaatctttgcatagaggtcaagcttttcacatcctgaacaacaccaccattcagtttaaactggagaagatccctatagagagagaatctgaattgactttttctcttagcccagatgacctgggaacttctagcatcatgaagattgaaggaaaatttgtcaatccagttcaggtggtgttagcaaagcatgtatatgagcaggttttacaaaccctggacaatctcgtgtacagtgaagatctgaataagtatccagccagtgctacctcctccccttgccctgattctcctctgcctcccctcagtacctgtggagaatcttctgttgaaaggaaggagaatggattgttcagccactccagcctttctaacacctctcagaagtcattgtcagtgaaggaagtcaaatcctttactcagattcaagccaccttttgtatatcagagcttcaggttcagctaagtggagatctgactttgggggcccaaggtcttgtgagcttaaagtttcaggactttgaggtggaattcagtaaagaccatccccagactttatctattcagattgccctgcattctctgctgatggaggacttattggagaagaatccagattctaaatataagaacctgatggtgtctcgaggagcccctaagccatctagtttagcacaaaaagaatacctttctcagtcttgcccctcagtgtccaatgtggaatatcctgatatgcctcggtctctcccttcccacatggaagaagctcctaatgtcttccagttgtatcaaaggcccacctctgcgtcccggaaaaagcaaaaggaagtccaagacaaggactatcccttgaccccacctccttctccaacagtggatgagcccaagatacttgttggaaagagtaaatttgatgattccttagtccacatcaacatattcttggtagataagaaacatccagaattctcttccagttacaatcgagttaaccggagcattgatgttgattttaattgcttggatgtgctgatcacactgcaaacctgggttgtgatattagacttttttggaatcggctccactgcagacaaccacgcaatgaggctgcctcctgagggcattctgcacaacgtgaagttggagccacatgcctccatggagtctggacttcaggatccagtgaacaccaaactggatctcaaggttcattcactttctctagtgctgaataagaccaccagtgagcttgccaaagcaaatgtgtccaaattagtagcacacctggaaatgattgagggagacctggccttacagggcagcattgggagtctgtctctaagtgacctcacatgccatggagagttctacagagaacggttcactaccagtggtgaagaagcactcatcttccagacttttaaatacggacggcctgaccctctgctccggagagaacacgacattcgcgtgagcctccggatggcctctgtgcagtatgtgcatactcagcgtttccaggcagaggtggtggccttcattcagcatttcactcagctgcaggatgtcttagggcgccagcgagctgctattgaggggcagacggtgagagatcaagcccagcgctgttcacgggttctcctggatattgaggctggtgctcccgttctcttgatcccagaaagttccagatcaaataatctgattgtagcaaatttggggaagttgaaagtcaaaaataagtttctgtttgctggttttcctggcaccttttccctacaagataaggaatctgtgccttcagcttccccaacgggtattcccaaacacagtctgaggaaaacgacaagcacggaggagcccaggggaacccattcccaggggcagttcacgatgcctcttgctggaatgagcctaggaagcctgaagagtgagtttgtgcccagtacctccaccaagcagcaagggccgcaacccacactgtctgttggccaagagtccagtagtccagaagaccatgtctgcctgctggattgcgttgtcgtggatctccaggacatggacatctttgctgcagagagacatccgagagaatactcgaaggcaccagaggatagtagtggagatctgatcttcccttcctattttgtgcgacagacaggaggaagcctcttaaccgagccttgtaggctgaaattgcaggtggaaaggaatttggacaaagaaataagtcatactgtgccagacatatctatccatggcaatctctcctcagtccactgctctctggatctgtataaatacaagctgatccgcggcttattagagaacaacctgggagaacccatagaggaatttatgcggccttatgatttacaagatccaagaattcatactgtcctgagtggagaagtgtacacctgtatgtgcttcctcattgatatggtgaatgtaagtctggagcttaaagatccaaaaagaaaagaaggtgctgggtccctagccagatttgacttcaagaaatgcaaactgctctatgaaagtttttccaaccaaaccaagtccattaacttggtttcccattccatgatggcttttgacacccgttatgctgggcagaagaccagccctggcatgacgaatgtgttcagctgtatctttcagcccgctaagaacagcagcaccacccaagggtccattcagattgaactacatttcagatctaccaaggattcctcctgctttacagtagttctcaacaatctccgtgtgtttctcatatttgactggctactgttagtccatgattttctccacactcccagtgatattaagaaacaaaatcatgttactccttctcgccaccgtaactctagcagcgaatctgctatagttcccaaaactgtgaagagtggagtagttaccaagcggtcttcccttcctgtgtccaatgaaaggcacctggaggtcaaggtcaatgtaacaggtacggagtttgtggtcattgaagatgtgtcctgcttcgacaccaatgccattattctgaaaggcaccacagtgctcacctataagccccggtttgttgatcgccccttttcaggaagtttgtttggcattgaggtgttttcatgccgactagggaatgagcatgatacagctctttcaattgtggatcccgtacaaattcaaatggagttggtggggaattcttcttatcaaaatagttcaggattgatggatgcattcaatagtgaagatttcccacctgtcctggagattcagttacaagccctggatatcagactctcctataatgatgttcagctgtttcttgccattgcaaaatccatcccagagcaagctaatgctgcagtgccagactcagtggccctggagtcagactccgttggcacttaccttccaggtgcatctcgcgttggagaggaaatcagagaagggacaagacacaccttagatcctgtcttggagttacagctggctaggctgcaggagctgggattcagcatggatgattgtcgcaaagctcttttggcgtgtcaaggccaattgaaaaaggcagcaagttggttgtttaagaatgcggaacctctgaagtctctttccttggcctccaccagccgagatagcccaggggctgtggcagcgccattgatctctggcgtggagatcaaagctgagagtgtgtgcatctgtttcatcgatgactgcatggattgtgatgttcctctcgctgaactcaccttttcccgtctgaattttcttcagcgtgtaagaactagccctgaaggctatgcccacttcaccctttctggagattattataaccgtgctctttcaggctgggagccatttattgagccttggccatgctctgtatcctggcaacagcaggcagctagtcgtctccatcctcctcgactgaagctagaagccaaggccaaacctcgtttggatatcaatatcacttctgtgctaattgaccagtatgtaagtaccaaggaatcgtggatggcagattactgtaaagatgacaaggacatagagtcagctaaatcagaagactggatgggctcttcggtggatcctccatgttttggacaaacagaggtgaaaacccccaagcgccggcagccctttgtcccctttgctctgaggaaccacacggggtgcactttgtggtttgccaccctgaccaccacacccaccagagctgcactctctcacagtgggagtccaggggtagttccagaagggaacggaacatttctcgatgatactcacaatgttagtgaatggcgagaagtccttacaggtgaagagattccctttgaatttgaagcaagaggaaagttaagacacagacacacccatgacctccggattcatcaactgcaagtgagagtaaatggctgggagcaagtgagcccagtgtctgtggacaaagtcgggaccttttttcgatatgcagcaccagataaaaattcatcttcctctacgattggcagcccaagcagcagaacaaatattatacatccccaggtttatttctcttcactcccaccagtgcgggtggtctttgcagtgactatggaaggcagtgcacggaaagtcatcactgtccggtcagccctcattgtgaggaacagacttgagacaccaatggaactaagactggatagcccatcagctccagacaagccagtggtgcttcctgctatcatgccaggggattcgtttgctgtgcctttacacctcacttcttggcggctacaggcccggcccaaaggattgggtgtatttttctgtaaggctcccattcattggaccaatgtagtgaagactgcagaaattagtagcagtaaacgagagtgccactctatggacacagaaaaaagccgatttttcaggttttgtgtggctataaagaaagagaattatccagattatatgccctcaaacatattttctgacagtgcaaaacagattttcagacagcctgggcataccatatatctcctgccaactgtggtaatctgcaacttgctaccctgtgaacttgatttttatgttaaaggaatgccaattaatgggacgctgaaacctggcaaggaggcagctctccatacagctgatacatcccagaacattgagctgggggtatcactggagaatttccccctctgtaaagaattgctcattccacctggaacccaaaactatatggtgagaatgcgactctatgacgtcaaccgtcggcagctgaacctcaccatccggattgtgtgtcgagcagaaggatccttaaagatcttcatttctgctccatattggctgattaacaaaacagggttgccactgatcttcagacaggacaatgccaagacagatgctgcaggccagtttgaggagcatgagctggcccgtagcctgagtcctctcttattctgctatgctgacaaagagcagccaaacctctgcacgatgagaatcggaagggggattcatccagaaggcatgccgggctggtgtcagggcttctccctggatggtggtagtggtgtccgagctttgaaagtcatccagcaaggaaaccgcccagggctgatctataacattggtattgatgtcaagaaaggccgaggtcgatacattgatacctgcatggtcatctttgccccccgttacctgttagataataaatcatctcacaagcttgcatttgcacagagggaatttgccaggggacagggaacagccaatcccgaaggttacatttccacccttcctggttccagtgtggtgttccactggcctcggaatgactatgatcagctattgtgtgtcagactgatggacgttcccaattgtatttggtctggaggctttgaagtcaacaagaataattccttccatatcaacatgagggataccttgggaaaatgcttcttcctacgagtggaaattactctccgaggagctacgtataggatctcatttagtgacacagatcagttacctcctcctttccgaattgacaacttttctaaggtcccggttgtctttactcagcatggcgtagctgaacccaggctccggactgaagtgaagcccatgacttcattggattatgcctgggacgaacccaccttgccaccttttatcactctgactgttaaaggggcagggtcctctgagatcaactgcaacatgaatgatttccaggataatcggcagctttattatgaaaatttcatttacattgctgctacatatacattctctggcttgcaggagggaacaggcaggcctgtggcttccaacaaggccattacctgtgcggagctcgttttggatgtctcacccaagacacaaagagtcattttaaaaaagaaggaaccaggaaagcgttctcagctgtggaggatgacaggaacaggaatgctggcccatgagggctcctcagttcctcacaatcccaataagccctcagccgcccgctccaccgaggggtctgccatcttagatattgctggtctcgctgcagtgactgacaacagatacgagccactgatgctgagaaagcctgaccgcaggcgaagcacaactcagacgtggagtttccgagaaggaaaactgacctgtgggttacatgggttggtcgtccaggccaaaggaggactttctggtttgtttgatggagctgaagttgttcttggtcctgacacttccatggagcttttggggccagttccacctgaacaacaatttattaatcaaaaaatgagacctggttctggaatgttatccatcagagtcatcccagatggaccaactagagcactccagataacagatttctgccaccggaaaagcagccgttcatatgaagtggatgaacttcctgtcaccgaacaagagctgcagaaattaaagaatccagatacagagcaggaattggaagtgcttgtgaggttagaaggtggaattgggttgtccttaattaataaagtcccagaagaactggtctttgcaagtcttacaggaatcaatgtgcactatacacagctggcaaccagtcacatgcttgaactcagcatacaggatgtacaggtggacaatcagctcattggtaccacgcagcccttcatgctctatgtgactcccctgagcaatgagaatgaggtcatcgagaccggcccagctgtgcaagtcaacgcagtgaagttccccagtaagagtgcactgaccaacatctacaagcatctgatgatcacagctcagagattcacagtgcaaattgaggagaaactgctcctcaagctgctaagtttctttggctacgatcaagcagaatcagaggtggaaaaatatgatgaaaacctccatgaaaagacagctgagcaaggtggaacaccaattcgatactactttgaaaatctcaaaatcagcattcctcagatcaagctaagtgtgttcacctccaacaagctcccattggatcttaaggccctaaaaagcaccttggggtttcctttgatacggtttgaagacgctgtgattaatctagatccattcactcgggtacatccctatgagaccaaggagttcatcatcaatgatatcctcaaacatttccaggaggaactcctcagccaggcagctcgaatcctgggatcagtggattttcttggcaatcctatggggcttttgaatgatgtttctgaaggggttactggactgataaaatatggaaatgtcgggggcctcatcagaaatgttacacacggagtatcaaactctgctgccaagtttgctggaacattatcagatggcttagggaagacgatggacaatcggcatcagtcagagcgggagtacatcaggtaccatgcagccacaagtggtgaacaccttgtagccggcatccatggcctggctcatggtatcattggtggactgaccagtgttataacttcgacagtggaaggtgtgaaaacagaagggggtgtcagcggtttcatatctggccttggaaaagggcttgttggcactgtaaccaagccagtggcaggcgccctggattttgcatcagaaacagcccaggcggtgagagacacagccacactcagcggccccaggactcaagcacagagggttcggaaaccgcgttgctgcacggggccccaggggctgcttccccgatattctgagagccaggcggaaggacaggagcagctcttcaaactcacagacaacatacaggacgaattcttcatcgctgtggagaacattgacagctactgcgtgctcatctcctccaaagctgtttacttcctgaaaagtggagactacgtggatcgagaagccattttcctagaagtcaaatacgatgacctctaccactgccttgtctccaaagaccatgggaaggtgtatgtgcaggtgaccaagaaagccgtgagcacgagcagtggagtgtccatccccggcccctcccaccagaagcccatggtccatgtgaaatctgaggtccttgctgtcaagttgtcacaagaaataaactacgcaaagagcctctactatgaacagcagcttatgttaagactcagcgaaaaccgagagcagctggagctggactcctgaagccccgctgctgagatgggcgctcccgacacagcgcagacccaccaggaggaaagaggcccagctctcagctgacgatggaggcagaaccggagtcgggtttggggaagttgtcaaggaatgagggaaagtaaatcctcatgaggaaaagtacaaatggaaatcgtattaatttgtgaggcagggagttattttagattatgggaaataatttttaaaggtattggttaaataacgtttaaaaacatgtactgagatgaatctaatttttagattgccctgtattttgttaacatgtatatatgtacaacagtgtgtttgtaaatatataggaacgtttctgaacagggtctgtgctatgtgtaaaggtttgttaactgtaaagtaatataaagttatattggatcttctattgcactaattctagatgtctaattcaggatactgtctatagaaaggcattcttaaaagttaaagaatgttacgtcttagttttggagactaaagtattcccagtaaagtgggttgaggtgagggctgtggtcctgaaagggacgcctttgacatcgtggctgtccagttgggctgtgagctgtggcacccaggactggcgctggcccttcagaaggatctaggagaggggcttgggagcccacttttaatttctcacccccattttacaaagagtgcttagattcttacaaattatgatgtaagttatccatttggctttttcctaactagtcttaccaaacttagggggaaacctgtgctccattaccacatgggtgcaagtcagcattgtaagttttctcaggttattattattagagaggttggaaacattggtaaactctgttgattgagaaggaaaaaaaaagtcccattgaactgttgcaacaaatcagaaatccacataaaagtgctctcctgcctgggcagcaacaaccaagaacaaagccccgggactgttttctttttaataaagccacaggcaggcatcgtagctccacagcccgaggggacacaggatggaaaccccaggatgagaagggagcagggagagttccagaaagggggatgaaataggagtattaaaaagctgcgttggtaagtttttcatggaaccaagatttgacaaaggcatctcttatccttggttttaaattcctgctgggagcaaggcctggtatgagcgccctgggtcttgtttttggtgtttcgcttttctgtaaggattaagcagatagggagaagggaaaaggggcctcactttagaatgaatgagtcaccttgtgatttttaaatttttattttaataaagctaatcaatttctacaaccttgtcacatgtagctgagtctgggatgactcagtggatcagtggatgcgtggaaggttttggtgtttataactcatgacccaaatccttccaagacacaaatgaagctaatcttcttcccctccctttcctctcccacttcccctctgtgtctgtgtctgtgtgtgtgtgtgtgtgtgtgtgtgtgcgcgcgcgcgcgtgcatgcagagaggaaggaagggagctttagcacaagtagctacatagtgttcaaggatcagctttcttgaactccgaggcttggttgcctttgctgaactccaagttagtggattgcagaatggaaacttggcttttgcggcactgggtgagttttagtttgtgtgtgtcttgctggggggtggtgatgattgtctcagcactcacgcactgcacaagatggcagcaggatacagcactgcacaagatggcagctcctctgcagcttcctcctcagcctccctccttgcacccccacaggtttggcttgtggtttttgtcatcagtaacctactgcctgagatcatgatctcttaaaagatgagactctcggaagggttgattgtatgcgtcagtgagccttctatcaccttctggaacaaagtcacttgaaatctcttgatgagattaaggagtttagtgttactaagaaaatctgctttgggccgcagcagtgctgggtgttctcagacctgactgaggaagttagctgcgggctgccctgtgggctggtgcttcaggaggaatccagagaagtgttcagatgccccccttgggctcctttctaattttaatcagctctttaaatagctgcccatctcctgtgattgcacaaccaagcactttgacatttgcaccttaggagaggcagatgttaaaatggaatccaaagaccacctagggcggggctgggtgggagatgggagggccaactgcgagctgctccacttctcagctctcccctgccctgcagccctgggccagacaaggccagaaggtttcaggggcatttgacatcccctcctggttctcaccaggaaaacatccaaagctttggaggaaacaggccctgcccctggctccttaaatgccccgtctctttgtaaactgatattcagccagcaatgcctaagactttgttaagatcatttctactgcttttctttctgcttcaaacacacagttcgtctctgaggaaagtaaaataaatggaataagagtaaattgggtaaggagatatccaaagctacccagtcccttgacccagcacagttggccgacccgtgtcactccctggctgtcgctgcttctctgtgctcactgaagggtgagccaggccagtgcttccccagcccctgggcctggtcactacacagtggaaaacagacaagcggccccttccccaaatcccaagagtgtcttgctgcttggtgggtgctcatcgcaatgttctgaaggctccagggccactttgtttgtaagtatgatctgggcctcaaaataccatagtagctgcttgataaaattctaaaaatatctggttctctattatgtaaacactattacagtcaccagtgtgtgaagactcttgagtctggttctcatatcagagtcatcatttttcttcctgtggaataaaatgccttgtggacttcccaaaaaaaaaaaaaaa

SEQ ID NO: 2153 - DNA, 3908 bp, Homo sapiens
cccctcgtttctccctccccgcctcctccgcagaagccgagcgccaaactcaaactttatcaggacccggacctctcaggctaatcccgagggccgggcctgttgggcttttctgcacaccagccgaggcagcgagccaacatgagccaagtgctgttccaccaactagtcccgttgcaggtgaaatgcaaagactgtgaggagaggagagtaagtataagaatgagcattgaactacaatcagtttctaatccagttcacagaaaggacttagttattcgtctgactgatgacacggatccattttttttatataaccttgttatatctgaggaagattttcaaagtttaaaattccagcaaggtcttctggtagacttcttagctttcccacaaaaatttatagatctccttcagcaatgtactcaagaacatgccaaagaaattccaaggtttttgctacagttagtttctccagcagctattttggataactcacctgcatttttaaatgtggtagagacaaatccttttaagcatcttacacacctctcactaaaacttttacctggaaatgatgtggagataaagaaatttctcgcaggctgtttgaaatgtagcaaggaagaaaaattatcattgatgcaatcactagatgatgctactaagcaactggactttacacgaaagacattagcagaaaaaaaacaagaattagataagttacggaatgaatgggcgtcacatacagcagccttgacaaacaagcattctcaggaactgacaaatgaaaaggaaaaagccttgcaggcacaggttcaatatcaacagcagcatgaacaacagaaaaaagatttagaaatcctccatcaacaaaacatccaccagctacaaaacagactgtctgagttagaagcggctaataaagacttaaccgaaagaaaatataaaggagactccactattagagaacttaaagcaaaactttctggtgttgaagaggagctacagcggactaagcaagaagtcctctctttgcgaagagagaattctacactagatgttgaatgccacgagaaagaaaagcacgttaatcagctacaaacaaaagtggcagttttagaacaggaaatcaaggataaggaccagcttgttttaagaacaaaagaggcatttgatacaatccaggaacaaaaggtggttttagaagaaaatggtgagaaaaatcaagtacaactaggaaagcttgaagctacaataaaatcattatctgcagaacttctgaaggcaaatgaaattatcaagaagttacaaggggatctgaaaactttaatgggtaagttgaaattgaagaatacagttactattcagcaagaaaaactcttggctgagaaggaggaaaaattacaaaaggaacaaaaggaattacaagatgttggacagtctcttcgaattaaagagcaagaggtatgcaaattacaagaacaattagaagctacagttaaaaaacttgaagaaagcaaacaacttctaaaaaataatgaaaagttaatcacgtggttaaataaagaactaaatgaaaatcagctagtgagaaagcaagatgtattgggaccttctactactccgcctgcacattccagcagcaacacaatcagaagtggaatttctcctaacctgaatgtggttgatggtagactgacttacccaacctgtgggattggttatcctgtctcctctgcatttgcattccagaataccttccctcattcgatatctgccaaaaataccagccaccctggttcaggaacaaaggttcagtttaatttgcagtttacaaaaccaaatgcatcactaggagatgttcagtcaggagcaactattagtatgccttgctcaactgataaggaaaatggtgaaaatgtagggttggaatccaaatacctgaagaaaagggaagatagcattcctttacgcggactcagccagaacctatttagtaattcagaccatcagagagatggcactttaggagcattacatacatcttccaaacccacagcgctcccctctgcgtcttcagcctatttccctgggcagttaccaaacagttaattctagtgtcatgttttactttttattggtattttagaaactcaggtgcttaaaaaatatgtcaacacaaaccagatcctcaaatagcaagtttcaaattttacttgagctgttaaagactggatactttaagtactgcttttatggcagtttataatataggaacaaatttgtacttggggattggtaaagattgtgagtaaatgacattttttggtttgtgaacatggcgttttatagaataatatgaattttattaagctattctttagaaattcagttctaaggaaagagttgatccttatgagggagattctgatcatattaaaaatctgggtaaactaaaacctgctcataacctcatagtatgcaaccaaagaatactaattcattttatcactttcattggtaaaacttttaaattcaacacctgaaaatcatgagggaaaatgattacctcttgagatatattattgatgacatttaaagggaaaagtcctaaatttaccttaaataactgaaatgaattaagccttcatagcgtattttccttgaagcatttaaatttgctagtgatgaatcaaataaatttgatatacttaaaataatttggacagtttttatgtgaccagattaagtgcttttgtcatttgagctgacaagtttttaaaacttcagtgcttcctaaatgtttatactcatctagtttttctcaatttgtagttttattatgcagttaaatctgtatcagtggacttttaaaacttggtactactactaaatctactatatcatgaatattcatttatttttatagtatcagaacttgggttgatttcaatgttaataaactaggcaaaacaaataactgttagaaggtacaattttcttctcttccctgtaactgaaagttttaagaattgttccttggggaaaaatttttttaaaattcacctagaatcatagggcctcattttgttttcttattgacaaacaatacctggtagcattctctaaagagtcttctagatcaatttttataaagtactaatgctcatgtgataatttaaaattattttcaactactttattacacagatgaagaaacatttcaagatattgatgtaataacattactgagtcccatggtaagaaagaatctttgctaattttttttttttttttacgaagccagtatcttgaaactattggcaattgcaagtgtctttaaactagggatctaatctgaaaattcagtaactaatattaggcagttgatactcccccacctcccccatttagatacactactgtattagtgagaatacttggtacagtaacttgaaagcacttgctattctggaaagaagcctcttggtgattttggaaggagctttattgtaaatactatggaaggggctttgttgtaaatactatgtaatatatataaaatattgtgacatgttttggatgggatgcatgacatacaggtagctctcttttttaaaatataggtatctctttgcatatatatacacaaggaaagttgaattttcaggagagatcattctgatatcttgcaaatttgtattaaatgtatacagacttccaagtgtgctaattctttacctcctaaacttttagttgcaattgttttgcagtgtaaaattgtacatgtgttaataatcaaaaagtgttgcatttaatgttatttctgtaaactttgagctttgttaataaactattatgcagcatctacactttgaaaatcttgtacttcaaaaaaaaaaaaa

SEQ ID NO: 2154 - DNA, 2690 bp, Homo sapiens
gggggtggagggcccgggcgctcgggcctcaccagcccgagccaacttgcgctagagtcgggcccgccccctaaggggttaatccttttctcatgttaccgagcggcttataaggagggggaggccaagcctccgccttattgggagcctttgggggtttattctcttcccttctaacttgattaagaatgacccaaaataaattaaagctttgttccaaagccaatgtgtatactgaagtgcctgatggaggatggggctgggcggtagctgtttcatttttcttcgttgaagtcttcacctacggcatcatcaagacatttggtgtcttctttaatgacttaatggacagttttaatgaatccaatagcaggatctcatggataatctcaatctgtgtgtttgtcttaacattttcagctcccctcgccacagtcctgagcaatcgtttcggacaccgtctggtagtgatgttgggggggctacttgtcagcaccgggatggtggccgcctccttctcacaagaggtttctcatatgtacgtcgccatcggcatcatctctggtctgggatactgctttagttttctcccaactgtaaccatcctatcacaatattttggcaaaagacgttccatagtcactgcagttgcttccacaggagaatgtttcgctgtgtttgctttcgcaccagcaatcatggctctgaaggagcgcattggctggagatacagcctcctcttcgtgggcctactacagttaaacattgtcatcttcggagcactgctcagacccatctttatcagaggaccagcgtcaccgaaaatagtcatccaggaaaatcggaaagaagcgcagtatatgcttgaaaatgagaaaacacgaacctcaatagactccattgactcaggagtagaactaactacctcacctaaaaatgtgcctactcacactaacctggaactggagccgaaggccgacatgcagcaggtcctggtgaagaccagccccaggccaagcgaaaagaaagccccgctattagacttctccattttgaaagagaaaagttttatttgttatgcattatttggtctctttgcaacactgggattctttgcaccttccttgtacatcattcctctgggcattagtctgggcattgaccaggaccgcgctgcttttttattatctacgatggccattgcagaagttttcggaaggatcggagctggttttgtcctcaacagggagcccattcgtaagatttacattgagctcatctgcgtcatcttattgactgtgtctctgtttgcctttacttttgctactgaattctggggtctaatgtcatgcagcatattttttgggtttatggttggaacaataggagggactcacattccactgcttgctgaggatgatgtcgtgggcattgagaagatgtcttctgcagctggggtctacatcttcattcagagcatagcaggactggctggaccgccccttgcaggtttgttggtggaccaaagtaagatctacagcagggccttctactcctgcgcagctggcatggccctggctgctgtgtgcctcgccctggtgagaccgtgtaagatgggactgtgccagcatcatcactcaggtgaaacaaaggtagtgagccatcgtgggaagactttacaggacatacctgaagactttctggaaatggatcttgcaaaaaatgagcacagagttcacgtgcaaatggagccggtatgacacactttcttacaacaacagccactgtgttggctggagagggatggggtgggcccaacggggacacaaggaggcagaggagctaacccctctactccactttcaaaactacattttaaagggaatgtgtatgtgaagagcactaccaacatcgcttttgttttgttttgttttgttttaagctttttttttttgcttgtttttaaagccaaaacaaaaaacaaccaagcactcttccatatataaatctggctgtattcagtagcaatacaagagatatgtagaaagactctttggttcacattccgatattaaaatagtgacatgaactggcaaagtggttttaaaagctttcacgtgggataaatgattttctttttttcttttctttcttcctatggtcttgtctgaataaactactctcctgaataaaacaacatccaacccaggtcattgaaatgaaattggccagtcaaaaaaaaaaagacttcaatcatttttaaaattcctaattttcagaaatatgaataaatagtttttgttaaaccctttgtaaaataccaaggttcccgttaacaaattacggcctctgcttgctggaaatgaaatatagtttaagaccaaacattttactaataaacaaattttaagtatatatatatatatataacttgaacttcataaatgtgaagattaccacttctttttatggccagtccttatcagaagtgtttcagtacagaatatacaaaatggcatttaaaaatgtgtttcctgttgcttttagttatacagaaatatgtgactgtagtgtctttaatttaaaccgctatttattattaagttattctaggatgattaaagtaatcaaaagaaataaaatctgagacataagcagccaaaaaaaaaaaaaaaaaaaaaaaaaaaaaa

SEQ ID NO: 2155 - DNA, 2020 bp, Homo sapiens
ggcggggcggggctgagcgtgtttacatccgccgggtgcgcggcttcgccgcccgaggtcgttcggctcgggtaccatcctccgcgccatggacaccagcgacctgttcgccagctgcaggaagggggatgtgggccgagtgcgaccatgaacccgtcctgacccaggctctgacctccttcctgcccaggtacctgctggagcagcgagacgtggaggtactatgcctgcttgtgtgggcacgaggagctggtactctaccttctggccaatggagcccgctgcgaggccaacaccttcgatggtgagcgctgcctctatggggcactgagtgaccccatccgccgggctctacgcgattacaagcaggtcacggcttcctgcaggaggcgggattactatgacgacttcttgcagcggcttctagagcagggcatccacagtgacgtggtctttgtagtacacgggaagccattccgggtgcatcgctgcgtcctgggtgcacgtagtgcctactttgccaacatgctggacaccaaatggaagggcaagagtgtcgtggttctcaggcacccactgatcaaccccgtggcctttggggccctgctgcagtacctgtacacaggccgcctggacattggcgtagagcatgtgagtgactgtgagcgcctggccaagcaatgccagctgtgggacctgctcagcgacctggaggccaagtgcgagaaggtgtctgagtttgtggcgtctaagccaggcacgtgtgtgaaggtgctgaccatcgagcccccacctgcagacccccgcctccgggaggacatggcgctgctggccgattgtgccctgccccccgagctccgaggtgatctttgggagctgcccttcccttgtcctgacggcttcaacagctgccctgacatctgcttccgagtggctggctgcagcttcctctgccacaaggcctttttctgtggccgcagtgactacttccgagccctgctggatgaccacttccgagagagcgaggagccagcgacctcagggggccccccagccgtcaccctgcatggcatctcacccgacgtcttcactcacgtgctctactacatgtacagcgaccacactgagctgtcccccgaggcagcctatgatgtgctgagcgtcgccgacatgtacctgctgccaggcctgaagaggctgtgcggccgcagcctggctcagatgctagacgaggacactgtggtgggtgtgtggcgcgtggccaagctcttccgcctggcgcggcttgaggaccagtgcactgagtacatggccaaggtcattgagaagctggtggagcgggaggacttcgtggaggcggtgaaggaggaggcagcggctgtggcagcccggcaggagacggactctatcccgctggtggacgacatccgcttccacgtggccagcacggtgcagacctacagcgccatagaggaggcgcagcagcgtctgcgggcactcgaggacctgctcgtgtccatcggtctggactgttgagcccctggctgggcagccccaggggccaggagctctcttggagacaagcatgtgtatgcgtttgtgtgcagctcttcttcctgctccctgcacattgagggcttcatggggggtgcgaggggctcagtggggcttctcttccctccatgagcctggagaccccaggggaggatccatttgggatgagccccctccccccaatgcacaagccagcccccaagaccctgggggtggacaccactcagggaaacctggggtgggggtgggctttggtcttagcactttccttctccagatcccccctacccaccccagtcccaaatccagtcctctggcccttgcctagccctgaattgcttctctaagctggtgttcccatgcacagggccattcaggaagggctgggggagtgtgtgtggcaataaagcttgaaggcaccgtgggaaaaaaaaaaaaaaaaaaaaaaaaaaaaaaaaaaaaaaaa

SEQ ID NO: 2156 - DNA, 1989 bp, Homo sapiens
ggcggggcggggctgagcgtgtttacatccgccgggtgcgcggcttcgccgcccgaggtcgttcggctcgggtaccatcctccgcgccatggacaccagcgacctgttcgccagctgcaggaagggggatgtgggccgagtgcggtacctgctggagcagcgagacgtggaggtgaatgtgcgggacaagtgggacagcacccccttgtactatgcctgcttgtgtgggcacgaggagctggtactctaccttctggccaatggagcccgctgcgaggccaacaccttcgatggtgagcgctgcctctatggggcactgagtgaccccatccgccgggctctacgcgattacaagcaggtcacggcttcctgcaggaggcgggattactatgacgacttcttgcagcggcttctagagcagggcatccacagtgacgtggtctttgtagtacacgggaagccattccgggtgcatcgctgcgtcctgggtgcacgtagtgcctactttgccaacatgctggacaccaaatggaagggcaagagtgtcgtggttctcaggcacccactgatcaaccccgtggcctttggggccctgctgcagtacctgtacacaggccgcctggacattggcgtagagcatgtgagtgactgtgagcgcctggccaagcaatgccagctgtgggacctgctcagcgacctggaggccaagtgcgagaaggtgtctgagtttgtggcgtctaagccaggcacgtgtgtgaaggtgctgaccatcgagcccccacctgcagacccccgcctccgggaggacatggcgctgctggccgattgtgccctgccccccgagctccgaggtgatctttgggagctgcccttcccttgtcctgacggcttcaacagctgccctgacatctgcttccgagtggctggctgcagcttcctctgccacaaggcctttttctgtggccgcagtgactacttccgagccctgctggatgaccacttccgagagagcgaggagccagcgacctcagggggccccccagccgtcaccctgcatggcatctcacccgacgtcttcactcacgtgctctactacatgtacagcgaccacactgagctgtcccccgaggcagcctatgatgtgctgagcgtcgccgacatgtacctgctgccaggcctgaagaggctgtgcggccgcagcctggctcagatgctagacgaggacactgtggtgggtgtgtggcgcgtggccaagctcttccgcctggcgcggcttgaggaccagtgcactgagtacatggccaaggtcattgagaagctggtggagcgggaggacttcgtggaggcggtgaaggaggaggcagcggctgtggcagcccggcaggagacggactctatcccgctggtggacgacatccgcttccacgtggccagcacggtgcagacctacagcgccatagaggaggcgcagcagcgtctgcgggcactcgaggacctgctcgtgtccatcggtctggactgttgagcccctggctgggcagccccaggggccaggagctctcttggagacaagcatgtgtatgcgtttgtgtgcagctcttcttcctgctccctgcacattgagggcttcatggggggtgcgaggggctcagtggggcttctcttccctccatgagcctggagaccccaggggaggatccatttgggatgagccccctccccccaatgcacaagccagcccccaagaccctgggggtggacaccactcagggaaacctggggtgggggtgggctttggtcttagcactttccttctccagatcccccctacccaccccagtcccaaatccagtcctctggcccttgcctagccctgaattgcttctctaagctggtgttcccatgcacagggccattcaggaagggctgggggagtgtgtgtggcaataaagcttgaaggcaccgtgggaaaaaaaaaaaaaaaaaaaa

SEQ ID NO: 2157 - DNA, 1974 bp, Homo sapiens
ggcggggcggggctgagcgtgtttacatccgccgggtgcgcggcttcgccgcccgaggtcgttcggctcgggtaccatcctccgcgccatggacaccagcgacctgttcgccagctgcaggaagggggatgtgggccgagtgcggtacctgctggagcagcgagacgtggaggtactatgcctgcttgtgtgggcacgaggagctggtactctaccttctggccaatggagcccgctgcgaggccaacaccttcgatggtgagcgctgcctctatggggcactgagtgaccccatccgccgggctctacgcgattacaagcaggtcacggcttcctgcaggaggcgggattactatgacgacttcttgcagcggcttctagagcagggcatccacagtgacgtggtctttgtagtacacgggaagccattccgggtgcatcgctgcgtcctgggtgcacgtagtgcctactttgccaacatgctggacaccaaatggaagggcaagagtgtcgtggttctcaggcacccactgatcaaccccgtggcctttggggccctgctgcagtacctgtacacaggccgcctggacattggcgtagagcatgtgagtgactgtgagcgcctggccaagcaatgccagctgtgggacctgctcagcgacctggaggccaagtgcgagaaggtgtctgagtttgtggcgtctaagccaggcacgtgtgtgaaggtgctgaccatcgagcccccacctgcagacccccgcctccgggaggacatggcgctgctggccgattgtgccctgccccccgagctccgaggtgatctttgggagctgcccttcccttgtcctgacggcttcaacagctgccctgacatctgcttccgagtggctggctgcagcttcctctgccacaaggcctttttctgtggccgcagtgactacttccgagccctgctggatgaccacttccgagagagcgaggagccagcgacctcagggggccccccagccgtcaccctgcatggcatctcacccgacgtcttcactcacgtgctctactacatgtacagcgaccacactgagctgtcccccgaggcagcctatgatgtgctgagcgtcgccgacatgtacctgctgccaggcctgaagaggctgtgcggccgcagcctggctcagatgctagacgaggacactgtggtgggtgtgtggcgcgtggccaagctcttccgcctggcgcggcttgaggaccagtgcactgagtacatggccaaggtcattgagaagctggtggagcgggaggacttcgtggaggcggtgaaggaggaggcagcggctgtggcagcccggcaggagacggactctatcccgctggtggacgacatccgcttccacgtggccagcacggtgcagacctacagcgccatagaggaggcgcagcagcgtctgcgggcactcgaggacctgctcgtgtccatcggtctggactgttgagcccctggctgggcagccccaggggccaggagctctcttggagacaagcatgtgtatgcgtttgtgtgcagctcttcttcctgctccctgcacattgagggcttcatggggggtgcgaggggctcagtggggcttctcttccctccatgagcctggagaccccaggggaggatccatttgggatgagccccctccccccaatgcacaagccagcccccaagaccctgggggtggacaccactcagggaaacctggggtgggggtgggctttggtcttagcactttccttctccagatcccccctacccaccccagtcccaaatccagtcctctggcccttgcctagccctgaattgcttctctaagctggtgttcccatgcacagggccattcaggaagggctgggggagtgtgtgtggcaataaagcttgaaggcaccgtgggaaaaaaaaaaaaaaaaaaaaaaaaaaaaaaaaaaaaaaaa

SEQ ID NO: 2158 - DNA, 1824 bp, Homo sapiens
gccaggcccagcctcggtgagcacacacgccctccctgtctctcgccttcgcttccctgcatctgcgctgattgtgctggagaagaaatacatccacccaccctcctttgatgatgtccactgagcaaatgcagccactggaagtctcagaagacagactggacaagctagaccctcgttgcagccacttagatgatctttcagaccagttcattaaggactgtgatctcaaaaagaagcctagaaagggaaaaaatgtacaggccaccctgaatgttgagtcagaccaaaaaaaaccaaggaggaaagatacaccggcgctgcacatcccacctttcataccaggtgtgttttcagaacatttaattaaaagatacgatgttcaagagagacatccaaagggcaaaatgatccctgttcttcataacactgacctggaacagaaaaagccaaggagaaaagacacacctgccctgcacatgtccccctttgcagcaggtgtgacattgctcagggatgagagacccaaagcaatcgtggaagatgacgaaaaggatggtgacaagatagctatttaaagatagttcccctgagaccacttgtaaataggttagattggttccctgtggtgacctagagaaaaaatagacttgtttctgctctcatttttgtcatcgtctgacttgaagattcagacaccttctccccaggagatgtatgccatcaaattgccagtcacctctttgtctctctcttctttctgagtatggtttctattctgtgttttgaatttttattttctaatgcagtggaaaagaaacagatcatcctaaatgaggaggtaacagggaaagcactggggttcggtttctgcatcttctggatcaattcacggaacagagatcgtggattacatgggctccttcttggtttttgctgctgggcaggacttgacttagcattatccaagcaccagtccaagtggggttccctgttgccagttagagaggtgagaatgtttggactctaactcaccgattgctttgcagacaaaggtcttttatttctcctgtcctatcttaagagtccaaatgtctctggtgatgttcctaagacccttgtcccagatactctaaatgtgaatgtatgagctgggggagtcaacccagcccaccatgcgttggctgatgataccagaggcagagagtgctggtctgtctgggaagcttagcaatgtatcttcaaatttatttttgtttttaaaaatatttcttaaacatgctgtcccaacatttgtgagttgtgtcacaagtgagtcattatcaatggtagataaaatatcaatgtttgtgatgaatttactgtaaaaaaattaaggtcaatgaaagccattctgttatttttagcattctcacttatttagactctattacactttcttggatgagaggggagagtgtggtgttagctagtgagcagaggtctgtatattgtccttgccccagcctgcaatctgtggatgcccaggggaaggcatacaggcctcatccaccaggcaatagacaggagagaggtgagaactatttttagaaggaggaaaagtagatacgcaaattgtcacaactaagagtgataatttggtagctctgtatgtatgctggttccaactgtttaatcccttctgtctttctgttctcacaaagatggaaaagatgcaagagcttgccggaaataaagctacatctatccaaaaaaaaaaaaaaaaaaaaaaaaaaaaaaaaaaaaaaaaaaaaaaaaaaaaaaaaaaaaaaaaaaaaaaaaaaa

SEQ ID NO: 2159 - DNA, 2412 bp, Homo sapiens
gcggaagtcgctgaggggtggtgaagcggttgggaaagtgtcggtttatcttcgcgccccttgcgttcttgccgcggcttgcctgggcaggtaaagcgcgattgcgagagctcggcaaccctgccgactcagccggaaccggctcccggcccgaggggcgtggtgtcctggtgctccgactccttccgcaggctccttgggacccgcggttccgggagtcccttgctcagggtccctttcctgcagtgaggcgccgtccgccttccctgtgtccccgcagacccccatcatgggcaataccagcagtgagcgcgccgcgctggagcggcatggtggccataagacgccccggagggacagctcggggggcaccaaggacggggacaggcccaagatcctgatggacagccccgaagacgccgacctcttccactccgaggaaatcaaggcaccagagaaggaggaattcctggcctggcagcatgatctggaagtgaatgataaagctcccgcccaggctcggccaacggtgtttcgatggacggggggcggaaaggaagtttacttatctgggtccttcaacaactggagtaaacttcccctcaccagaagccacaataactttgtagccatcctggatctgccggaaggagagcatcagtacaagttctttgtggatggtcagtggacgcacgacccttccgagcccatagtaaccagccagcttggcacagttaacaacatcattcaagtgaagaaaactgactttgaagtatttgatgctttaatggtggattcccaaaagtgctccgatgtgtctgagctgtccagttctcccccaggaccctaccatcaggagccctacgtctgcaaacccgaagagcgctttcgggcaccccctattctccccccacatctcctccaggtcatcctgaacaaggacacggggatttcctgtgatccagctttgcttcctgagcccaatcacgtcatgctgaaccacctatacgcgctgtctatcaaggatggagtgatggtgctcagcgcaacccaccggtacaagaagaagtacgtcaccaccttgttatacaagcccatatgaagagctgggggcggatggtggcccaggagacagcacaccaccaggctccacacgtgcatgctttccccaagagggaatggactgtacattgctcatttcacactcttcagaagacatttcatacctgccctggtcctgcttgaaggtttgtccaggcagagcagctcctgcagcgcctcggtctgtgacagtcctcctagcacccccatggctttgagcctcggggactcatcaagtccaagaaaagagggaggggtggcagaggatctgcagccctggccccgcggtgcatgaggctgggtgcagttctaaacctacattctcgatttttcttaagccaaaaatgaatgctaactcctttgccagtaaaattctgggaaacagggactgaggccacacatcatttccagtcatctgtgtgtttttaaggccagccacttgtccctgttgaggcctggctatggaactaaatacagtgttggtcttgcctgtccttcaaaatcaacaacagattgtctctcggctccagggaggtgtcatttctatagaaattagaagctttctgatttctagatgaggttttacaattgtttcttacagtcatgtgcactaagtactctttttgtaagcagaggtggctggctctgcagccttaaggccattttttaagtcaccacgtctagaagtcacatgaactctgctcagcaataatctgttctcagaacagacttttcaacctgctgccggatttctccattcagctggatgatcctcaggactgaccagttagctggcaggttgtccagctttttattccagtcataataggtgacagtgttaaccgtgaaaacttgagaggcactctgccctcttccctataaaatcacacagcgtgattttacaaggtcccgtggcaccttgctcaggacctctgcccctagttagcaagactgcagcagttgctgttgcttattctgaaaggaatgtagaacttgacagcagccttctgagtctgggtcaggaagatgtcctttggaccaaagcagacttctttatacgcagctcagtttcccgggagtcgccacagatgtacccactagcccaggttgctgtgagtcagcggaagctcccgttatgccctttgctcctggtgggagagggaggagtgagctccctgggttccagtatttacttggtatacctgagtttgggggtacccttttttgtgacttttcaaaacagtgaattactgtcaccttgatggacaagtttcaataaaactttgtaaaaataattggaaaaaaaaaaaa

SEQ ID NO: 2160 - DNA, 1126 bp, Homo sapiens
agccgagacggtgcagggccggagaagcaccttcactcccagcctgcgccccgatgctgcgcgttctgtgcctcctgcgcccctggaggccccttcgggcccgcggctgcgcttccgacggggcggccgggggctcagagatccaagtgcgcgccctggcgggtccggaccaagggatcactgagattctgatgaacagaccttctgcccgcaatgccttggggaatgtcttcgtcagtgagctgctggaaactctggcccagctgcgggaggaccggcaagtgcgtgtcctgctcttcagaagtggagtgaagggcgcgttctgtgcaggtgcagacctgaaggagcgggaacagatgagtgaagcagaggtgggggtgtttgtccagcgactccggggcctgatgaatgacatcgcttcctcggcagtcatgggactgattgagaccacgcgagggctcctcccgggggcaggagggactcagaggctgccccgttgtctgggggtggccctggcgaaggagctcatcttcacgggccgacgactgagtggaactgaggcccacgtactggggctggtgaatcacgctgtggcccagaacgaggagggggacgccgcctaccagcgggcacgagcactggcccaggagatcctgccccaggcccccattgccgtgcggctgggcaaagtagccattaaccgaggaacggaggtggacattgcatctgggatggccattgaagggatgtgctatgcccagaatattccaacccgggaccggctagagggcatggcagccttcagggagaagcggactcccaaatttgttggcaaatgacccccattttaaccttcagcatgggagatgcatgccctgaagagcaggatccagaaggaagatttgtggccagattgccttcatcatttcacctctccagacttccatttcttcacaaggatgatgatggaaataaaatgactggcgtgatgcctggaaccaaggtgctgatcctaccacctactgctaccttccttagcttcaccctggctagaaataatcacgagggttgggtttgctttggaaaatgcctgtctctctacttgaatgataaagaattaaattag

SEQ ID NO: 2161 - DNA, 1105 bp, Homo sapiens
gcggccaccgttttaaccacgattggcgaagcgccgtcatttcggagcgactcagcgcctgcccgccctctcgccgcgtcgccggtgcctgcgcctcccgctccacctcgcttcttctctcccggccgaggcccgggggaccagagcgagaagcggggaccatgttccgacgcaagttgacggctctcgactaccacaaccccgccggcttcaactgcaaagatgaaacagaatttagaaacttcatcgtttggcttgaagaccagaaaatcaggcactacaagattgaagacagagggaatttaagaaacatccacagcagcgactggcccaagttctttgaaaagtatctcagagatgttaactgtcctttcaagattcaagatcgacaagaagctattgactggcttcttggtttagctgttagacttgaatatggagataatgctgaaaaatacaaggatttagtacctgataattcaaaaactgctgacaatgcaactaaaaatgcagaaccattgatcaatttggatgtaaataatcctgattttaaggctggtgtgatggctttggctaacctgcttcagattcagcgtcatgatgattacctggtaatgcttaaggcaattcggattttggttcaggagcgcctgacacaggatgcagttgctaaggcaaatcaaacaaaagagggcttacctgttgctttagacaaacatattcttggttttgacacaggagatgcagttcttaatgaagctgctcaaattctgcgattgctgcacatagaggagctcagagagctacagacaaaaatcaacgaagccatagtagctgttcaggcaattattgctgatccaaagacagaccacagactgggaaaagttggaagatgaacacttgaggacttcagcttctcacctacttagtacagttgggaaccatacacttctggcatgtttggaaatcaaaatgtcacattctcgggggaggaagcccagaaaattgggtatgttctagagatttaccaccattgcttattgcttttttctttaataaagtttaggaaagtagaaaaaaagtgagttggaaaaaaaagtcgaaa

SEQ ID NO: 2162 - DNA, 2309 bp, Homo sapiens
gcgggggcgggccggggcggggccaggccggctagaggggcgggtctagcggcggcccccggcgaagttcactgcgcttgcgctgacagacgcaagatggcggacagtgcggaactaaagcaaatggttatgagccttagagtttctgaactccaagtactgttgggctacgccgggagaaacaagcacggacgcaaacacgaacttctcacaaaagccctgcatttgctaaaggctggctgtagtcctgctgtgcaaatgaaaattaaggaactctataggcggcggttcccacagaaaatcatgacgcctgcagacttgtccatccccaacgtacattcaagtcctatgccagcaactttgtctccatctaccattccacaactcacttacgatggtcaccctgcatcatcgccattactccctgtttctcttctgggacctaaacatgaactggaactcccacatcttacatcagctcttcacccagtccatccggatataaaacttcaaaaattaccattttatgatttactggatgaactgataaaacccaccagtctagcatcagacaacagtcagcgctttcgagaaacctgttttgcatttgccttgacaccacaacaagtgcagcaaatcagtagttccatggatatttctgggaccaaatgtgacttcacagtacaggtccagttaaggttttgtttatcagaaaccagttgtccacaagaagatcacttcccacccaatctttgtgtgaaagtgaatacaaaaccttgcagccttccaggttaccttccacctacaaaaaatggcgtggaaccaaagcgacccagccgaccaattaatatcacctcacttgtccgactgtccacaacagtaccaaacacgattgttgtttcttggactgcagaaattggaagaaactattccatggcagtatatcttgtaaaacagttgtcctcaacagttcttcttcagaggttacgagcaaagggaataaggaatccggatcattctagagctttaattaaagagaagttgactgcggatccagacagtgaaatagctacaaccagcctaagggtttctctactatgtccacttggtaaaatgcggctgacaattccgtgtcgggcccttacatgttctcatctacaatgttttgacgcaactctttacattcagatgaatgagaaaaaaccaacctgggtttgtcctgtctgtgataagaaggctccatatgaacaccttattattgatggcttgtttatggaaatcctaaagtactgtacagactgtgatgaaatacaatttaaggaggatggcacttgggcaccgatgagatcaaaaaaggaagtacaggaagtttctgcctcttacaatggagtcgatggatgcttgagctccacattggagcatcaggtagcgtctcaccaccagtcctcaaataaaaacaagaaagtagaagtgattgacctaaccatagacagttcatctgatgaagaggaagaagagccatctgccaagaggacctgtccttccctatctcccacatcaccactaaataataaaggcattttaagtcttccacatcaagcatctccagtatcccgcaccccaagccttcctgctgtagacacaagctacattaatacctccctcatccaagactataggcatcctttccacatgacacccatgccttacgacttacaaggattagatttctttcctttcttatcaggagacaatcagcattacaacacctccttgcttgccgctgcagcagcagcagtttcagatgatcaagacctcctacactcgtctcggtttttcccgtatacctcctcacagatgtttcttgatcagttaagtgcaggaggcagtacttctctgccaaccaccaatggaagcagtagtggcagtaacagcagcctggtttcttccaacagcctaagggaaagccatagccacaccgtcacaaacaggagcagcacggacacggcatccatctttggcatcataccagacattatttcattggactgattcccaggccctgctgctcccatccccaccccagatcgaatgaacttggcagaaagaagagaactttgtgctctgttttaccttactctgtttagaaaagtatacaagcgtgttttttttcctttttttagggaaaaaattaaaagaaatgtacagagaacaaaactatattttcagttttacttttgtatataaatctaagactgcctgtgtgataaaacacttgtttaaaaaaaaaaaaaaaaaaaaaaaaaaaa

SEQ ID NO: 2163 - DNA, 3417 bp, Homo sapiens
cgaggctggcatagcggctgccgacccgccttcgttcctccaccccctgcacgggactgctgggcccgccccgccccgcctgcaggtgaagcggccgcagccgccgagtaggtgcgtggggatgatctcactcgcgcgctccgcgccaggaggaggaggagcgggagcggatccaacttccgggtagtggagccgcaagccaccggcatcttgctttttcttccccctcctcctgtgtgccccgcgccgctccctctttcccttttattcccggccccacccgccaaaatgaacagctcggacgaagagaagcagctgcagctcattaccagtctgaaggagcaagcaataggcgaatatgaagaccttagagcagagaaccagaaaacaaaggagaagtgtgacaaaattaggcaagaacgagatgaagccgttaaaaaactggaagaatttcagaaaatttctcacatggtcatagaggaagttaatttcatgcagaaccatcttgaaatagagaagacttgtcgagaaagtgctgaagctttggcaacaaagctaaataaagaaaataaaacgttgaaaagaatcagcatgttgtacatggccaagctgggaccagatgtaataactgaagagataaacattgatgatgaagattcgactacagacacagacggtgccgccgagacttgtgtctcagtacagtgtcagaagcaaattaaagaacttcgagatcaaattgtatctgttcaggaggaaaagaagattttagccattgagctggaaaatctcaagagcaaactcgtagaagtaattgaagaagtaaataaagttaaacaagaaaagactgttttaaattcagaagttcttgaacagagaaaagtcttagaaaaatgcaatagagtgtccatgttagctgtagaagagtatgaggagatgcaagtaaacctggagctggagaaggaccttcgaaagaaagcagagtcatttgcacaagagatgttcattgagcaaaacaagctaaagagacaaagccaccttctgctgcagagctccatccctgatcagcagcttttgaaagctttagacgaaaatgcaaaactcacccagcaacttgaagaagagagaattcagcatcaacaaaaggtcaaagaattagaagagcaactagaaaatgaaacactccacaaagaaatacacaacctcaaacagcaactggagcttctagaggaagataaaaaggaattggaattgaaatatcagaattctgaagagaaagccagaaatttaaagcactctgttgatgaactccagaaacgagtgaaccagtctgagaattcagtacctccaccacctcctcctccaccaccacttccccctccacctcccaatcctatccgatccctcatgtccatgatccggaaacgatcccaccccagtggcagtggtgctaagaaagaaaaggcaactcaaccagaaacaactgaagaagtcacagatctaaagaggcaagcagttgaagagatgatggatagaattaaaaagggagttcatcttagacccgttaatcagacagccagaccgaagacaaagccagaatcttcgaaaggctgcgaaagtgcagtggatgaactaaaaggaatactggcctcccagtagcattggatgcaggaaaaaatacattgacggtgaaaaacaagccgaaccagttgtagttttagatcctgtttctacacatgaaccccaaaccaaagaccaggttgctgaaaaagatccaactcaacacaaggaggatgaaggcgaaattcaaccagaaaacaaagaagacagcattgaaaacgtgagagagacagacagctccaactgctgatccataaaccagaagcctgatacgtttggaagtccttttcaataagcacatgattagtgttgttatattggcaagggctgtagacattctgctctggtcactgtattcagaatacaggttcttttctggtgtcacttttgtaagtagcaactataaacataagtaagctgtttagcaaaacacacattcctagtaggttttggttttttgatctttataaagatgaggtttttttcctagttactgtattaagtatgacttcttttagaaggttacaaaaaaattcagatgttgatacctttttaggaaatgtgcataccactcatcaaatggaatgctgaaagtttgaggtgcttgtatataatcggataaacaaaactgatcaacccaatgtgattttaaaagcccccaaagaagcttctgttttgggtctgatcctcttgatggagaaactgcagcagcatggaaattgttgggtactgtggcatacaagttattttctacagtagactgagataaactgaaaactcaggagctggcatcaaactcgtagtcccatagtcagtgttaattacacacattgttaactattggatgaaaaatacatgctattgattgtgtccaaagcctcccgaggacctccgtggggatgctctggtagcctgaatacagaactgaggtgaaagtccaaaccttgaattttacagtagtaagttggtaaaccatgtgctctgtgctatgagttaattatgttttcccaaatactaatgtggcacaagtaccatattttatcagagttcttatgtacagtatggtgaagataagtgacaagcacacatttttcttgcttcactgctgttctatattacacaggtttgttgttgttttttttaaaaaagaaattaagcagtagttagtctctaaaaatacaatgtttcaggctaccacagtgaataaatagaaatgtaatcagggattaaaaaaaaaacttatgcagcttttcaaagttgattgtttcaaaattggtgtttatttaaaataagtggtaatgtacttgaatgcactttttatgacaatgattcagtaatggtaattttactattaaagaaagtgaaaggtttagttttgttagcatggctcagcatgtagctgtcaggtgtttttcacctaagggcaaaagaaaatgatagtaataattgcagtagttgtattgtattgtatttttgcacgtgtggtaagcataggcttgaagaggtgggtaggcaggtacatgtacttcctaaattttgagataattatctttctgtaagttcgttatgcttgactgtttccatgttctcccaataatgattttatagttacttatcactttactcatggagaattaaaacgtaatgtttttcaactgtatctttctttaactggataatactgctatatgatatgcttactacagactgcattaattcacgaaacgaattctgttatgctgtaatttgaactctcctcaccacaacttattaaaaaggcaccaatagtttcccatt

SEQ ID NO: 2164 - DNA, 1051 bp, Homo sapiens
ggaccgccgcctggttaaaggcgcttatttcccaggcagccgctgcagtcgccacacctttgcccctgctgcgatgaccctgtcgccacttctgctgttcctgccaccgctgctgctgctgctggacgtccccacggcggcggtgcaggcgtcccctctgcaagcgttagacttctttgggaatgggccaccagttaactacaagacaggcaatctatacctgcgggggcccctgaagaagtccaatgcaccgcttgtcaatgtgaccctctactatgaagcactgtgcggtggctgccgagccttcctgatccgggagctcttcccaacatggctgttggtcatggagatcctcaatgtcacgctggtgccctacggaaacgcacaggaacaaaatgtcagtggcaggtgggagttcaagtgccagcatggagaagaggagtgcaaattcaacaaggtggaggcctgcgtgttggatgaacttgacatggagctagccttcctgaccattgtctgcatggaagagtttgaggacatggagagaagtctgccactatgcctgcagctctacgccccagggctgtcgccagacactatcatggagtgtgcaatgggggaccgcggcatgcagctcatgcacgccaacgcccagcggacagatgctctccagccaccacacgagtatgtgccctgggtcaccgtcaatgggaaacccttggaagatcagacccagctccttacccttgtctgccagttgtaccagggcaagaagccggatgtctgcccttcctcaaccagctccctcaggagtgtttgcttcaagtgatggccggtgagctgcggagagctcatggaaggcgagtgggaacccggctgcctgcctttttttctgatccagaccctcggcacctgctacttaccaactggaaaattttatgcatcccatgaagcccagatacacaaaattccaccccatgatcaagaatcctgctccactaagaatggtgctaaagtaaaactagtttaataagcaaaaaaaaaaaaaaaaaaa

SEQ ID NO: 2165 - DNA, 695 bp, Homo sapiens
aaatcctgctctggccggattccagactcgtgggggaaaggctggatcttaatgcaagtcatgaacttgaatgtgccgatgaggcctggcattcttgtccagagacagagtaaggaagtgttggccacacccttagaaaacagaagggacatggaggcagaagaggagaaccaaataaatgagaagcaagagcctgagaatgctggagaaactggtcaagaagaggatgatggtttgcagaaaatacacacatctgtcactagaactccttcagttgttgaaagccaaaaaagacctttaaaaggagtgacattttctagggaggtaattgttgtggatcttgggaatgaataccctacacctcgaagctatactcgagaacataaagagaggaaatgaagctcaaaaaagggtaagagtgaaagaaaatgtaacgtttgactaacgttgaaagactgagggtacaaaatcatgttgaaacaacaaaacaatggggaattaagcaaataaagatattattttacctttgtgcagaaaggagtgagccatgtgcaaaattctgtaagtaaaatacttagagcttgaatataattttttaaaaattcaaatctgagttcaagaaattgattgtattgcccttaaaactatctactcaaacactgttctggcatgtgaataaagtgatttttgtttgt

SEQ ID NO: 2166 - DNA, 695 bp, Homo sapiens
aaatcctgctgtggccggattccagactcgtgggggaaaggctggatcttaatgcaagtcatgaacttgaatgtgccgatgaggcctggcattcttgtccagagacagagtaaggaagtgttggccacacccttagaaaacagaagggacatggaggcagaagaggagaaccaaataaatgagaagcaagagcctgagaatgctggagaaactggtcaagaagaggatgatggtttgcagaaaatacacacatctgtcactagaactccttcagttgttgaaagccaaaaaagacctttaaaaggagtgacattttctagggaggtaattgttgtggatcttgggaatgaataccctacacctcgaagctatactcgagaacataaagagaggaaatgaagctcaaaaaagggtaagagtgaaagaaaatgtaacgtttgactaacgttgaaagactgagggtacaaaatcatgttgaaacaacaaaacaatggggaattaagcaaataaagatattattttacctttgtgcagaaaggagtgagccatgtgcaaaattctgtaagtaaaatacttagagcttgaatataattttttaaaaattcaaatctgagttcaagaaattgattgtattgcccttaaaactatctactcaaacactgttctggcatgtgaataaagtgatttttgtttgt

SEQ ID NO: 2167 - DNA, 1260 bp, Homo sapiens
ggccggcgggaagactccgttacccagcgagcgaggcggcggcgcagggccagcggactccatttcccgtcggctcgcggtgggagcgccggaagcccgccccacccctcattgtgcggctcctactaaacggaaggggccgggagaggccgcgttcagtcgggtcccggcagcggctgcagcgctctcgtcttctgcggctctcggtgccctctccttttcgtttccggaaacatggcctccggtgtggctgtctctgatggtgtcatcaaggtgttcaacgacatgaaggtgcgtaagtcttcaacgccagaggaggtgaagaagcgcaagaaggcggtgctcttctgcctgagtgaggacaagaagaacatcatcctggaggagggcaaggagatcctggtgggcgatgtgggccagactgtcgacgacccctacgccacctttgtcaagatgctgccagataaggactgccgctatgccctctatgatgcaacctatgagaccaaggagagcaagaaggaggatctggtgtttatcttctgggcccccgagtctgcgccccttaagagcaaaatgatttatgccagctccaaggacgccatcaagaagaagctgacagggatcaagcatgaattgcaagcaaactgctacgaggaggtcaaggaccgctgcaccctggcagagaagctggggggcagtgccgtcatctccctggagggcaagcctttgtgagccccttctggccccctgcctggagcatctggcagccccacacctgcccttgggggttgcaggctgcccccttcctgccagaccggaggggctggggggatcccagcagggggagggcaatcccttcaccccagttgccaaacagaccccccaccccctggattttccttctccctccatcccttgacggttctggccttcccaaactgcttttgatcttttgattcctcttgggctgaagcagaccaagttccccccaggcaccccagttgtgggggagcctgtattttttttaacaacatccccattccccacctggtcctcccccttcccatgctgccaacttctaaccgcaatagtgactctgtgcttgtctgtttagttctgtgtataaatggaatgttgtggagatgacccctccctgtgccggctggttcctctcccttttcccctggtcacggctactcatggaagcaggaccagtaagggaccttcgattaaaaaaaaaaaagacaataataaaaa

SEQ ID NO: 2168 - DNA, 4452 bp, Homo sapiens
cgccggtgaggtaggggcgggaggcggggggagacatggctcggcgcggctggcggcgggcacccctccgccgtggcgtcggcagcagtccccgagcccgcaggctcatgcggcccctttggttgctcctcgcagtgggcgtctttgactgggcaggggcttcggacggcggcggcggagaggctagagccatggacgaggagatcgtgtccgagaagcaagccgaggagagccaccggcaggacagcgccaacctgctcatcttcatcctgctgctcaccctcaccattctcacaatctggctcttcaagcaccgccgggcccgcttcctgcacgaaaccggcctggctatgatttatggtcttttggtgggccttgtgcttcggtatggcattcatgttccgagtgatgtaaataatgtgaccctgagctgtgaagtgcagtcaagtccaactaccttactggttacttttgatccagaagtatttttcaacatattacttcctcctatcatattttatgcaggttatagcctgaaaaggagacatttttttcgaaatcttgggtctatcctagcatacgcttttcttggaacagcaatttcttgtttcgttattgggtcaataatgtatggctgtgtaacgctgatgaaggtaacgggacaacttgcaggagatttttactttacagattgcctactgtttggtgccattgtatcagcaactgatccagtgactgttcttgctatattccacgagcttcaagttgatgttgaactctatgcacttctttttggtgaaagtgtcctcaatgatgctgttgccatagtgctgtcctcctcaatagtggcataccagccagctggagacaacagtcacacctttgatgtcacagcgatgttcaagtctattgggatcttccttggaatcttcagtggatcttttgcaatgggtgctgctactggagtggtgacagctttagtgacaaagttcaccaaattacgggagttccagttgttggagacaggcctgttcttcttgatgtcctggagtaccttcctcttggctgaagcatggggcttcacaggtgtagttgcagtattgttttgtggcatcacacaagcacattatacgtataataatttgtccacggagtctcagcatagaactaaacagttgtttgagcttctcaatttcttggcagagaatttcatcttctcctacatggggctgacactgttcaccttccagaaccatgtctttaacccaacatttgtagtaggagcatttgttgctattttcttgggaagagctgccaatatttaccccttgtccctcttacttaatttgggtagaagaagtaagattggatcaaattttcaacacatgatgatgtttgctggccttcgtggtgcaatggcatttgccttggccattcgagatactgccacttatgcacggcaaatgatgttcagcaccacgcttctgattgtgttttttaccgtgtgggtatttggtggtggcaccactgcaatgctgtcatgcttgcatatcagggttggtgttgattcagaccaagaacacttgggtgttcctgaaaatgaaaggagaactaccaaagcagagagtgcttggcttttccggatgtggtacaactttgatcataactatctgaagcctctgctgacccacagcgggcctccgctgacaacaacactccctgcctgctgtggacccatcgccaggtgcctcaccagcccccaggcttacgaaaaccaggaacagttgaaagatgatgattctgatcttattctcaatgatggtgacatcagtttgacatatggagattctactgtgaacactgaaccggccacatccagcgccccaaggagatttatgggaaacagttctgaagatgccttggatcgggagcttgcatttggggaccatgaactggtcattcgaggaacacgcctggttcttccaatggatgattctgaacccccgctaaatttgttagataatacgagacatggtccagcctaagcttactaatactcacttagtgatttgtaaaatttgcacatgtgattgtgaagaaatttgtactacctaaaagtcccagtgcatgtctctgaatgtgtaagctatataaatgctatttatatggcatagaaagaatataaatatcctgtacacggcagattgtgaacaaactatattcctttaagttttcctggttgcactctgtagactggatctgttttaggaagttactttcacagtgatgttgtgtgttctgttagttttatgtctcagttaaagtgtaaaaagtgacggattttctctttcttaaacttacctgacacttaaccagagtaccagttctcgtgatgtgaattaatttttttgtgtgctaggggagggagagtgaggagggagtgttatttccttgggaacctagggaggagaggttcctttgttgggaaacttttgttgatagctgctgcctttgtcctgatcgttttctttcccttttctctggtggcctgttgtggtgcaacgagctgatggcatttgatcttgccccattcaggttggggagtgaagtgtggggacccttttcccccgcttgctgtgaaagcacagattcattgactacagtacactgttgttcagaaaagaaggctgcaaatgacttctgagactttatgtcttttcttccagaccaagaccgtagaaggagtcacatctagccggcttagccaaagtacaggtgtatatagttcagggcacttgatttagatttggaggggctggggtgggcagagagcaagaggcgagtaaagagaatggtggtttcagagatctctcttcccaaatgtgtaaatattctataccagataagtttaaataagaaatttaattgctgcttaatttttgattatgtactttatctgtatagcaggctttgtcgtcagaagtttttatatcgatttaaattgctgctctttagcagccaaacaggagcaaaatgtaaaatttttgaacttactgtgtctaatcatcatttgttagtctgtagttaatgtcaacagttaatttatgaacccacgatcgttccacactgcaccaaagtcagtcataagagaaatcgaatattctggagcactgattgcagcagggtggctcctttgtgtgcagcaggtgtagtagtcttcattttcatggtacgttttaatattaattacctaagctgccatgcattttttttttacagttctcaaggaagagcacagaacaatttctcatttcatatttggagtatgaaagtagattctattttgtaatgctgataatacctaaagatgcattgaatgcttggaagaatgctttttgatgttgattttgacctgttcatgattcagaagaaaaacaaacttttttggattttttttccctcaggtctgagtagcattgccttaaatcttatccagttagaacattgatttatttacatgatgttcagattttccagtgaaaaatacccttctgaacaaaacatgtacttactctccgaaaggcatctatctgtgctattgcaaacactccttgagattttaggggaattctaatgttgtaccctttcgtggcagctttgactgttggcatagccatttgttatgtagtggtagcgactttcctgctatgcaggaatccctcccatgacgtgtatgttttacatgatgtgtgcctcttcacgcagtaaatagtttcttgttaatgtatgtttgaggagtttgaacgtcagtgtcacttacccacaaagttattcaagttgtaaaaggttataaataatttaacaactaccttttttattctgtcgggttactgacctcactttatgtaaatacttcgcatgacaaattcagtaactcgtctatttcagcatgcataagacttttcactagggaaactgataaagcttgagtcaactaaatctgccttcatactttatcaaggggaaccaagcctgctgtgcttacatcagcatctggaagactttcctctcctctaatctgtgtacacatctccaagcaaggaagaaaaaacaaactctgctcagacgcctatgaaacacctgaatgaactttgatgaagtacagtctgagttaccatcatgcacaagtagaactgctcttggacttgttttcctgttgtttgtggaacctacgcgtttgaatggcttgaacgttgcatcttttaaagttattttttaaggtttcttggcatttatcctagttgtccgtgtttggcaatgtgctgttaaagtaatagacttttaatctttatgtattttttgttttctctggagtacttggacagatgttatagtggtttcttttaggaaaatctgtcattaaaaaagttatagccttgcaaataaccactc

SEQ ID NO: 2169 - DNA, 2655 bp, Homo sapiens
gcggccgcggaggaggaggaaggggaggagggcgaggcgggaggtgcaggagggaccctcgccatgggtccacgggcctagagtggcggaagataccggcctggtgccaaactggctactgctgcttcctgtggcctccatggctgaggactggctggactgcccggccctgggccctggctggaagcgccgcgaagtctttcgcaagtcaggggccacctgtggacgctcagacacctattaccagagccccacaggagacaggatccgaagcaaagttgagctgactcgatacctgggccctgcgtgtgatctcaccctcttcgacttcaaacaaggcatcttgtgctatccagcccccaaggcccatcccgtggcggttgccagcaagaagcgaaagaagccttcaaggccagccaagactcggaaacgtcaggttggaccccagagtggtgaggtcaggaaggaggccccgagggatgagaccaaggctgacactgacacagccccagcttcattccctgctcctgggtgctgtgagaactgtggaatcagcttctcaggggatggcacccaaaggcagcggctcaaaacgttgtgcaaagactgtcgagcacagagaattgccttcaaccgggaacagagaatgtttaagcgtgtgggctgtggggagtgtgcagcctgccaggtaacagaagactgtggggcctgctccacctgcctcctgcagctgccccatgatgtggcatcggggctgttctgcaagtgtgaacggagacgctgcctccggattgtggaaaggagccgagggtgtggagtatgccggggctgtcagacccaagaggattgtggccattgccccatctgccttcgccctccccgccctggtctcaggcgccagtggaaatgtgtccagcgacgttgcctacggggtaaacatgcccgccgcaagggaggctgtgactccaagatggctgccaggcggcgccccggagcccagccactgcctccaccacccccatcacagtccccagagcccacagagccgcaccccagagccctggccccctcgccacctgccgagttcatctattactgtgtagacgaggacgagctaaagcggctgctgcccagtgtctggtcagagtctgaggatggggcaggatcgcccccaccttaccgtcgtcgaaagaggcccagctctgcccgacggcaccatcttggccctaccttgaagcccaccttggctacacgcacagcccaaccagaccatacccaggctccaacgaagcaggaagcaggtggtggctttgtgctgcccccgcctggcactgaccttgtgtttttacgggaaggcgcaagcagtcctgtgcaggtgccgggccctgttgcagcttccacagaagccctgttgcaggcagtagacccaggcctgccttctgtgaagcaagagccacctgacccagaggaggacaaggaggagaacaaggatgattctgcctccaaattggccccagaggaagaggcaggaggggctggcacacccgtgatcacggagattttcagcctgggtggaacccgcttccgagatacagcagtctggttgccaaggtccaaagaccttaaaaaacctggagctagaaagcagtagactggaggcttctacagactgtaggattcaagtctgcagggcaggcactcgggaagggaagatggatgtaaagtgtgggagaccgaggacacagtggagcccacgagcacgagctggaacccacgaggatggcctggaacccatgtcagtctctcaccacctccagcttcgatgatgtgggtgtcctgcagaagaagctggtgcccttcctcacagagttaaatatgcatctggcccaggaattagagaagctgaaaggatgatcctggggaaggtggagcagctgcaggcctggctgcaggcctgactactgcccacaccaacgaggtgatctagcagatacatggcaacgtgtgaactgcaacaacgcctggtgccccagcaccaaccttccaagtgtaaaaacaatgtgctgctgcttcacttccgccctccggttatcaagcaaaatgtctcttgtggcccatcttactggaagagagttccgggaaacatagcctcaccaaggtgacacattacaaagccaccctaccatgaatccgctcccaagggtctcactgctcacctgaggataactcaatataactatgttgctgaaaatgcaaagctgaagaccatggatttcatggtgattccagcaagtacagagattctatgaagcccacccagaaaaaacttgctggtcctggctatttttgtgtcatttattcaagtattgagaacctggcctgtggtaggcactgtacttaatactaggatacagaaatgcaaaagatacggcccatgcaattttattaaatgcatcaatatgtattacaaatggtgaatggatttccaactttatcatggaatttaatgctgaatatatagaattcagaaaattgttgggaggacagcccttttgtgaaccttgtttggggcacagtaggaattggaaataatttagtttctatctctaagctgttctattttaaaattatttttaaatttttattgtcccactt

SEQ ID NO: 2170 - DNA, 2793 bp, Homo sapiens
gcggccgcggaggaggaggaaggggaggagggcgaggcgggaggtgcaggagggaccctcgccatgggtccacgggcctagagtggcggaagataccggcctggtgccaaactggctactgctgcttcctgtggcctccatggctgaggactggctggactgcccggccctgggccctggctggaagcgccgcgaagtctttcgcaagtcaggggccacctgtggacgctcagacacctattaccagagccccacaggagacaggatccgaagcaaagttgagctgactcgatacctgggccctgcgtgtgatctcaccctcttcgacttcaaacaaggcatcttgtgctatccagcccccaaggcccatcccgtggcggttgccagcaagaagcgaaagaagccttcaaggccagccaagactcggaaacgtcaggttggaccccagagtggtgaggtcaggaaggaggccccgagggatgagaccaaggctgacactgacacagccccagcttcattccctgctcctgggtgctgtgagaactgtggaatcagcttctcaggggatggcacccaaaggcagcggctcaaaacgttgtgcaaagactgtcgagcacagagaattgccttcaaccgggaacagagaatgtttaagcgtgtgggctgtggggagtgtgcagcctgccaggtaacagaagactgtggggcctgctccacctgcctcctgcagctgccccatgatgtggcatcggggctgttctgcaagtgtgaacggagacgctgcctccggattgtggaaaggagccgagggtgtggagtatgccggggctgtcagacccaagaggattgtggccattgccccatctgccttcgccctccccgccctggtctcaggcgccagtggaaatgtgtccagcgacgttgcctacggggtaaacatgcccgccgcaagggaggctgtgactccaagatggctgccaggcggcgccccggagcccagccactgcctccaccacccccatcacagtccccagagcccacagagccgcaccccagagccctggccccctcgccacctgccgagttcatctattactgtgtagacgaggacgagctacagcggctgctgcccagtgtctggtcagagtctgaggatggggcaggatcgcccccaccttaccgtcgtcgaaagaggcccagctctgcccgacggcaccatcttggccctaccttgaagcccaccttggctacacgcacagcccaaccagaccatacccaggctccaacgaagcaggaagcaggtggtggctttgtgctgcccccgcctggcactgaccttgtgtttttacgggaaggcgcaagcagtcctgtgcaggtgccgggccctgttgcagcttccacagaagccctgttgcaggaggcccagtgctctggcctgagttgggttgtggccttaccccaggtgaagcaagagaaggcggatacccaggacgagtggacaccaggcacagctgtcctgacttctcccgtattggtgcctggctgccctagcaaggcagtagacccaggcctgccttctgtgaagcaagagccacctgacccagaggaggacaaggaggagaacaaggatgattctgcctccaaattggccccagaggaagaggcaggaggggctggcacacccgtgatcacggagattttcagcctgggtggaacccgcttccgagatacagcagtctggttgccaaggtccaaagaccttaaaaaacctggagctagaaagcagtagactggaggcttctacagactgtaggattcaagtctgcagggcaggcactcgggaagggaagatggatgtaaagtgtgggagaccgaggacacagtggagcccacgagcacgagctggaacccacgaggatggcctggaacccatgtcagtctctcaccacctccagcttcgatgatgtgggtgtcctgcagaagaagctggtgcccttcctcacagagttaaatatgcatctggcccaggaattagagaagctgaaaggatgatcctggggaaggtggagcagctgcaggcctggctgcaggcctgactactgcccacaccaacgaggtgatctagcagatacatggcaacgtgtgaactgcaacaacgcctggtgccccagcaccaaccttccaagtgtaaaaacaatgtgctgctgcttcacttccgccctccggttatcaagcaaaatgtctcttgtggcccatcttactggaagagagttccgggaaacatagcctcaccaaggtgacacattacaaagccaccctaccatgaatccgctcccaagggtctcactgctcacctgaggataactcaatataactatgttgctgaaaatgcaaagctgaagaccatggatttcatggtgattccagcaagtacagagattctatgaagcccacccagaaaaaacttgctggtcctggctatttttgtgtcatttattcaagtattgagaacctggcctgtggtaggcactgtacttaatactaggatacagaaatgcaaaagatacggcccatgcaattttattaaatgcatcaatatgtattacaaatggtgaatggatttccaactttatcatggaatttaatgctgaatatatagaattcagaaaattgttgggaggacagcccttttgtgaaccttgtttggggcacagtaggaattggaaataatttagtttctatctctaagctgttctattttaaaattatttttaaatttttattgtcccactt

SEQ ID NO: 2171 - DNA, 1900 bp, Homo sapiens
gcggccgcggaggaggaggaaggggaggagggcgaggcgggaggtgcaggagggaccctcgccatgggtccacgggcctagagtggcggaagataccggcctggtgccaaactggctactgctgcttcctgtggcctccatggctgaggactggctggactgcccggccctgggccctggctggaagcgccgcgaagtctttcgcaagtcaggggccacctgtggacgctcagacacctattaccagagccccacaggagacaggatccgaagcaaagttgagctgactcgatacctgggccctgcgtgtgatctcaccctcttcgacttcaaacaaggcatcttgtgctatccagcccccaaggcccatcccgtggcggttgccagcaagaagcgaaagaagccttcaaggccagccaagactcggaaacgtcaggttggaccccagagtggtgaggtcaggaaggaggccccgagggatgagaccaaggctgacactgacacagccccagcttcattccctgctcctgggtgctgtgagaactgtggaatcagcttctcaggggatggcacccaaaggcagcggctcaaaacgttgtgcaaagactgtcgagcacagagaattgccttcaaccgggaacagagaatgtttaagcgtgtgggctgtggggagtgtgcagcctgccaggtaacagaagactgtggggcctgctccacctgcctcctgcagctgccccatgatgtggcatcggggctgttctgcaagtgtgaacggagacgctgcctccggattgtggaaaggagccgagggtgtggagtatgccggggctgtcagacccaagaggattgtggccattgccccatctgccttcgccctccccgccctggtctcaggcgccagtggaaatgtgtccagcgacgttgcctacggggtaaacatgcccgccgcaagggaggctgtgactccaagatggctgccaggcggcgccccggagcccagccactgcctccaccacccccatcacagtccccagagcccacagagccgcagccctacacgaaccgccggcagaaccgcaagtgcggggcctgtgcagcctgcctacggcggatggactgtggccgctgcgacttctgctgcgacaagcccaaattcgggggcagcaaccagaagcgccagaagtgtcgttggcgccaatgcctgcagtttgccatgaagcggctgctgcccagtgtctggtcagagtctgaggatggggcaggatcgcccccaccttaccgtcgtcgaaagaggcccagctctgcccgacggcaccatcttggccctaccttgaagcccaccttggctacacgcacagcccaaccagaccatacccaggctccaacgaagcaggaagcaggtggtggctttgtgctgcccccgcctggcactgaccttgtgtttttacgggaaggcgcaagcagtcctgtgcaggtgccgggccctgttgcagcttccacagaagccctgttgcaggcagtagacccaggcctgccttctgtgaagcaagagccacctgacccagaggaggacaaggaggagaacaaggatgattctgcctccaaattggccccagaggaagaggcaggaggggctggcacacccgtgatcacggagattttcagcctgggtggaacccgcttccgagatacagcagtctggttgccaagtctgcagggcaggcactcgggaagggaagatggatgtaaagtgtgggagaccgaggacacagtggagcccacgagcacgagctggaacccacgaggatggcctggaacccatgtcagtctctcaccacctccagcttcgatgatgtgggtgtcctgcagaagaagctggtgcccttcctcacagagttaa

SEQ ID NO: 2172 - DNA, 2961 bp, Homo sapiens
gcggccgcggaggaggaggaaggggaggagggcgaggcgggaggtgcaggagggaccctcgccatgggtccacgggcctagagtggcggaagataccggcctggtgccaaactggctactgctgcttcctgtggcctccatggctgaggactggctggactgcccggccctgggccctggctggaagcgccgcgaagtctttcgcaagtcaggggccacctgtggacgctcagacacctattaccagagccccacaggagacaggatccgaagcaaagttgagctgactcgatacctgggccctgcgtgtgatctcaccctcttcgacttcaaacaaggcatcttgtgctatccagcccccaaggcccatcccgtggcggttgccagcaagaagcgaaagaagccttcaaggccagccaagactcggaaacgtcaggttggaccccagagtggtgaggtcaggaaggaggccccgagggatgagaccaaggctgacactgacacagccccagcttcattccctgctcctgggtgctgtgagaactgtggaatcagcttctcaggggatggcacccaaaggcagcggctcaaaacgttgtgcaaagactgtcgagcacagagaattgccttcaaccgggaacagagaatgtttaagcgtgtgggctgtggggagtgtgcagcctgccaggtaacagaagactgtggggcctgctccacctgcctcctgcagctgccccatgatgtggcatcggggctgttctgcaagtgtgaacggagacgctgcctccggattgtggaaaggagccgagggtgtggagtatgccggggctgtcagacccaagaggattgtggccattgccccatctgccttcgccctccccgccctggtctcaggcgccagtggaaatgtgtccagcgacgttgcctacggggtaaacatgcccgccgcaagggaggctgtgactccaagatggctgccaggcggcgccccggagcccagccactgcctccaccacccccatcacagtccccagagcccacagagccgcaccccagagccctggccccctcgccacctgccgagttcatctattactgtgtagacgaggacgagctacagccctacacgaaccgccggcagaaccgcaagtgcggggcctgtgcagcctgcctacggcggatggactgtggccgctgcgacttctgctgcgacaagcccaaattcgggggcagcaaccagaagcgccagaagtgtcgttggcgccaatgcctgcagtttgccatgaagcggctgctgcccagtgtctggtcagagtctgaggatggggcaggatcgcccccaccttaccgtcgtcgaaagaggcccagctctgcccgacggcaccatcttggccctaccttgaagcccaccttggctacacgcacagcccaaccagaccatacccaggctccaacgaagcaggaagcaggtggtggctttgtgctgcccccgcctggcactgaccttgtgtttttacgggaaggcgcaagcagtcctgtgcaggtgccgggccctgttgcagcttccacagaagccctgttgcaggaggcccagtgctctggcctgagttgggttgtggccttaccccaggtgaagcaagagaaggcggatacccaggacgagtggacaccaggcacagctgtcctgacttctcccgtattggtgcctggctgccctagcaaggcagtagacccaggcctgccttctgtgaagcaagagccacctgacccagaggaggacaaggaggagaacaaggatgattctgcctccaaattggccccagaggaagaggcaggaggggctggcacacccgtgatcacggagattttcagcctgggtggaacccgcttccgagatacagcagtctggttgccaaggtccaaagaccttaaaaaacctggagctagaaagcagtagactggaggcttctacagactgtaggattcaagtctgcagggcaggcactcgggaagggaagatggatgtaaagtgtgggagaccgaggacacagtggagcccacgagcacgagctggaacccacgaggatggcctggaacccatgtcagtctctcaccacctccagcttcgatgatgtgggtgtcctgcagaagaagctggtgcccttcctcacagagttaaatatgcatctggcccaggaattagagaagctgaaaggatgatcctggggaaggtggagcagctgcaggcctggctgcaggcctgactactgcccacaccaacgaggtgatctagcagatacatggcaacgtgtgaactgcaacaacgcctggtgccccagcaccaaccttccaagtgtaaaaacaatgtgctgctgcttcacttccgccctccggttatcaagcaaaatgtctcttgtggcccatcttactggaagagagttccgggaaacatagcctcaccaaggtgacacattacaaagccaccctaccatgaatccgctcccaagggtctcactgctcacctgaggataactcaatataactatgttgctgaaaatgcaaagctgaagaccatggatttcatggtgattccagcaagtacagagattctatgaagcccacccagaaaaaacttgctggtcctggctatttttgtgtcatttattcaagtattgagaacctggcctgtggtaggcactgtacttaatactaggatacagaaatgcaaaagatacggcccatgcaattttattaaatgcatcaatatgtattacaaatggtgaatggatttccaactttatcatggaatttaatgctgaatatatagaattcagaaaattgttgggaggacagcccttttgtgaaccttgtttggggcacagtaggaattggaaataatttagtttctatctctaagctgttctattttaaaattatttttaaatttttattgtcccactt

SEQ ID NO: 2173 - DNA, 2815 bp, Homo sapiens
gcggccgcggaggaggaggaaggggaggagggcgaggcgggaggtgcaggagggaccctcgccatgggtccacgggcctagagtggcggaagataccggcctggtgccaaactggctactgctgcttcctgtggcctccatggctgaggactggctggactgcccggccctgggccctggctggaagcgccgcgaagtctttcgcaagtcaggggccacctgtggacgctcagacacctattaccagagccccacaggagacaggatccgaagcaaagttgagctgactcgatacctgggccctgcgtgtgatctcaccctcttcgacttcaaacaaggcatcttgtgctatccagcccccaaggcccatcccgtggcggttgccagcaagaagcgaaagaagccttcaaggccagccaagactcggaaacgtcaggttggaccccagagtggtgaggtcaggaaggaggccccgagggatgagaccaaggctgacactgacacagccccagcttcattccctgctcctgggtgctgtgagaactgtggaatcagcttctcaggggatggcacccaaaggcagcggctcaaaacgttgtgcaaagactgtcgagcacagagaattgccttcaaccgggaacagagaatgtttaagagccgagggtgtggagtatgccggggctgtcagacccaagaggattgtggccattgccccatctgccttcgccctccccgccctggtctcaggcgccagtggaaatgtgtccagcgacgttgcctacggggtaaacatgcccgccgcaagggaggctgtgactccaagatggctgccaggcggcgccccggagcccagccactgcctccaccacccccatcacagtccccagagcccacagagccgcaccccagagccctggccccctcgccacctgccgagttcatctattactgtgtagacgaggacgagctacagccctacacgaaccgccggcagaaccgcaagtgcggggcctgtgcagcctgcctacggcggatggactgtggccgctgcgacttctgctgcgacaagcccaaattcgggggcagcaaccagaagcgccagaagtgtcgttggcgccaatgcctgcagtttgccatgaagcggctgctgcccagtgtctggtcagagtctgaggatggggcaggatcgcccccaccttaccgtcgtcgaaagaggcccagctctgcccgacggcaccatcttggccctaccttgaagcccaccttggctacacgcacagcccaaccagaccatacccaggctccaacgaagcaggaagcaggtggtggctttgtgctgcccccgcctggcactgaccttgtgtttttacgggaaggcgcaagcagtcctgtgcaggtgccgggccctgttgcagcttccacagaagccctgttgcaggaggcccagtgctctggcctgagttgggttgtggccttaccccaggtgaagcaagagaaggcggatacccaggacgagtggacaccaggcacagctgtcctgacttctcccgtattggtgcctggctgccctagcaaggcagtagacccaggcctgccttctgtgaagcaagagccacctgacccagaggaggacaaggaggagaacaaggatgattctgcctccaaattggccccagaggaagaggcaggaggggctggcacacccgtgatcacggagattttcagcctgggtggaacccgcttccgagatacagcagtctggttgccaaggtccaaagaccttaaaaaacctggagctagaaagcagtagactggaggcttctacagactgtaggattcaagtctgcagggcaggcactcgggaagggaagatggatgtaaagtgtgggagaccgaggacacagtggagcccacgagcacgagctggaacccacgaggatggcctggaacccatgtcagtctctcaccacctccagcttcgatgatgtgggtgtcctgcagaagaagctggtgcccttcctcacagagttaaatatgcatctggcccaggaattagagaagctgaaaggatgatcctggggaaggtggagcagctgcaggcctggctgcaggcctgactactgcccacaccaacgaggtgatctagcagatacatggcaacgtgtgaactgcaacaacgcctggtgccccagcaccaaccttccaagtgtaaaaacaatgtgctgctgcttcacttccgccctccggttatcaagcaaaatgtctcttgtggcccatcttactggaagagagttccgggaaacatagcctcaccaaggtgacacattacaaagccaccctaccatgaatccgctcccaagggtctcactgctcacctgaggataactcaatataactatgttgctgaaaatgcaaagctgaagaccatggatttcatggtgattccagcaagtacagagattctatgaagcccacccagaaaaaacttgctggtcctggctatttttgtgtcatttattcaagtattgagaacctggcctgtggtaggcactgtacttaatactaggatacagaaatgcaaaagatacggcccatgcaattttattaaatgcatcaatatgtattacaaatggtgaatggatttccaactttatcatggaatttaatgctgaatatatagaattcagaaaattgttgggaggacagcccttttgtgaaccttgtttggggcacagtaggaattggaaataatttagtttctatctctaagctgttctattttaaaattatttttaaatttttattgtcccactta

SEQ ID NO: 2174 - DNA, 1550 bp, Homo sapiens
gcggagcggagcggcggcgggcgcagctagcgggtcggccgcggagcggaggtgcagctcggcttcccccggcacccctccccctcgggcgccagccccacccctccgccggccgggccgaccccgccgtactatcccctgcggcgcgagcccggggcggctccaagcgccccccagcagacccccatcatgggcagccagagctccaaggctccccggggcgacgtgaccgccgaggaggcagcaggcgcttcccccgcgaaggccaacggccaggagaatggccacgtgaaaagcaatggagacttatcccccaagggtgaaggggagtcgccccctgtgaacggaacagatgaggcagccggggccactggcgatgccatcgagccagcaccccctagccagggtgctgaggccaagggggaggtcccccccaaggagacccccaagaagaagaagaaattctctttcaagaagcctttcaaattgagcggcctgtccttcaagagaaatcggaaggagggtgggggtgattcttctgcctcctcacccacagaggaagagcaggagcagggggagatcggtgcctgcagcgacgagggcactgctcaggaagggaaggccgcagccacccctgagagccaggaaccccaggccaagggggcagaggctagtgcagcctcagaagaagaggcagggccccaggctacagagccatccactccctcggggccggagagtggccctacaccagccagcgctgagcagaatgagtagctaggtaggggcaggtgggtgatctctaagctgcaaaaactgtgctgtccttgtgaggtcactgcctggacctggtgccctggctgccttcctgtgcccagaaaggaaggggctattgcctcctcccagccacgttccctttcctcctctccctcctgtggattctcccatcagccatctggttctcctcttaaggccagttgaagatggtcccttacagcttcccaagttaggttagtgatgtgaaatgctcctgtccctggccctacctccttccctgtccccacccctgcataaggcagttgttggttttcttccccaattcttttccaagtaggttttgtttaccctactccccaaatccctgagccagaagtggggtgcttatactcccaaaccttgagtgtccagccttcccctgttgtttttagtctcttgtgctgtgcctagtggcacctgggctggggaggacactgccccgtctaggtttttataaatgtcttactcaagttcaaacctccagcctgtgaatcaactgtgtctcttttttgacttggtaagcaagtattaggctttggggtggggggaggtctgtaatgtgaaacaacttcttgtcttttttttctcccactgttgtaaataacttttaatggccaaaccccagatttgtacttttttttttttctaactgctaaaaccattctcttccacctggttttactgtaacatttggaaaaggaataaatgtcgtccctttaaaaaaaaaaaaaaaa

SEQ ID NO: 2175 - DNA, 1323 bp, Homo sapiens
gtggaggttgctgctatgagagagaaaaaaaaaaacagccacaatagagattctgccttcaaaggttggcttgccacctgaagcagccactgcccagggggtgcaaagaagagacagcagcgcccagcttggaggtgctaactccagaggccagcatcagcaactgggcacagaaaggagccgcctgggcagggaccatggcacggccacatccctggtggctgtgcgttctggggaccctggtggggctctcagctactccagcccccaagagctgcccagagaggcactactgggctcagggaaagctgtgctgccagatgtgtgagccaggaacattcctcgtgaaggactgtgaccagcatagaaaggctgctcagtgtgatccttgcataccgggggtctccttctctcctgaccaccacacccggccccactgtgagagctgtcggcactgtaactctggtcttctcgttcgcaactgcaccatcactgccaatgctgagtgtgcctgtcgcaatggctggcagtgcagggacaaggagtgcaccgagtgtgatcctcttccaaacccttcgctgaccgctcggtcgtctcaggccctgagcccacaccctcagcccacccacttaccttatgtcagtgagatgctggaggccaggacagctgggcacatgcagactctggctgacttcaggcagctgcctgcccggactctctctacccactggccaccccaaagatccctgtgcagctccgattttattcgcatccttgtgatcttctctggaatgttccttgttttcaccctggccggggccctgttcctccatcaacgaaggaaatatagatcaaacaaaggagaaagtcctgtggagcctgcagagccttgtcgttacagctgccccagggaggaggagggcagcaccatccccatccaggaggattaccgaaaaccggagcctgcctgctccccctgagccagcacctgcgggagctgcactacagccctggcctccacccccaccccgccgaccatccaagggagagtgagacctggcagccacaactgcagtcccatcctcttgtcagggccctttcctgtgtacacgtgacagagtgccttttcgagactggcagggacgaggacaaatatggatgaggtggagagtgggaagcaggagcccagccagctgcgcctgcgctgcaggagggcgggggctctggttgtaaaacacacttcctgctgcgaaagacccacatgctacaagacgggcaaaataaagtgacagatgaccaccctgcaaaaaaaaaaaaaaaaaa

SEQ ID NO: 2176 - DNA, 1925 bp, Homo sapiens
ggctggctgcggcggccggggaggccggggaggccgcggcgcggtcactgcgagccgagccgagccgcgccgagccgcgccgatcgccatccggcctcggcactcgcgcgcgatcccggccggcggcgcggcccggcgggccaggcggcgccacagcccatggagctcgagaacatcgtagcgaacacggtgctactcaaggcccgggaaggtggcggtggaaatcgcaaaggcaaaagcaagaaatggcggcagatgctccagttccctcacatcagccagtgcgaagagctgcggctcagcctcgagcgtgactatcacagcctgtgcgagcggcagcccattgggcgcctgctgttccgagagttctgtgccacgaggccggagctgagccgctgcgtcgccttcctggatggggtggccgagtatgaagtgaccccggatgacaagcggaaggcatgtgggcggcagctaacgcagaattttctgagccacacgggtcctgacctcatccctgaggtcccccggcagctggtgacgaactgcacccagcggctggagcagggtccctgcaaagaccttttccaggaactcacccggctgacccacgagtacctgagcgtggccccttttgccgactacctcgacagcatctacttcaaccgtttcctgcagtggaagtggctggaaaggcagccagtgaccaaaaacaccttcaggcaataccgagtcctgggcaaaggtggctttggggaggtgtgcgcctgccaggtgcgggccacaggtaagatgtatgcctgcaagaagctagagaaaaagcggatcaagaagcggaaaggggaggccatggcgctgaacgagaagcagatcctggagaaagtgaacagtaggtttgtagtgagcttggcctacgcctatgagaccaaggacgcgctgtgcctggtgctgacactgatgaacgggggcgacctcaagttccacatctaccacatgggccaggctggcttccccgaagcgcgggccgtcttctacgccgccgagatctgctgtggcctggaggacctgcaccgggagcgcatcgtgtacagggacctgaagcccgagaacatcttgctggatgaccacggccacatccgcatctctgacctgggactagctgtgcatgtgcccgagggccagaccatcaaagggcgtgtgggcaccgtgggttacatggctccggaggtggtgaagaatgaacggtacacgttcagccctgactggtgggcgctcggctgcctcctgtacgagatgatcgcaggccagtcgcccttccagcagaggaagaagaagatcaagcgggaggaggtggagcggctggtgaaggaggtccccgaggagtattccgagcgcttttccccgcaggcccgctcactttgctcacagctcctctgcaaggaccctgccgaacgcctggggtgtcgtgggggcagtgcccgcgaggtgaaggagcaccccctctttaagaagctgaacttcaagcggctgggagctggcatgctggagccgcccttcaagcctgacccccaggccatttactgcaaggatgttctggacattgaacagttctctacggtcaagggcgtggagctggagcctaccgaccaggacttctaccagaagtttgccacaggcagtgtgcccatcccctggcagaacgagatggtggagaccgagtgcttccaagagctgaatgtctttgggctggatggctcagttcccccagacctggactggaagggccagccacctgcacctcctaaaaagggactgctgcagagactcttcagtcgccaaaggtgagcagtgtgggctccccgtgggttggccttgctgcctggcctcggggagccacgggcagcccttccatggcaaaggcaagatgt

SEQ ID NO: 2177 - DNA, 2930 bp, Homo sapiens
ggctggctgcggcggccggggaggccggggaggccgcggcgcggtcactgcgagccgagccgagccgcgccgagccgcgccgatcgccatccggcctcggcactcgcgcgcgatcccggccggcggcgcggcccggcgggccaggcggcgccacagcccatggagctcgagaacatcgtagcgaacacggtgctactcaaggcccgggaaggtggcggtggaaatcgcaaaggcaaaagcaagaaatggcggcagatgctccagttccctcacatcagccagtgcgaagagctgcggctcagcctcgagcgtgactatcacagcctgtgcgagcggcagcccattgggcgcctgctgttccgagagttctgtgccacgaggccggagctgagccgctgcgtcgccttcctggatggggtggccgagtatgaagtgaccccggatgacaagcggaaggcatgtgggcggcagctaacgcagaattttctgagccacacgggtcctgacctcatccctgaggtcccccggcagctggtgacgaactgcacccagcggctggagcagggtccctgcaaagaccttttccaggaactcacccggctgacccacgagtacctgagcgtggccccttttgccgactacctcgacagcatctacttcaaccgtttcctgcagtggaagtggctggaaaggcagccagtgaccaaaaacaccttcaggcaataccgagtcctgggcaaaggtggctttggggaggtgtgcgcctgccaggtgcgggccacaggtaagatgtatgcctgcaagaagctagagaaaaagcggatcaagaagcggaaaggggaggccatggcgctgaacgagaagcagatcctggagaaagtgaacagtaggtttgtagtgagcttggcctacgcctatgagaccaaggacgcgctgtgcctggtgctgacactgatgaacgggggcgacctcaagttccacatctaccacatgggccaggctggcttccccgaagcgcgggccgtcttctacgccgccgagatctgctgtggcctggaggacctgcaccgggagcgcatcgtgtacagggacctgaagcccgagaacatcttgctggatgaccacggccacatccgcatctctgacctgggactagctgtgcatgtgcccgagggccagaccatcaaagggcgtgtgggcaccgtgggttacatggctccggaggtggtgaagaatgaacggtacacgttcagccctgactggtgggcgctcggctgcctcctgtacgagatgatcgcaggccagtcgcccttccagcagaggaagaagaagatcaagcgggaggaggtggagcggctggtgaaggaggtccccgaggagtattccgagcgcttttccccgcaggcccgctcactttgctcacagctcctctgcaaggaccctgccgaacgcctggggtgtcgtgggggcagtgcccgcgaggtgaaggagcaccccctctttaagaagctgaacttcaagcggctgggagctggcatgctggagccgcccttcaagcctgacccccaggccatttactgcaaggatgttctggacattgaacagttctctacggtcaagggcgtggagctggagcctaccgaccaggacttctaccagaagtttgccacaggcagtgtgcccatcccctggcagaacgagatggtggagaccgagtgcttccaagagctgaatgtctttgggctggatggctcagttcccccagacctggactggaagggccagccacctgcacctcctaaaaagggactgctgcagagactcttcagtcgccaagattgctgtggaaactgcagcgacagcgaggaagagctccccacccgcctctagcccccagcccgaggcccccaccagcagttggcggtagcagctactccgagcgccgtttacagttttgcacagtgatcttccccattgtccactcaagtcgtggcctggggaacacagacggagctgtccccagtgtcctccgtccctcagcccctggcctggctgagtttggcagggcctgggccatccctgggacaaaggtgcgtcccttcagctcttctccgtggagctcggggctttctgtatttatgtatttgtacgaatgtatatagcgaccagagcattcttaattcccgccgcagacctggcgcccccgccttggctcctgggggcagccagccctggctgggagagcgggagctggcagaggagccactgccaaactcaaggctcctctggcccagcttggatggctgagggtggtcacacccctgagccttcagcactgtgctggccaccccggcctctgagtaagactcgtgcctccccctgctgccctgggctcaggctgctaccctctggggcccaaagctgtcccttctcagtgcttgtcagcgctgggtctggggcctctgtatgccctaggcctgtgccaaagtggccagagattgggctgcctgtgatacccatcagcccactgccccggccggcccagataggtctgcctctgccttccagctcccacagcctggtccctgatactgggctctgtcctgcagacacctctttcagaaacgcccaagcccagcccctaggagggggtggggcatccctggtcaaccctcaaacattccggactcccctcataacaatagacacatgtgcccagcaataatccgccccttcctgtgtgcgcctgtggggtgcgtgcgcgcgcgtgtgtacctgtgtgggtgaaggggatagggcgaggctgtgcctgtgccccaggtcccagccctggcccttcccagactgtgatggccatcctggtcccagtgttagggtagcatgggattacagggccctgttttttccatatttaaagccaatttttatta

SEQ ID NO: 2178 - DNA, 2932 bp, Homo sapiens
ggctggctgcggcggccggggaggccggggaggccgcggcgcggtcactgcgagccgagccgagccgcgccgagccgcgccgatcgccatccggcctcggcactcgcgcgcgatcccggccggcggcgcggcccggcgggccaggcggcgccacagcccatggagctcgagaacatcgtagcgaacacggtgctactcaaggcccgggaaggtggcggtggaaatcgcaaaggcaaaagcaagaaatggcggcagatgctccagttccctcacatcagccagtgcgaagagctgcggctcagcctcgagcgtgactatcacagcctgtgcgagcggcagcccattgggcgcctgctgttccgagagttctgtgccacgaggccggagctgagccgctgcgtcgccttcctggatggggtggccgagtatgaagtgaccccggatgacaagcggaaggcatgtgggcggcagctaacgcagaattttctgagccacacgggtcctgacctcatccctgaggtcccccggcagctggtgacgaactgcacccagcggctggagcagggtccctgcaaagaccttttccaggaactcacccggctgacccacgagtacctgagcgtggccccttttgccgactacctcgacagcatctacttcaaccgtttcctgcagtggaagtggctggaaaggcagccagtgaccaaaaacaccttcaggcaataccgagtcctgggcaaaggtggctttggggaggtgtgcgcctgccaggtgcgggccacaggtaagatgtatgcctgcaagaagctagagaaaaagcggatcaagaagcggaaaggggaggccatggcgctgaacgagaagcagatcctggagaaagtgaacagtaggtttgtagtgagcttggcctacgcctatgagaccaaggacgcgctgtgcctggtgctgacactgatgaacgggggcgacctcaagttccacatctaccacatgggccaggctggcttccccgaagcgcgggccgtcttctacgccgccgagatctgctgtggcctggaggacctgcaccgggagcgcatcgtgtacagggacctgaagcccgagaacatcttgctggatgaccacggccacatccgcatctctgacctgggactagctgtgcatgtgcccgagggccagaccatcaaagggcgtgtgggcaccgtgggttacatggctccggaggtggtgaagaatgaacggtacacgttcagccctgactggtgggcgctcggctgcctcctgtacgagatgatcgcaggccagtcgcccttccagcagaggaagaagaagatcaagcgggaggaggtggagcggctggtgaaggaggtccccgaggagtattccgagcgcttttccccgcaggcccgctcactttgctcacagctcctctgcaaggaccctgccgaacgcctggggtgtcgtgggggcagtgcccgcgaggtgaaggagcaccccctctttaagaagctgaacttcaagcggctgggagctggcatgctggagccgcccttcaagcctgacccccaggccatttactgcaaggatgttctggacattgaacagttctctacggtcaagggcgtggagctggagcctaccgaccaggacttctaccagaagtttgccacaggcagtgtgcccatcccctggcagaacgagatggtggagaccgagtgcttccaagagctgaatgtctttgggctggatggctcagttcccccagacctggactggaagggccagccacctgcacctcctaaaaagggactgctgcagagactcttcagtcgccaaaggattgctgtggaaactgcagcgacagcgaggaagagctccccacccgcctctagcccccagcccgaggcccccaccagcagttggcggtagcagctactccgagcgccgtttacagttttgcacagtgatcttccccattgtccactcaagtcgtggcctggggaacacagacggagctgtccccagtgtcctccgtccctcagcccctggcctggctgagtttggcagggcctgggccatccctgggacaaaggtgcgtcccttcagctcttctccgtggagctcggggctttctgtatttatgtatttgtacgaatgtatatagcgaccagagcattcttaattcccgccgcagacctggcgcccccgccttggctcctgggggcagccagccctggctgggagagcgggagctggcagaggagccactgccaaactcaaggctcctctggcccagcttggatggctgagggtggtcacacccctgagccttcagcactgtgctggccaccccggcctctgagtaagactcgtgcctccccctgctgccctgggctcaggctgctaccctctggggcccaaagctgtcccttctcagtgcttgtcagcgctgggtctggggcctctgtatgccctaggcctgtgccaaagtggccagagattgggctgcctgtgatacccatcagcccactgccccggccggcccagataggtctgcctctgccttccagctcccacagcctggtccctgatactgggctctgtcctgcagacacctctttcagaaacgcccaagcccagcccctaggagggggtggggcatccctggtcaaccctcaaacattccggactcccctcataacaatagacacatgtgcccagcaataatccgccccttcctgtgtgcgcctgtggggtgcgtgcgcgcgcgtgtgtacctgtgtgggtgaaggggatagggcgaggctgtgcctgtgccccaggtcccagccctggcccttcccagactgtgatggccatcctggtcccagtgttagggtagcatgggattacagggccctgttttttccatatttaaagccaatttttatta

SEQ ID NO: 2179 - DNA, 1853 bp, Homo sapiens
ggcgcggcgcggcgcagtcggctcgagtactccccgtaacgaggaggtgttctcggccgtcccacccttcactgccgtctccgggctgcgccgccggagccgggacgcgcctccgcagccctcgccgcctccatccccgcggccgcagctcctctcgccgtccgcgcgcacaccatgacgaagaacgagaagaagtccctcaaccagagcctggccgagtggaagctcttcatctacaacccgaccaccggagaattcctggggcgcaccgccaagagctggggtttgatcttgctcttctacctagttttttatgggttcctggctgcactcttctcattcacgatgtgggttatgcttcagactctcaacgatgaggttccaaaataccgtgaccagattcctagcccaggactcatggtttttccaaaaccagtgaccgcattggaatatacattcagtaggtctgatccaacttcgtatgcagggtacattgaagaccttaagaagtttctaaaaccatatactttagaagaacagaagaacctcacagtctgtcctgatggagcactttttgaacagaagggtccagtttatgttgcatgtcagtttcctatttcattacttcaagcatgcagtggtatgaatgatcctgattttggctattctcaaggaaacccttgtattcttgtgaaaatgaacagaataattggattaaagcctgaaggagtgccaaggatagattgtgtttcaaagaatgaagatataccaaatgtagcagtttatcctcataatggaatgatagacttaaaatatttcccatattatgggaaaaaactgcatgttgggtatctacagccattggttgctgttcaggtcagctttgctcctaacaacactgggaaagaagtaacagttgagtgcaagattgatggatcagccaacctaaaaagtcaggatgatcgtgacaagtttttgggacgagttatgttcaaaatcacagcacgtgcatagtatgagtaggatatctccacagagtaaatgttgtgttgtctgtcttcattttgtaacagctggaccttccattctagaattatgagaccaccttggagaaaggtgtgtggtacatgacattgggttacatcataacgtgcttccagatcatagtgttcagtgtcctctgaagtaactgcctgttgcctctgctgccctttgaaccagtgtacagtcgccagatagggaccggtgaacacctgattccaaacatgtaggatgggggtcttgtcctctttttatgtggtttaattgccaagtgtctaaagcttaatatgccgtgctatgtaaatattttatggatataacaactgtcatattttgatgtcaacagagttttagggataaaatggtacccggccaacatcaagtgactttatagctgcaagaaatgtggtatgtggagaagttctgtatgtgaggaaggaaaaaaagaaaataaaagtgtgtttgaaaaatattatcttgggttctttgtaaaatttattttttacatgctgaattagcctcgatctttttgattaagagcacaaacttttttttgtaaaacatgtaaaaaaaaaaactgggattaatttttagtgttggaactgcctcttattttaggctgtagataaaatagcatttttaggttagccagtgtgactatgcacctaattttttatgagattaaattcataagacttaatttgtacaatagtttgtgaaatatcttgttactgcttttatttagcagactgtggactgtaataaagtatataaattgtgaaatataaaaacttggaacttattcaaagctt

SEQ ID NO: 2180 - DNA, 2093 bp, Homo sapiens
gcgcatgagcagtgctgctcccaacccgccagtcgcggtctccggcgccagctacgccgctgccgctgtcactatggcccattacaaagccgccgactcgaagcgtgagcagttccggaggtacttggagaagtcgggggtgctggacacgctgaccaaggtgttggtagccttatatgaagaaccagagaaacctaacagtgctttggattttttaaagcatcacttaggagctgctactccagaaaatccagaaatagagctgcttcgcctagaactggccgaaatgaaagagaagtatgaagctattgtagaagaaaataaaaaactgaaagcaaagcttgctcagtatgaaccacctcaggaggagaagcgtgctgaataggattcttctcagtttgaaagacaatgaaaaatggttttgtatgacttgaatagtttgtatagtatataatcttttctgaacagatgctatagaactcttttaatatgtttaattcacctatcacactctgttaaaaacacatagaatcatcaataaaaactcaatataactttctttgggtcttaaagcaggagaatccaaagtaaatcctgaacaaaacctaaacacagccatctaactcattaccttaaaagacattctgtttattagtctgattaggaatgatggcactggttgtattttagccaagacagtttagcatggagctattccttggtgcagttcaggatatgaacacaggtacagtcattctttgaaggtgacactgttctgtatattccctataggcagctggagagatctgtgtgacacaagatgcttttgtacgggttcccatgaatcttctgctcttgtttgtgtgacatggaacaaataacttctttgccaccactttgccttagataactgtgtgtgtgtgtgccagtttgaactctgacaccacattttccttctatgcaatcatgcctgtctgataatcttgcattgctttcctctgagctttagtgggtcctagttgcacactggcctttctgtgctgtttttcaatttgcctaataatagcagttaccctgattgtaatttatgtaactttaaacaggatcacactgtaccccctgcctgccttatttgcttactgagcacaggacagaggcaatatacaactctgggttcacacacaagctgagatgagaagaggaatgagccatatattggggaaaatcatagtttgtaggtataattatatagtgcttttctccctcaaagtatttttctagccttgaattcattttatcttcattatccctgtgaagtaggtgggacaagtataaggggaagaggggtgctgaatttttaggccaaagactgatattaatacaaatcactcactaactgtagagccttgggcattatcagtgaactactctgagatttactgtcttcatctgtttaatgagtagaatgtccgtgatgcctacctcacagggttgttgtgagggtcaaatgagaatgtatgtgaaagatttgtaaatggtaaagcactatattcttgtttgttagtcctttttcctttctttgggtagacctacagtcagatgttttgttttatggatcacttattttccttactggtagactgtcgttttatagacatattcctatttcatatattctctccctgttgttagagaacctatctttgtttttggtcaaaacacacatagaaaacaaaatgatccaatgaaaactggtttaactagcaaaagccttggcacctgttggagactatgaccaagccaataaaaagggcatttaaatcagccctgttagtaggaatgtggctatggctggtgcctcttctagtcacaagtttgtttttggagggggtccagaagatcattcccttgcatagatttctcttttaccaatttgagtgcctcctacatgggcagcagtggactaagtgctgggtgtgataaagaggaatgacttaattatgagactgtatataatcaaatacagtgtgggttaggacctgtggcagaccattataataaagcatggccccgtgagggttttgaaagagaaa

SEQ ID NO: 2181 - DNA, 2757 bp, Homo sapiens
ctggagccgaggcgcaggtggcgctgggttgcctgcgaggccgctggccaggcctgagcctctgccaccatggccattgtgcagactctgccagtgccactggagcctgctcctgaagctgccactgccccacaagctccagtcatgggtagtgtgagcagccttatctcaggccggccctgtcccggggggccagctcctccccgccaccacggccctcctgggcccaccttcttccgccagcaggatggcctgctacggggtggctatgaggcacaggagccgctgtgcccagctgtgccccctaggaaggctgtccctgtcaccagcttcacctacatcaatgaggacttccggacagagtcaccccccagcccaagcagtgatgttgaggatgcccgagagcagcgggcacacaatgcccacctccgcggcccaccaccaaagctcatccctgtctctggaaagctggagaagaacatggagaagatcctgatccgcccaacagccttcaagccagtgctgcccaaacctcgaggggctccgtccctgcctagcttcatgggtcctcgggccaccgggctgtctgggagccagggcagcctgacgcagctgtttgggggccctgcctcctcctcctcctcttcctcctcctcttcagctgctgacaaacccctggcatttagtggctgggccagtggctgcccatcagggacgctatccgactctggccgaaactcactgtccagcctgcccacctacagcaccggaggtgccgagccaaccaccagctccccaggcgggcacctgccttcccatggctctgggcgaggggcactgcctgggccagcccgaggggtccctactgggccctcccactcagacagtggccggtcctcctccagcaagagcacaggctccctagggggccgtgtggctggggggcttttgggcagtggtactcgggcctcccctgacagcagctcctgtggggagcgctcaccaccacccccgcctccacctccttcggatgaggccctgctgcactgtgtcctggaaggaaagctccgagaccgggaggcagagcttcagcagctgcgggacagtctggacgagaatgaggctaccatgtgccaggcatacgaggagcggcagcggcactggcagcgagagcgtgaggccctgcgagaggactgtgcggcccaggcacagcgggcacagcgggcccaacagctgctgcagctgcaggtgttccagctgcagcaggagaagcggcaattgcaggacgacttcgcacagctgctgcaggagcgcgaacagctggagcggcgctgcgccaccttggagcgggagcagcgggagctcgggccgaggcttgaggagaccaagtgggaggtgtgccagaaatcaggcgagatctccctgctgaagcagcagctgaaagagtctcaggcagagctggtgcagaagggcagcgagctggtggctctgcgggtggcgctgcgggaggcccgtgctacgctgcgggtcagtgagggccgtgcgcggggtctacaggaggccgcccgagctcgggagctggagctggaagcctgttcccaggagctgcagcgacaccgccaggaagctgagcagctgcgggagaaagctgggcagttggatgctgaggcggccggactccgggagccccctgtgccacctgccaccgctgacccattcctcctggcagagagtgatgaggccaaagtgcagcgggcagcagccggggttgggggcagcttgcgggcccaggtggagcgattgcgggtggagctgcagcgggagcggcggcggggtgaggagcagcgggacagctttgagggggagcggctggcctggcaggcagagaaggagcaggtgatccgctaccagaagcagctgcagcacaactacatccagatgtaccggcgcaaccggcagctagagcaggagctgcagcagctcagcctggagctggaggcccgggagctcgctgacctgggcctggccgagcaggccccctgcatctgcctggaggagatcactgctactgagatctagggccctcagcaaccagctctgtagggagctctgccagaggggcagcagctgcagatccacttaggccccagggtccacggatggccccaaaggctgagggccccaaagccacttgtctcctaggatccaggcctctgggcttctgccaagaactcagggtggccctatgacttggaggagcaagatcagaccgctcaaaggtccccgtgttcactgttacccagaggctcttgttactacccacttcattccccaccgctgccagtgccactgccaaccctgttcacaggcgcttccagcccactccagccaggggagcagggaagaagaaggggctccctcctcttcacattccccccgaccccaaagccagagaaagccagatggcaccagctgctccggatgtgcctgcccacattgggggacagggccgggcctgggctcggttcccaggtttgagctctgcagcctctctcctggagtgagggggctgaagtcagaccaaaggaagaactcagaaatgtcttgtttatttgtgtttgtgaccaagcagcctctcccttcacccaggtttatggcctcgttttcacttgtatatttttcacactgtaaatttcttgtacaaacccaaagaaaaaattaaaaaaaatttttttgtttaaaaaaaaaaaaaaaaaa

SEQ ID NO: 2182 - DNA, 5052 bp, Homo sapiens
agtcccagctacttgggaggctgaggcaggaggattgcttgagcccaggagttggaggctacaataagctatgatccagctgctgcactctagcttgggtgacagagaccctgtcttcttaagacaaatccagaatttgggacatcttataatttagttgccctggattcttcaaaagtttaagctatgaagaaggacatccctcacactctgaaacagatctccttcagagacagagttttgcagcctctcatcagcttcctggatatgctcccacacctcagcctactggtctttctggaatatttgatactagtgtgaacagtgccagcagtaacactaaagagtcttcagtgatgaattttctgtctactgctgaatcccgaactgctcaggctgctgcttcaggaactactctcttaccacaattcagggctccatcctggcagacaggcatgcattcctcagcagcaactgagctgtttgctactggacctttgccaagcactggaacacttccaccatctctctctgcttatcagcatcccaccaccttcagcaatagaaactttgctaccacttcacctttggtgcttcaggattcaacttttaacactacatcaaatggaattttaagtcatcatgaccctttgctacaaatcaagacttcccagggaactgttccaactgctttggcatttgagcgcctgggcagttctgtattaagtaacagcataccacctcagtcttcaacataccgctcagctcaagagtctgcaccccatcttttacaacctcaatttagtttgttgccttcagcacttgggggatcccagcagactcctcaagcctacagttcaactctctttactagttctactgcttccattgaaagagctcttcttcgagaatgtagtgttattaaacaccatcagcggccttcaggtacccagtcaattcaggcacaactgactggttcacagcactccttacatagttatctatcaaattcaagtgtagttaattttcaggaaacaaccaggcagtcatctttatcctgtagcccaattggagattccactcagaatttgccagactctagcccgacccagaattatatttctatgcattcttcccaaaatgttcagactcaagagtcatcatctccccagtcccagaagtttttgcctgctgtccagtcatcatcttttgcatcctctactcattgtcagacattacaaaataacataacttcccctgacccaaagtcttatgctgaaagaaagcttgactcagatgtgtatccatcttcaaagcaagaagatggttttccaatgcaagagttacaggtgttgcagccacaagcatctcttgagtcatcaacccaaaggctatctgatggagaaattaatgctcaagaatcaacttataaggtgtcaaaggcagatgacagatattctcagagtgtaatcagaagtaattcccgtcttgaagatcaagttattggggttgctctgcaagcatcaaaaaaagaagaaagtgttgttggttcagtgacacaacttaaccaacaaattggccaagtcaataatgcagctacccttgatcttaagaactcaactaatttaatacagactccacaaataaggttgaatactaaagacttaaagcagcaacatcctctcatacttaaggtgcatgagtccaaggtccaggaacagcacgatcaaataattaatgcttcatctcagattcaaattccaaatcatgctttagggcatggccatcaggcatctcttcctaatacacaggtccttttagattctgcctgtgatttacaaattcttcagcagtcaatactgcaggcaggtttaggtcaagtaaaggcatctttacaagcacagcgtgttcaaagccctcaacaaatagtacatcccttccttcagatggaaggtcatgttattcaaagcaatggtgatcattctcagcagcaactccatcctcaaaattctgaagttatgaaaatggacctctctgagtcttcaaaaccattacaacaacatctaacaacaaagggccattttagtgaaacaaatcaacatgattcaaagaatcagtttgtttctcttggatcgatgtgtttcccagaggcagtgcttcttagtgatgaaagaaatattttatcaaatgtagatgatatcttagcagctacagcagcagcttgtggagttacacctactgatttttccaagtcaacttcaaatgaaaccatgcaggctgttgaagatggtgattctaaatctcattttcagcagtcattagatgtcaggcatgtgacttcagattttaactctatgacagctacagtaggaaagccacagaatataaatgatacttccttaaatggaaatcaggttactgtgaacctttcaccagtacctgcccttcagtcaaaaatgactcttgatcaacagcacattgaaacacctggtcaaaatataccaactaaagtaacttcagcagtggttggaccaagtcatgaagtccaggagcaaagttctggcccattcaagaaacagtctgctaccaatcttgaatctgaagaagacagtgaagctcctgttgatagtacattaaataataacagaaaccaagagtttgtttctagtagtagaagtataagtggagagagtgctacatcagagagtgaatttaccttagggggtgacgacagtggtgtgtcaatgaacccagctaggagtgcacttgcactgttggccatggcccaatctggggatgcagtcagtgtcaagattgaagaagaaaaccaagatttaatgcattttaaccttcaaaagaaaagagctaaaggaaaagggcaagttaaagaggaagacaacagtaatcagaaacagctgaaaagacctgcccaaggcaaacgccagaatccaaggggaacagatatttacttaccgtatactcctccttcctcagaaagctgccatgatggttatcagcatcaagaaaaaatgagacagaagatcaaagaggtggaggaaaaacaaccggaagtcaaaacaggatttattgcttctttcttagattttctgaaatccgggcccaagcagcagttttccactcttgctgtacgaatgcctaacaggactagacggccagggacccagatggttcgtacattttgtcccccaccacttcccaagccttcatctacaacacccacacctttagtgtctgaaactggcggtaacagtccatcagataaagttgataatgaacttaaaaacttggaacatttatcttcattttcttctgatgaagatgatcctggatatagtcaagatgcttataaaagcgtctctactcccttaactactttggatgctacttctgataaaaagaagaaaacagaagccctacaggtggcaactactagcccaactgccaatactactggtactgctactacttcctcaaccactgtgggtgcagttaagcaagaacctctccactctacttcatatgcagtaaatattctggaaaatataagctcttcagaatcctcaaagcccattgaacttgatggtcttccttcagaccagtttgcaaaaggacaggacactgttgccatagaaggttttacagatgaggaggacacagaaagcggaggagaaggccaatacagagagcgtgatgaatttgtggtaaagatagaagacatagagacttttaaggaggctttaaaaacaggaaaagaacctccagctatttggaaagtacaaaaagctttattacagaaatttgttcctgaaattcgagatggtcaaagagaatttgctgctacaaatagttatcttggatattttggagatgcaaagagtaaatacaaaagaatatatgtgaagttcattgaaaatgcaaacaagaaggaatatgtcagagtgtgttctaaaaagccaagaaataaaccttcacaaactatcagaactgttcaagctaagccaagtagtagcagtaaaacttctgatcctctagcatcaaaaactacaactacaaaagccccttccgtgaaacccaaagttaaacagccaaaagtaaaggctgagccaccaccaaagaaacggaaaaaatggaaagaagaattttcatcatcccaatctgactcatctcctgagatccatactagtagtagtgacgatgaggaatttgaacctcccgctccctttgtcactcgctttttgaacacaagagcaatgaaggaaacctttaagagctacatggaatagcttgttagcattgccttggaccctgacacaatgcaagccttagagaagagcaatgatgagctacttttacctcatatgaaaaaaatagatggcatgctaaatgataaccgaaagagacttcttttgaatcttcatttggatcaatcattcaagaatgctttggaaagttttcctgaactaacaataattactcgagattctaaagcaaagagtggaggaactgctatttctaaaatcaaaatgaatggcaaagcctataataagaaaactctaaggacttctaaaacaaccaccaaatctgcacaagagtttgctgtcgatccagagaaaatacagttgtattctttgtatcattcactccatcattataagtaccatgtttatctgatatgtaaggatgagatttcttcggtgcagaaaaaaaatgaagatttaggacaggaggaaattgttcaactttgtatgaaaaatgtaaaatgggtggaggacctctttgaaaaatttggagaacttctaaatcataccggaatgttgggagaaatgcaaagcgtctcagttagcagcaccagaagatcagagcagcagaatattctagaggctgggaagtccaagatcaaggtacctgtatctggtgactgttgagagccttcttgctgtgccttagaatgaaagaaggtggagggcaaggtgatatgaacaatgtgcctttacatggcaaaagaatgaaagaaagtaaacctattcccac

SEQ ID NO: 2183 - DNA, 1880 bp, Homo sapiens
gctgccccggaagtggacggcacgccgcggcggggtgggtgcaagatgccgctgccggttcaggtgtttaacttgcagggggccgtggagcccatgcagatcgacgtggacccccaggaagacccgcagaatgcacctgacgtcaactacgtggtggagaaccccagcctggatctggaacagtacgcggccagctacagcggcctgatgcgcatcgaacggctgcagttcattgctgatcactgccccacgctgcgggtggaggccctgaagatggccctctccttcgtgcagagaacctttaacgtggacatgtacgaggagatccaccgcaagctctcagaggccaccaggtcctctctcagggagctgcagaacgcacccgacgccatccctgagagcggcgtggagcccccagccctggacacggcctgggtggaggccacgcggaagaaggcgctgctgaagctggagaagctggacacagacctgaagaactacaagggcaactccatcaaagagagcatccggcgcggccacgacgacctgggcgaccactacctggactgtggggacctcagcaacgccctcaagtgctattcccgggcccgggactactgcaccagcgccaaacacgtcatcaacatgtgcctcaatgtcatcaaggtcagcgtctacttgcagaattggtctcatgtgctcagctacgtcagcaaggctgagtccaccccagagattgccgagcagcgaggagagcgtgacagccagacccaggccatcctcaccaagctcaagtgtgccgcaggcttggcagagctggccgccaggaagtacaagcaggctgccaagtgcctcctgctggcttcctttgatcactgtgacttccctgagctgctgtcccccagcaacgtggccatctacggtggcctgtgcgccttggctacctttgaccggcaggagctgcagcgcaatgtcatctccagcagctccttcaagttgttcttggagctggagccacaggtccgagacatcatcttcaaattctacgagtccaagtacgcctcatgtctcaagatgctggacgagatgaaggacaacctgctcctggacatgtatctggccccccatgtcaggaccctgtacacccagattcgcaaccgtgccctcatccagtatttcagcccctacgtgtcagccgacatgcataggatggcggcagccttcaataccacggtggccgccctggaggacgagctgacgcagctaatcctggaggggctgatcagtgcccgtgtggactcacacagcaagatcctatacgcccgggacgtggatcagcgcagcaccacctttgagaagtctctgttgatgggcaaggagttccagcgccgcgccaaggccatgatgctgcgggcagctgtgctccgcaaccagatccatgtcaagtccccgcccagagaagggagccagggggagctgactccagccaacagccagtcccggatgagcaccaacatgtgaggggtgaaccttggcctccaggacatctgcaccccctccccacctccacggacctcggacctccaggcggctcagtgctgcctgcggcccagctaaggggcctggccactgggtgccacccagcctgtgtgccctccctggggctgaggaggcaggcggctgctagttgtggcccttcctggaaggagaggcctgcagggctcgaccctgtgggtttctgtccccagggagcagactgtgcggcacccaggcccagtggcaccatttcccagacccctcctgttcccgcctcagtcaggtgcagacaagtgggcggtgtccattaaagagcagactcagcgttaaaaaaaaaaaaaaaa

SEQ ID NO: 2184 - DNA, 2363 bp, Homo sapiens
gctgccccggaagtggacggcacgccgcggcggggtgggtgcaagatgccgctgccggttcaggtgtttaacttgcaggtaacgagccgaggccgccccgggcctccgcgcccccgcgccccccgccactggggccgggctgaggtcgagcaggggcgcggggcctgcgccaggagtcggtcgggcacgctccgtgccgggcctccgcgggcagcgcgcgtcgggggctgcagggccgagggcgcgtctccgccgtggctgcgcgctgcgatcgggggccgccgggccgcgcccgccccgcctcccctcccagcagctcacgggagaggttcccggccgccccgacgctaacgctctttctcccttcagcagccagccagctctgtgtcagggtcggggggtgcagaaagtcaggacagaatgagggatagctcggcccccagctcggcctcctcgtcagtgacagatctgtactgcacccctcacagcagtaggtcagacctcgtcctgcccggcacggccggggacttcagcctgagcgccagcctgtcggcctgtacgctgctctacgagggggccgtggagcccatgcagatcgacgtggacccccaggaagacccgcagaatgcacctgacgtcaactacgtggtggagaaccccagcctggatctggaacagtacgcggccagctacagcggcctgatgcgcatcgaacggctgcagttcattgctgatcactgccccacgctgcgggtggaggccctgaagatggccctctccttcgtgcagagaacctttaacgtggacatgtacgaggagatccaccgcaagctctcagaggccaccagggagctgcagaacgcacccgacgccatccctgagagcggcgtggagcccccagccctggacacggcctgggtggaggccacgcggaagaaggcgctgctgaagctggagaagctggacacagacctgaagaactacaagggcaactccatcaaagagagcatccggcgcggccacgacgacctgggcgaccactacctggactgtggggacctcagcaacgccctcaagtgctattcccgggcccgggactactgcaccagcgccaaacacgtcatcaacatgtgcctcaatgtcatcaaggtcagcgtctacttgcagaattggtctcatgtgctcagctacgtcagcaaggctgagtccaccccagagattgccgagcagcgaggagagcgtgacagccagacccaggccatcctcaccaagctcaagtgtgccgcaggcttggcagagctggccgccaggaagtacaagcaggctgccaagtgcctcctgctggcttcctttgatcactgtgacttccctgagctgctgtcccccagcaacgtggccatctacggtggcctgtgcgccttggctacctttgaccggcaggagctgcagcgcaatgtcatctccagcagctccttcaagttgttcttggagctggagccacaggtccgagacatcatcttcaaattctacgagtccaagtacgcctcatgtctcaagatgctggacgagatgaaggacaacctgctcctggacatgtatctggccccccatgtcaggaccctgtacacccagattcgcaaccgtgccctcatccagtatttcagcccctacgtgtcagccgacatgcataggatggcggcagccttcaataccacggtggccgccctggaggacgagctgacgcagctaatcctggaggggctgatcagtgcccgtgtggactcacacagcaagatcctatacgcccgggacgtggatcagcgcagcaccacctttgagaagtctctgttgatgggcaaggagttccagcgccgcgccaaggccatgatgctgcgggcagctgtgctccgcaaccagatccatgtcaagtccccgcccagagaagggagccagggggagctgactccagccaacagccagtcccggatgagcaccaacatgtgaggggtgaaccttggcctccaggacatctgcaccccctccccacctccacggacctcggacctccaggcggctcagtgctgcctgcggcccagctaaggggcctggccactgggtgccacccagcctgtgtgccctccctggggctgaggaggcaggcggctgctagttgtggcccttcctggaaggagaggcctgcagggctcgaccctgtgggtttctgtccccagggagcagactgtgcggcacccaggcccagtggcaccatttcccagacccctcctgttcccgcctcagtcaggtgcagacaagtgggcggtgtccattaaagagcagactcagcgttaaaaaaaaaaaaaaaa

SEQ ID NO: 2185 - DNA, 4093 bp, Homo sapiens
gggatcccgggagggagcggagcggacctgggcttggtcgcctccaagccggcgggaccgagtgctttaggccgctcgaaagaaagttgctccgacccgggaaaaggagaagatgaaggaagccaaggatgcccgctataccaatgggcacctcttcaccaccatttcagtttcaggcatgaccatgtgctatgcctgtaacaagagcatcacagccaaggaagccctcatctgcccaacctgcaatgtgactatccacaaccgctgtaaagacaccctcgccaactgtaccaaggtcaagcagaagcaacagaaagcggccctgctgaagaacaacaccgccttgcagtccgtttctcttcgaagtaagacaaccatccgggagcggccaagctcggccatctacccctccgacagcttccggcagtccctcctgggctcccgccgtggccgctcctccttgtctttagccaagagtgtttctaccaccaacattgctggacatttcaatgatgagtctcccctggggctgcgccggatcctctcacagtccacagactccctcaacatgcggaaccgaaccctatccgtggaatccctcattgacgaagaggtaatctacagtgagctgatgagtgactttgagatggatgagaaggactttgcagctgactcttggagtcttgctgtggacagcagcttcctgcagcagcataaaaaggaggtgatgaagcagcaagatgtcatctatgagctaatccagacagagctgcaccatgtgaggacactgaagatcatgacccgcctcttccgcacggggatgctggaagagctacacttggagccaggagtggtccagggcctgttcccctgcgtggacgagctcagtgacatccatacacgcttcctcagccagctattagaacgccgacgccaggccctgtgccctggcagcacccggaactttgtcatccatcgcttgggtgatctgctcatcagccagttctcaggtcctagtgcggagcagatgtgtaagacctactcggagttctgcagccgccacagcaaggccttaaagctctataaggagctgtacgcccgagacaaacgcttccagcaattcatccggaaagtgacccgccccgccgtgctcaagcggcacggggtacaggagtgcatcctgctggtgactcagcgcatcaccaagtacccgttactcatcagccgcatcctgcagcattcccacgggatcgaggaggagcgccaggacctgaccacagcactggggctagtgaaggagctgctgtccaatgtggacgagggtatttatcagctggagaaaggggcccgtctgcaggagatctacaaccgcatggaccctcgggcccaaaccccagtgcctggcaagggcccctttggccgagaggaacttctgaggcgcaaactcatccacgatggctgcctgctctggaagacagcgacggggcgcttcaaagatgtgctagtgctgctgatgacagatgtactggtgtttctccaggaaaaggaccagaagtacatctttcctaccctggacaagccttcagtggtatcgctgcagaatctaatcgtacgagacattgccaaccaggagaaagggatgtttctgatcagcgcagccccacctgagatgtacgaggtgcacacagcatcccgggatgaccggagcacctggatccgggtcattcagcagagcgtgcgcacatgcccatccagggaggacttccccctgattgagacagaggatgaggcttacctgcggcgaattaagatggagttgcagcagaaggaccgggcactggtggagctgctgcgagagaaggtcgggctgtttgctgagatgacccatttccaggccgaagaggatggtggcagtgggatggccctgcccaccctgcccaggggccttttccgctctgagtcccttgagtcccctcgtggcgagcggctgctgcaggatgccatccgtgaggtggagggtctgaaagacctgctggtggggccaggagtggaactgctcttgacaccccgagagccagccctgcccttggaaccagacagcggtggtaacacgagtcctggggtcactgccaatggtgaggccagaaccttcaatggctccattgaactctgcagagctgactcagactctagccagagggatcgaaatggaaatcagctgagatcaccgcaagaggaggcgttacagcgattggtcaatctctatggacttctacatggcctacaggcagctgtggcccagcaggacactctgatggaagcccggttccctgagggccctgagcggcgggagaagctgtgccgagccaactctcgggatggggaggctggcagggctggggctgcccctgtggcccctgaaaagcaggccacggaactggcattactgcagcggcaacatgcgctgctgcaggaggagctacggcgctgccggcggctaggtgaagaacgggcaaccgaagctggcagcctggaggcccggctccgggagagtgagcaggcccgggcactgctggagcgtgaggccgaagaggctcgaaggcagctggccgccctgggccagaccgagccactcccagctgaggccccctgggcccgcagacctgtggatcctcggcggcgcagcctccccgcaggcgatgccctgtacttgagtttcaaccccccacagcccagccgaggcactgaccgcctggatctacctgtcactactcgctctgtccatcgaaactttgaggaccgagagaggcaggaactggggagccccgaagagcggctgcaagacagcagtgaccctgacactggcagcgaggaggaaggtagcagccgtctgtctccgccccacagtccacgagactttaccagaatgcaggacatcccggaggagacggagagccgcgacggggaggctgtagcctccgagagctaagggggcccctcccccctgccccgtgccccactgaagaacattactgagggggctaaccttggggactccaatttgccaatgatgagggaacatttgaaagaactgcaaattgtccttgccagctcttgggatccttggatacctggggccatttaagaagctaggggaattaggccacaacaccccctgggacatccgaaagctacaccacagatgccagtggttcatgccttcttcccgcaactttaggaaaatttatttatttattgtttattagttatggggggagaggggagatttaaaggaccagggacatgggaaccaagccatagggatcagagggccttgtccttgaacactactggggtatattcaggctcatccacgcagctgctgggttcttgccctaacggccctcccctgcaacatccgtcttggaggagaggctgcagccacagcaccctactgccctttaaataaaggagggctgtgggcagggccatgtccctttctcctctcccctcaacctcttactgctgttctccctttctccgtccttcatggaagccctgggagataacctggcttcctggagttgatggaataaaggttggggtggccataatggtttgttgggggtgagggaaaaaacccacagggaccagaatgttttgttgttcttttgttttcttttttgtaccaaagtcaactgcacgtgttttatatttttaagagatcgtaggcaattagagatcgaagcctcctatctccacatctctgaagaagttgaggggtgggggagagaatgacttctgccttcatctgcagtaacggggggacctatactgacctcttccccagccatttagaaacaagttctagggtgggttggaaaatctccaagagccctgacctcatcttccacctcagcaaccatgacctgaaacctcagcgtgaatttgggggatttttcagtggaacccttgcccccaaatgtcgaccagcccccaaatgtcgaagaattttcttcttgccaattttgttgtttaaaaaaaaaattcagggaaaattaaaaacctggaactccaaaaaaaaaaaaaaaaa

SEQ ID NO: 2186 - DNA, 991 bp, Homo sapiens
aacggattcgccatcgtgagttccaggattttcaaaatggctgcagctcctcaagcaccggggcggggatctctccgtaagacgagacctctggttgtgaagacgtcgttgaacaacccatacatcatccgctggagcgctctggagagcgaggatatgcacttcatcctacagacgcttgaggacaggcttaaagctattggacttcagaagattgaagataagaagaaaaagaacaaaacaccttttctgaaaaaagaaagcagagagaaatgcagcattgctgttgatattagtgataatctgaaggagaagaaaacagatgctaagcagcaagtgtcagggtggacgcctgcacacgtcaggaagcagcttgtcattggcgttaacgaagttaccagagccctggaaaggagggaactgctgttagttctggtgtgtaaatcagtcaagcctgccatgatcacctcacacttgattcagttaagcctaagcagaagtgtccctgcctgtcaggtcccccggctcagtgagagaatcgcccccgtcattggcttaaaatgtgttctagccttggcgttcaaaaagaacaccactgactttgtggacgaagtaagagccatcatccccagagtccccagtttaagtgtaccatggcttcaagacagaattgaagattctggggaaaatttagagactgaacctctggaaagccaagacagagagcttttggacacttcatttgaagatctgtcaaaacctaagagaaagcttgctgacggtcggcaggcttctgtaacattacaaccccttaaaataaagaaactgattccaaaccctaataagataaggaaaccacccaaaagtaaaaaagctactccaaagtaatcttgcataaacttgtcatgtcatacagtttgtgaaaggacaccttgtaaagaagccttgaaactaataaaatgagttatacttacataaaaaaaaaaaaaaa

SEQ ID NO: 2187 - DNA, 1450 bp, Homo sapiens
gtgggttccaggtgggcgcgcggggcccacgtagggcaggaggccagccccggggggatcgggcccgggactctgcggaatctggaggccgaagcccgcgcgcacgcagggtctctgctgcttccccaacgcctgttgcgtggccgcaggacccgccgccctcccggttgggccgcccagtcccgggccgggcgcgtgcacccagagcttccgcgtttctagtccggctcctctgctggattgcagcgccggctgggcaccaggagtacaaagcgaaaacccccgccggcccttctgttctccacggtctccaaggagacacggacaacagaacaacacttccgtgtgctaaatagtaaagcaccaagacagggtcagatgtgttactgggctggagtgtggtggcacaatcacgctcactgcatccttgacctcctgggctcaagtgatcttcccacctcagcctcccaagtagctgggactacaggattttcaaaatggctgcagctcctcaagcaccggggcggggatctctccgtaagacgagacctctggttgtgaagacgtcgttgaacaacccatacatcatccgctggagcgctctggagagcgaggatatgcacttcatcctacagacgcttgaggacaggcttaaagctattggacttcagaagattgaagataagaagaaaaagaacaaaacaccttttctgaaaaaagaaagcagagagaaatgcagcattgctgttgatattagtgagaatctgaaggagaagaaaacagatgctaagcagcaagtgtcagggtggacgcctgcacacgtcaggaagcagcttgccattggcgttaacgaagttaccagagccctggaaaggagggaactgctgttagttctggtgtgtaaatcagtcaagcctgccatgatcacctcacacttgattcagttaagcctaagcagaagtgtccctgcctgtcaggtcccccggctcagtgagagaatcgcccccgtcattggcttaaaatgtgttctagccttggcgttcaaaaagaacaccactgactttgtggacgaagtaagagccatcatccccagagtccccagtttaagtgtaccatggcttcaagacagaattgaagattctggggaaaatttagagactgaacctctggaaagccaagacagagagcttttggacacttcatttgaagatctgtcaaaacctaagagaaagcttgctgacggtcggcaggcttctgtaacattacaaccccttaaaataaagaaactgattccaaaccctaataagataaggaaaccacccaaaagtaaaaaagctactccaaagtaatcttgcataaacttgtcatgtcatacagtttgtgaaaggacaccttgtaaagaagccttgaaactaataaaatgagttatacccagaaaaaaaaaaaaaaa

SEQ ID NO: 2188 - DNA, 4369 bp, Homo sapiens
gtcccaggcggttccgctcaacagacgctgctgtggctgcgccgggctgcgacactgcagttgtctacgcggccggggccgggacgaggaggcgttggacggggtcgcatacgttcgtcccctcgcattgcggccccgacagctgcgccaggatccccgggcggcggcgcggggcgtgaacgctctggggctcagccaggcctgcgcgggcccgaggccggaggaacccggactccggcgtagcggttttgacacaagggcgcatatcttcaaagcacctagtacctcctaccattgtcaactgatacagaattcgttgttgggaaggactggggaaacagctgtaacatttgccaccctcagaagctgctggtcctgtgtcacaccaccttagcctcttgatcgaggaagattctcgctgaagtctgttaattctactttttgagtacttatgaataaccacgtgtcttcaaaaccatctaccatgaagctaaaacataccatcaaccctattcttttatattttatacattttctaatatcactttatactattttaacatacattccgttttattttttctccgagtcaagacaagaaaaatcaaaccgaattaaagcaaagcctgtaaattcaaaacctgattctgcatacagatctgttaatagtttggatggtttggcttcagtattataccctggatgtgatactttagataaagtttttacatatgcaaaaaacaaatttaagaacaaaagactcttgggaacacgtgaagttttaaatgaggaagatgaagtacaaccaaatggaaaaatttttaaaaaggttattcttggacagtataattggctttcctatgaagatgtctttgttcgagcctttaattttggaaatggattacagatgttgggtcagaaaccaaagaccaacatcgccatcttctgtgagaccagggccgagtggatgatagctgcacaggcgtgttttatgtataattttcagcttgttacattatatgccactctaggaggtccagccattgttcatgcattaaatgaaacagaggtgaccaacatcattactagtaaagaactcttacaaacaaagttgaaggatatagtttctttggtcccacgcctgcggcacatcatcactgttgatggaaagccaccgacctggtccgagttccccaagggcatcattgtgcataccatggctgcagtggaggccctgggagccaaggccagcatggaaaaccaacctcatagcaaaccattgccctcagatattgcagtaatcatgtacacaagtggatccacaggacttccaaagggagtcatgatctcacatagtaacattattgctggtataactgggatggcagaaaggattccagaactaggagaggaagatgtctacattggatatttgcctctggcccatgttctagaattaagtgctgagcttgtctgtctttctcacggatgccgcattggttactcttcaccacagactttagcagatcagtcttcaaaaattaaaaaaggaagcaaaggggatacatccatgttgaaaccaacactgatggcagcagttccggaaatcatggatcggatctacaaaaatgtcatgaataaagtcagtgaaatgagtagttttcaacgtaatctgtttattctggcctataattacaaaatggaacagatttcaaaaggacgtaatactccactgtgcgacagctttgttttccggaaagttcgaagcttgctagggggaaatattcgtctcctgttgtgtggtggcgctccactttctgcaaccacgcagcgattcatgaacatctgtttctgctgtcctgttggtcagggatacgggctcactgaatctgctggggctggaacaatttccgaagtgtgggactacaatactggcagagtgggagcaccattagtttgctgtgaaatcaaattaaaaaactgggaggaaggtggatactttaatactgataagccacaccccaggggtgaaattcttattgggggccaaagtgtgacaatggggtactacaaaaatgaagcaaaaacaaaagctgatttctttgaagatgaaaatggacaaaggtggctctgtactggggatattggagagtttgaacccgatggatgcttaaagattattgatcgtaaaaaggaccttgtaaaactacaggcaggggaatatgtttctcttgggaaagtagaggcagctttgaagaatcttccactagtagataacatttgtgcatatgcaaacagttatcattcttatgtcattggatttgttgtgccaaatcaaaaggaactaactgaactagctcgaaagaaaggacttaaagggacttgggaggagctgtgtaacagttgtgaaatggaaaatgaggtacttaaagtgctttccgaagctgctatttcagcaagtctggaaaagtttgaaattccagtaaaaattcgtttgagtcctgaaccgtggacccctgaaactggtctggtgacagatgccttcaagctgaaacgcaaagagcttaaaacacattaccaggcggacattgagcgaatgtatggaagaaaataattattctcttctggcatcagtttgctacagtgagctcagatcaaataggaaaatacttgaaatgcatgtctcaagctgcaaggcaaactccattcctcatattaaactattacttctcatgacgtcaccatttttaactgacaggattagtaaaacattaagacagcaaacttgtgtctgtctcttctttcattttccccgccaccaacttactttaccacctatgactgtacttgtcagtatgagaatttttctgaatcatattggggaagcagtgattttaaaacctcaagtttttaaacatgatttatatgttctgtataatgttcagtttgtaactttttaaaagtttggatgtatagagggataaataggaaatataagaattggttatttgggggcttttttacttactgtatttaaaaatacaagggtattgatatgaaattatgtaaatttcaaatgcttatgaatcaaatcattgttgaacaaaagatttgttgctgtgtaattattgtcttgtatgcatttgagagaaataaatatacccatacttatgttttaagaagttgagatcttgtgaatatatgcctgtcagtgtcttctttatatatttattttttattagaaaaaatgaagtttggttggtgatgcatgaaacaaaatagcaagagagggttatagtttaatagtaagggagataacacagcatgtgtagcaccagttgataattggtctctagtagcttactgtcaaaatgttcaatgaagtcttctgttcatctgttgaaactaggaaaatacccaaacttaaatggaagaattctgaaagagaggatagaatttaaagaacaagagtatataaagttattctttgaatatttcgttgactatatgtacattgagttatctatatttgtaaacaaattagtcatggaaaattattctatctcaaagtctccttttagtctagataatcattatttcattttaaaattagtgtttttcctagtttgcactgatgcgtgtatggatgtgtgtgagtcagtggtagcttatttaaaaagcaccttatcctttctcccataacctttgtacactaaaaaatgaaagaatttagaatgtatttgatgatagcattctcactaagacacatgagaatttaactttataaccgcgtgagttaagatttaattcataggttttgatgtcattgttgaagttatttgtaattcagaaaccttgcttgtgtgatacatagtctcttcatttattactgcttgtctgttgttatatctggattatcaaaagcaatagtgcaccaattaagatgtgctcaaatcaggacttaaatcataggcaccacatttttcatgtcagactagttactttgttgattctcagttactgtaggcatcaaaaggcaaaaatcaaaaaaaaaaaaaacaaaaacaaaaaaaaagatgaacctaggtctgtgtaaagtaaggggagtgttaggagcagccaggactgtgtagtgtgtgtttggttgcatcacaaacatcgtatgtggagacattgcaatacagtgttttttgttttcaacttttcttgtattgtatatttgtattatgttttgaatgcttttctcttttcataattaaatattaatgtttgggataactgccaagaagaagtaaaaatattgaatggaacttctatatgaggatgctgtgatctaaaaattaaatctcagtgggcggagaaaaaaaaa

SEQ ID NO: 2189 - DNA, 4262 bp, Homo sapiens
gtcccaggcggttccgctcaacagacgctgctgtggctgcgccgggctgcgacactgcagttgtctacgcggccggggccgggacgaggaggcgttggacggggtcgcatacgttcgtcccctcgcattgcggccccgacagctgcgccaggatccccgggcggcggcgcggggcgtgaacgctctggggctcagccaggcctgcgcgggcccgaggccggaggaacccggactccggcgtagcggttttgacacaagggcgcatatcttcaaagcacctagtacctcctaccattgtcaactgattctcgctgaagtctgttaattctactttttgagtacttatgaataaccacgtgtcttcaaaaccatctaccatgaagctaaaacataccatcaaccctattcttttatattttatacattttctaatatcactttatactattttaacatacattccgttttattttttctccgagtcaagacaagaaaaatcaaaccgaattaaagcaaagcctgtaaattcaaaacctgattctgcatacagatctgttaatagtttggatggtttggcttcagtattataccctggatgtgatactttagataaagtttttacatatgcaaaaaacaaatttaagaacaaaagactcttgggaacacgtgaagttttaaatgaggaagatgaagtacaaccaaatggaaaaatttttaaaaaggttattcttggacagtataattggctttcctatgaagatgtctttgttcgagcctttaattttggaaatggattacagatgttgggtcagaaaccaaagaccaacatcgccatcttctgtgagaccagggccgagtggatgatagctgcacaggcgtgttttatgtataattttcagcttgttacattatatgccactctaggaggtccagccattgttcatgcattaaatgaaacagaggtgaccaacatcattactagtaaagaactcttacaaacaaagttgaaggatatagtttctttggtcccacgcctgcggcacatcatcactgttgatggaaagccaccgacctggtccgagttccccaagggcatcattgtgcataccatggctgcagtggaggccctgggagccaaggccagcatggaaaaccaacctcatagcaaaccattgccctcagatattgcagtaatcatgtacacaagtggatccacaggacttccaaagggagtcatgatctcacatagtaacattattgctggtataactgggatggcagaaaggattccagaactaggagaggaagatgtctacattggatatttgcctctggcccatgttctagaattaagtgctgagcttgtctgtctttctcacggatgccgcattggttactcttcaccacagactttagcagatcagtcttcaaaaattaaaaaaggaagcaaaggggatacatccatgttgaaaccaacactgatggcagcagttccggaaatcatggatcggatctacaaaaatgtcatgaataaagtcagtgaaatgagtagttttcaacgtaatctgtttattctggcctataattacaaaatggaacagatttcaaaaggacgtaatactccactgtgcgacagctttgttttccggaaagttcgaagcttgctagggggaaatattcgtctcctgttgtgtggtggcgctccactttctgcaaccacgcagcgattcatgaacatctgtttctgctgtcctgttggtcagggatacgggctcactgaatctgctggggctggaacaatttccgaagtgtgggactacaatactggcagagtgggagcaccattagtttgctgtgaaatcaaattaaaaaactgggaggaaggtggatactttaatactgataagccacaccccaggggtgaaattcttattgggggccaaagtgtgacaatggggtactacaaaaatgaagcaaaaacaaaagctgatttctttgaagatgaaaatggacaaaggtggctctgtactggggatattggagagtttgaacccgatggatgcttaaagattattgatcgtaaaaaggaccttgtaaaactacaggcaggggaatatgtttctcttgggaaagtagaggcagctttgaagaatcttccactagtagataacatttgtgcatatgcaaacagttatcattcttatgtcattggatttgttgtgccaaatcaaaaggaactaactgaactagctcgaaagaaaggacttaaagggacttgggaggagctgtgtaacagttgtgaaatggaaaatgaggtacttaaagtgctttccgaagctgctatttcagcaagtctggaaaagtttgaaattccagtaaaaattcgtttgagtcctgaaccgtggacccctgaaactggtctggtgacagatgccttcaagctgaaacgcaaagagcttaaaacacattaccaggcggacattgagcgaatgtatggaagaaaataattattctcttctggcatcagtttgctacagtgagctcagatcaaataggaaaatacttgaaatgcatgtctcaagctgcaaggcaaactccattcctcatattaaactattacttctcatgacgtcaccatttttaactgacaggattagtaaaacattaagacagcaaacttgtgtctgtctcttctttcattttccccgccaccaacttactttaccacctatgactgtacttgtcagtatgagaatttttctgaatcatattggggaagcagtgattttaaaacctcaagtttttaaacatgatttatatgttctgtataatgttcagtttgtaactttttaaaagtttggatgtatagagggataaataggaaatataagaattggttatttgggggcttttttacttactgtatttaaaaatacaagggtattgatatgaaattatgtaaatttcaaatgcttatgaatcaaatcattgttgaacaaaagatttgttgctgtgtaattattgtcttgtatgcatttgagagaaataaatatacccatacttatgttttaagaagttgagatcttgtgaatatatgcctgtcagtgtcttctttatatatttattttttattagaaaaaatgaagtttggttggtgatgcatgaaacaaaatagcaagagagggttatagtttaatagtaagggagataacacagcatgtgtagcaccagttgataattggtctctagtagcttactgtcaaaatgttcaatgaagtcttctgttcatctgttgaaactaggaaaatacccaaacttaaatggaagaattctgaaagagaggatagaatttaaagaacaagagtatataaagttattctttgaatatttcgttgactatatgtacattgagttatctatatttgtaaacaaattagtcatggaaaattattctatctcaaagtctccttttagtctagataatcattatttcattttaaaattagtgtttttcctagtttgcactgatgcgtgtatggatgtgtgtgagtcagtggtagcttatttaaaaagcaccttatcctttctcccataacctttgtacactaaaaaatgaaagaatttagaatgtatttgatgatagcattctcactaagacacatgagaatttaactttataaccgcgtgagttaagatttaattcataggttttgatgtcattgttgaagttatttgtaattcagaaaccttgcttgtgtgatacatagtctcttcatttattactgcttgtctgttgttatatctggattatcaaaagcaatagtgcaccaattaagatgtgctcaaatcaggacttaaatcataggcaccacatttttcatgtcagactagttactttgttgattctcagttactgtaggcatcaaaaggcaaaaatcaaaaaaaaaaaaaacaaaaacaaaaaaaaagatgaacctaggtctgtgtaaagtaaggggagtgttaggagcagccaggactgtgtagtgtgtgtttggttgcatcacaaacatcgtatgtggagacattgcaatacagtgttttttgttttcaacttttcttgtattgtatatttgtattatgttttgaatgcttttctcttttcataattaaatattaatgtttgggataactgccaagaagaagtaaaaatattgaatggaacttctatatgaggatgctgtgatctaaaaattaaatctcagtgggcggagaaaaaaaaa

SEQ ID NO: 2190 - DNA, 6367 bp, Homo sapiens
cccgtggctgagaagaaggaggcctgagagcgacatgtccccggcggctcaggcggagcggcccgtggcgctgtttttctgagtccggggtggcctggcagccggccgaggacgagggtcggcgggggctgcccccgtggtggtggccgccatgctgggagcctgggcggttgagggaaccgctgtggcgctcctgcgactgctgctgctgctgctgccgccggcgatccggggacccgggctcggcgtggccggcgtggccggcgcggcgggggccgggctgcccgagagcgtcatttgggcggtcaacgcgggtggagaggcgcatgtggacgtgcacgggatccacttccgcaaggaccctttggaaggccgggtgggccgagcctcagactatggcatgaaactgccaatcctgcgttccaaccctgaggaccagatcctgtatcaaactgagcggtacaatgaggagacctttggctacgaagtgcccatcaaagaggagggggactacgtgctggtcttgaaatttgcagaggtctactttgcacagtcccagcaaaaggtatttgatgtacgattgaatggccacgtcgtggtgaaggacttggatatctttgatcgtgttgggcatagcacagctcacgatgaaattatacctatgagcatcagaaaggggaagctgagtgtccagggggaggtgtccaccttcacagggaaactctacattgagtttgtcaaggggtactatgacaatcccaaggtctgtgcactctacatcatggctgggacagtggatgatgtaccaaagcttcagcctcatccgggattggagaagaaagaagaggaagaagaagaagaagaatatgatgaagggtctaatctcaaaaaacagaccaataagaaccgggtgcagtcaggcccccgcacacccaacccctatgcctcggacaacagcagcctcatgtttcccatcctggtggccttcggagtcttcattccaaccctcttctgcctctgccggttgtgagaacaaatgactatcctgaacagggtggaggggtgtgggaaagaaaccagccatattggttttggtttctgtatttttcacaatgattaatgaacaaaaacaaagagaaaaaaacacacatcaattaaaggagacaaaaagaggcagagcgagtagagagcagccctcattcaccacctggtcccagacgtgcttcagtcctcgtcctctctttgtggctggctcccagccttctctttcctcttgaggatacttagggtaaactggatccttcctgctcaaggatcctcatttgtatacctagtggaaaggactctgaactcagaggagtcactgttcctttttttaggttagaaattaacagcagggaaatgccatcttattacctgagacgaccagcactgggagttaggtacggtctgaagttatgtctagataagacttcagacgtcctgggattgaaagaatgtgtgtgaaggggtagaatttgtgcggtaaagacttaaaaaaaaaagtagggagattaaaaaaaaagaaagaaaatgcttccttatctggaagcctttctggattaatccagtgatggtcccacctttagtgtttgagctttgtcattgcttgtctccctggcatgtgccagttatagactgtccagcatccaagacgtttcggttatgtcgggtcctcagatcgcctctgacttgttaccacaacaaatcattttgatttcagtgcctgttggggacttgatttcttctcagttttgtttgtttgtttgtttccttaatctggctcatttgaaatttcttctccctctcaaccatcccactaagttatagccaagaagggaaggagacacggggatttggggttctctgcttgaatgtcttctcctttaccacctcaccttgttggtacctccctccctggatctctgagccagcagccaggaggacctgacccagcagttctttactggcccctttgtagggccttgctgccagggggcagggatgctttccagcctgcagcaacagaacacttgaccttaaaagtctcttctggtctttggattagaaaaggcttatgttagcatagcttaagagcaacctcagagacttgagccctactaagtgactgaccactgtttagagtgtctggtatctgatgttcatttattcccatgttcttgtgtgtcacagttcagccagttttggtttatgcctagagctacttcaaggaactagactaattagctatataggcccagcgatgcttcttattgatcttaatagtatgcccctccttcccctgtcctttcatttctctatccaagtagcagtcaggttcttggtgtgatgggactgaaagaattccagtcagccagagccttggcagctctgaagctaaccttagcatctaagtgtcgatcttgaattccctgaaaaaatttctataggaaatgaagcttccctggtcccctcctttctggccattgtcatccatttcccagttagggcaacaatgaaggaggacccagccaagctagaaggaattttgtggatgggagacagcaggattagcttcagcttgggctggagcagtcaatataggatctcaggccaggcccgcttttctagaatgtgtttaattttgagtttgctttattagatatgttttttaagagctctgtatatttgaactgctccttatgtgacaaaataggtagctcttgggctcatgtcctgggttttggctctttaatgattactccaggccagcatttagtcgtttgagaattgtagcctgttgttttcgctgtgacttgggtctcagtgctagggtattgagtcaggcagctggagggttgtggcccgaggctgcagtcagaggtatacttcccatagtgcttcacacagctcccctgcttctaaaggataaggtactgtagccttggtcctggggaccacctgcctggggcagtggacatcctaactaaacaggcttctggcagtagctttggttcctatcccatcgaaattccccaaagccctgggccactgccattgggttagtcaagatgaaggaggaggactggctgcctccattttgccttgtttgttagtttgcctgggtctgtctgaggaaggagggggtcccgccttccacctcaacacatcccttcagtgactcagagtctcagaaggaaaccctgactcctggggccatttcctaatggtactgtaagccaagcagctttgcttctgcctctgtttccaagcccacccttttcccctgagctcagggttagggatgggcgctttcctctctggttgtgaacgaaaggaaggaacatctttctatggctaacaaaaactaaaggggaagtgaggaaacaggaagaagtatggtgggggctggggtagactcccctggagccaagcctatccagctaacaagagctccctggggctggtcacagctggctcatgatgctgaacttgaaagtttttttgtttttgtttttgttttgtggctcctccaagatataggtacatgaagtttaggttaaaggggtgggattctttatttttatttttgtattgtatgtgtcaagaattactctgttgttcaccttttgctttttgcactgtttgttctcttatctgtattttgagcttagtgctaggactgagaggctgcaccatagggaatgtatgggagatggtgaggggtgccagtgaggggtgcgtggaggagaggcctgggctcctctactggatctacactctgtcccaggtttttagatcccactgagcccagctgactgaaaacaaggacagtcagggtgaaacttcttttgccagaagtgtggcctgagttgaatttctgggaggatgacgcagatgtctgctgcagagctgggctgagagttctgcagtctagctctgacttaggtcaggggcctgttggtctctcattggacgtttttgggtctcactcatgcttactgaaacattgtgccaagaaactctgtgggatttgtgtcccttaaaccagactcacttttctgaaaaatctccattgttgaggagaggctgctcaatcgacaccccgagttctcatgactgggaagatagttttcttcaggtgtcaatggcgttagactcccaggaagactagccctgcccacagggccacctgttggtttgagagcgtgttcgtgttctcttgccctccctgcctaagagctactgggatcacgttagcgggcatttaggctttgatgagagggcacagtttgagttaggtttacctccccctttctgtgcctgggaactgtttggtccagctttagaactgtggttttgacttccttatctcttgggagaagcttctgttttaaggaatttctcttccttcttctcctgcctctagcctctcctggaaaggcctggatatggtttctaaaatctcagctgagaacttcagaaaacagcagcagtattttccttttcctagtgctaaaatccctttccctagaaattggctcaccttgggaaacccagggaaagaatcagcaggttctctgccctccctaggggttggggaaggacccaccccggtcagcacagtgccttttcctctcctgctctgagccagggtggggcattccctctagattcaggtttgggcaggggtcctatagtccctgccatggggctgcttccctgtcccttccctcccctttgctggcctactctggcataattcaagtgtcttcttgccttggggatccttagtggcatcaaatggcaacatggaatattgtcctccatgcccctccagaaggacctaggagagtaggtgagctttccaaagtgagagacgaatctttctttctttttttttttaaagggcaggatgggtatgctttgggctttctccttctgtggccccggaggaaggagagactgaggcaaggcaaagtgatagtacactgaagcagaaccggaaacacccaggaactgttcagaaatctcagaagaaatctgcttctcttcgatggaaagatataattaacgatcaaagagctctaagaaaattgcaaagaagccttaatgttcaagctttagaaagatcagagcaatttttctctttcagtccaaactaagactctctgtatttaaatctctctggggcaagagggctagatttcctcattttgttatgagactagattggtaccagtagatcagctgcctagcgagggcaggtttcttctttgcatctgtgtggcttgcttccagtctggcctgtcctttccagctgccttttgtctagcctgctatggggggccagattatcttgataagagcaggtgatttggggactagctgggttggcaggaaaagagcaggatggatctcttgggacaggttcccccaggagtataaacacaaggagccaggattgtgctggcagccaaggaaacagtagtgcctgtttgagttggcagagagggccttggcacctcttgcatccaggcagtcttgtgagatgggggcacatagcactggggaaagcagaactccattctcacctctattttgagcttcagtgctttatttcagtatgaggaaaaacaacaacaaactgaagtgcgctttccgtcctttcaaaggacaactgtcgggaagggagagccgagttgcgaggtaggaggggagcactggcagggagagacattcttgactcctctcttccctggtgtgttgtgatccagggaatgaaaagaaatttgaccctggattggttctctccttggacttaaggaatcttaccttttccttccacaaagttctcccaggcaaggaccagctgcccattctgagcccagggcagcctcttcaaccattattggtctaacctggcttgtcaggaaaccaagcccacccttccacattgggcctggctgctctattctgtaccaagtactggagaaaaagcatcaagttcttagcccttgtagcttctaccctagtttcccatcctctctctgtggaggccaaaccaactctttgccagcagccacaacatgcattgacagcggcacagtgagatataactgatgggctttgaacctggttggccggggaagctgtaggggtggatagagctggctttccttctgggctgtctccatctgaccctaccccttccatgtcccaccccactcccaccaaaaagtacaaaatcaggatgtttttcactgtccattgctttgtgttttaataaacaatttgcagtgacactctgaaaaaaaaaaaaaaaaaa

SEQ ID NO: 2191 - DNA, 1985 bp, Homo sapiens
cgccgagctttcggcacctctgccgggtggtaccgagccttcccggcgccccctcctctcctcccaccggcctgcccttccccgcgggactatcgcccccacgtttccctcagcccttttctctcccggccgagccgcggcggcagcagcagcagcagcagcagcaggaggaggagcccggtggcggcggtggccggggagcccatggcgtacagtcaaggaggcggcaaaaaaaaagtctgctactactacgacggtgatattggaaattattattatggacagggtcatcccatgaagcctcatagaatccgcatgacccataacttgctgttaaattatggcttatacagaaaaatggaaatatataggccccataaagccactgccgaagaaatgacaaaatatcacagtgatgagtatatcaaatttctacggtcaataagaccagataacatgtctgagtatagtaagcagatgcatatatttaatgttggagaagattgtccagcgtttgatggactctttgagttttgtcagctctcaactggcggttcagttgctggagctgtgaagttaaaccgacaacagactgatatggctgttaattgggctggaggattacatcatgctaagaaatacgaagcatcaggattctgttacgttaatgatattgtgcttgccatccttgaattactaaagtatcatcagagagtcttatatattgatatagatattcatcatggtgatggtgttgaagaagctttttatacaacagatcgtgtaatgacggtatcattccataaatatggggaatactttcctggcacaggagacttgagggatattggtgctggaaaaggcaaatactatgctgtcaattttccaatgtgtgatggtatagatgatgagtcatatgggcagatatttaagcctattatctcaaaggtgatggagatgtatcaacctagtgctgtggtattacagtgtggtgcagactcattatctggtgatagactgggttgtttcaatctaacagtcaaaggtcatgctaaatgtgtagaagttgtaaaaacttttaacttaccattactgatgcttggaggaggtggctacacaatccgtaatgttgctcgatgttggacatatgagactgcagttgcccttgattgtgagattcccaatgagttgccatataatgattactttgagtattttggaccagacttcaaactgcatattagtccttcaaacatgacaaaccagaacactccagaatatatggaaaagataaaacagcgtttgtttgaaaatttgcgcatgttacctcatgcacctggtgtccagatgcaagctattccagaagatgctgttcatgaagacagtggagatgaagatggagaagatccagacaagagaatttctattcgagcatcagacaagcggatagcttgtgatgaagaattctcagattctgaggatgaaggagaaggaggtcgaagaaatgtggctgatcataagaaaggagcaaagaaagctagaattgaagaagataagaaagaaacagaggacaaaaaaacagacgttaaggaagaagataaatccaaggacaacagtggtgaaaaaacagataccaaaggaaccaaatcagaacagctcagcaacccctgaatttgacagtctcaccaatttcagaaaatcattaaaaagaaaatattgaaaggaaaatgttttctttttgaagacttctggcttcattttatactactttggcatggactgtatttattttcaaatgggactttttcgtttttgtttttctgggcaagttttattgtgagattttctaattatgaagcaaaatttcttttctccaccatgctttatgtgatagtatttaaaattgatgtgagttattatgtcaaaaaaactgatctattaaagaagtaattggcctttctgagctgaaaaaaaaaaaaaaaaag

SEQ ID NO: 2192 - DNA, 3023 bp, Homo sapiens
ggcgggacaaccgcggcgcggctcggcgctcccggcctggcgttgtggcgccgcagcccttgccaccttccctgcacctgccctgcccggcctcatgtaccgcgcgctgtacgcgttccgctcggcggagcccaacgcgctggcgttcgccgcgggcgagaccttcctggtgctagagcgaagcagcgcgcactggtggctggccgcgcgggcgcgcagtggtgagacgggctacgtgccgccagcctacctgcgccgcctgcagggcctggagcaggatgtcctccaggccattgaccgggccatcgaggctgtacacaacacagccatgcgggatggtggcaagtacagcctggaacagcgtggagtcctccagaagctgatccaccaccggaaagagaccctgtcacgcagaggcccttcagcctccagtgttgcagttatgacctcatcaaccagtgaccaccacttggatgctgctgcagccaggcagcccaatggggtgtgtcgagctgggttcgagcggcagcacagcctacccagttctgagcatcttggggcagatggaggcctctaccagatcccacttccatcttcccagatcccaccacagcctcgccgagcagcacccaccacaccgcccccaccagtgaagcgccgagaccgcgaggccctgatggcctctgggagtggtggccacaacaccatgccctccgggggtaactctgtgtccagcggctcctcagtcagcagcacctccctggacacgctctataccagctccagcccatctgaaccaggctccagctgctcacccacacccccacctgtgccccgccgaggcacccacaccaccgtgtcccaagtccagccccctccctccaaggcatcagcacctgaaccccctgcagaagaagaagtggcaactggtacaacctcagcctctgatgacctggaagccctgggtacactgagcctggggaccacagaggagaaggcagcagctgaggcggctgtgcccaggaccattggggccgagctgatggagctggtgcggagaaacactggcctgagccacgaattatgccgggtggccatcggcatcatagtgggtcacatccaggcctcggtgccggccagctcaccagtcatggagcaggtcctcctctcactcgtagagggcaaggacctcagcatggccctgccctcagggcaggtctgccacgaccagcagaggctggaggtgatctttgcagacctggctcgccggaaggacgacgcccagcagcgcagttgggcactatatgaggatgagggtgtcatccgctgctacctagaggagctgctgcatattctgactgatgcagaccctgaagtttgcaagaaaatgtgcaagagaaacgagttcgagtctgtcctggccttggtggcctattaccaaatggaacaccgagcatcactgcggctgctgctcctcaagtgctttggcgccatgtgcagcctggatgcagccatcatctccacgcttgtgtcatccgtgctgcctgtagagctggcgagggacatgcagacagacacgcaggaccaccagaaactctgttactctgccctcatcctggccatggtcttctccatgggagaggcagtgccctatgcacactatgagcacctgggcacgcctttcgcccagttcctactgaacatcgtcgaggatgggctgcccttggacaccacagagcagctgccggacctctgcgtgaacctgcttctggctctcaacctgcacctgccagctgctgaccagaatgtcatcatggctgccctgagcaaacacgccaatgtcaagatcttctccgagaagctgttgttgctcctgaacagaggggatgaccctgtgcgcatcttcaaacatgagccacagccaccacactctgtcctcaagttcctgcaggacgtgtttggcagcccggccacagctgccatcttctaccacacagacatgatggctctcattgacatcactgtgcggcacatcgcagacctgtcaccaggagacaagctgcgcatggagtacctctccctgatgcatgctatagtccgcaccacaccctacctgcagcaccgccaccggctacccgacctgcaggccatactgcgacgcatcctgaatgaggaggagacctcaccccagtgccagatggaccgcatgattgtccgagagatgtgcaaggaattcctggtgctgggggaggctcccagctagcaccttgctgtcctcccttccctgcagctccagtcagtgtgcaggggactcaggggcttggccctaagaatgttttgcactgacagtgggaggggataaggtggcagaaggaacctgagcaggacccccacctgaagtagaacttaagagaggggccaagtgtaggattggggaccatggtctgggagctgttctggggcagggggaatatgcaagctaaagcccctctataccctggtaggcttcctcttcagcatgcccccctcttcaccccacacccatgtgtacactcagagtcctgctgccgctccaggctggaccagacccccatccccacccctcctggtctgtatcctgggcctcagcaagccatgcccctggggtgaggggaggcatctcccaccagctctattctttgccttagctttgcagtgagtgctgctcatgtcctcccctccacccgcacatgggggtcgctgcccttcactcctacccccagaggccttggccaagctgctgctttgaaagcgggatcttggagacaggccatccatcctggagcctcatggaacaggatgatggcactgagaaagccaatgaccgaatctcttttctctgtaaaaatgtagactgaaaagccatgtgtattttcctatgtgctgtagctctcctttggaaataaatcacaggcatctggaaaaaaaaaaaaaaaaaaaaaaaaaaaaaaaaaaaaaaaaaaaaaaaaaaaaaaaaaaaaaaa

SEQ ID NO: 2193 - DNA, 2968 bp, Homo sapiens
ggcgggacaaccgcggcgcggctcggcgctcccggcctggcgttgtggcgccgcagcccttgccaccttccctgcacctgccctgcccggcctcatgtaccgcgcgctgtacgcgttccgctcggcggagcccaacgcgctggcgttcgccgcgggcgagaccttcctggtgctagagcgaagcagcgcgcactggtggctggccgcgcgggcgcgcagtggtgagacgggctacgtgccgccagcctacctgcgccgcctgcagggcctggagcaggatgtcctccaggccattgaccgggccatcgaggctgtacacaacacagccatgcgggatggtggcaagtacagcctggaacagcgtggagtcctccagaagctgatccaccaccggaaagagaccctgtcacgcagaggcccttcagcctccagtgttgcagttatgacctcatcaaccagtgaccaccacttggatgctgctgcagccaggcagcccaatggggtgtgtcgagctgggttcgagcggcagcacagcctacccagttctgagcatcttggggcagatggaggcctctaccagatcccaccacagcctcgccgagcagcacccaccacaccgcccccaccagtgaagcgccgagaccgcgaggccctgatggcctctgggagtggtggccacaacaccatgccctccgggggtaactctgtgtccagcggctcctcagtcagcagcacctccctggacacgctctataccagctccagcccatctgaaccaggctccagctgctcacccacacccccacctgtgccccgccgaggcacccacaccaccgtgtcccaagtccagccccctccctccaaggcatcagcacctgaaccccctgcagaagaagaagtggcaactggtacaacctcagcctctgatgacctggaagccctgggtacactgagcctggggaccacagaggagaaggcagcagctgaggcggctgtgcccaggaccattggggccgagctgatggagctggtgcggagaaacactggcctgagccacgaattatgccgggtggccatcggcatcatagtgggtcacatccaggcctcggtgccggccagctcaccagtcatggagcaggtcctcctctcactcgtagagggcaaggacctcagcatggccctgccctcagggcaggtctgccacgaccagcagaggctggaggtgatctttgcagacctggctcgccggaaggacgacgcccagcagcgcagttgggcactatatgaggatgagggtgtcatccgctgctacctagaggagctgctgcatattctgactgatgcagaccctgaagtttgcaagaaaatgtgcaagagaaacgagttcgagtctgtcctggccttggtggcctattaccaaatggaacaccgagcatcactgcggctgctgctcctcaagtgctttggcgccatgtgcagcctggatgcagccatcatctccacgcttgtgtcatccgtgctgcctgtagagctggcgagggacatgcagacagacacgcaggaccaccagaaactctgttactctgccctcatcctggccatggtcttctccatgggagaggcagtgccctatgcacactatgagcacctgggcacgcctttcgcccagttcctactgaacatcgtcgaggatgggctgcccttggacaccacagagcagctgccggacctctgcgtgaacctgcttctggctctcaacctgcacctgccagctgctgaccagaatgtcatcatggctgccctgagcaaacacgccaatgtcaagatcttctccgagaagctgttgttgctcctgaacagaggggatgaccctgtgcgcatcttcaaacatgagccacagccaccacactctgtcctcaagttcctgcaggacgtgtttggcagcccggccacagctgccatcttctaccacacagacatgatggctctcattgacatcactgtgcggcacatcgcagacctgtcaccaggagacaagctgcgcatggagtacctctccctgatgcatgctatagtccgcaccacaccctacctgcagcaccgccaccggctacccgacctgcaggccatactgcgacgcatcctgaatgaggaggagacctcaccccagtgccagatggaccgcatgattgtccgagagatgtgcaaggaattcctggtgctgggggaggctcccagctagcaccttgctgtcctcccttccctgcagctccagtcagtgtgcaggggactcaggggcttggccctaagaatgttttgcactgacagtgggaggggataaggtggcagaaggaacctgagcaggacccccacctgaagtagaacttaagagaggggccaagtgtaggattggggaccatggtctgggagctgttctggggcagggggaatatgcaagctaaagcccctctataccctggtaggcttcctcttcagcatgcccccctcttcaccccacacccatgtgtacactcagagtcctgctgccgctccaggctggaccagacccccatccccacccctcctggtctgtatcctgggcctcagcaagccatgcccctggggtgaggggaggcatctcccaccagctctattctttgccttagctttgcagtgagtgctgctcatgtcctcccctccacccgcacatgggggtcgctgcccttcactcctacccccagaggccttggccaagctgctgctttgaaagcgggatcttggagacaggccatccatcctggagcctcatggaacaggatgatggcactgagaaagccaatgaccgaatctcttttctctgtaaaaatgtagactgaaaagccatgtgtattttcctatgtgctgtagctctcctttggaaataaatcacaggcatctggaaaaaaaaaaaaaaaaaaaaaaaaaaaaa

SEQ ID NO: 2194 - DNA, 1895 bp, Homo sapiens
gaggcggccccacgctgctttcccagaaggctgtgcgtgctcctcgcttcctccgcggtcttccgagcggtcgcgtgaactgcttcctgcaggctggccatggcgcttcacgttcccaaggctccgggctttgcccagatgctcaaggagggagcgaaacacttttcaggattagaagaggctgtgtatagaaacatacaagcttgcaaggagcttgcccaaaccactcgtacagcatatggaccaaatggaatgaacaaaatggttatcaaccacttggagaagttgtttgtgacaaacgatgcagcaactattttaagagaactagaagtacagcatcctgctgcaaaaatgattgtaatggcttctcatatgcaagagcaagaagttggagatggcacaaactttgttctggtatttgctggagctctcctggaattagctgaagaacttctgaggattggcctgtcagtttcagaggtcatagaaggttatgaaatagcctgcagaaaagctcatgagattcttcctaatttggtatgttgttctgcaaaaaaccttcgagatattgatgaagtctcatctctacttcgtacctccataatgagtaaacaatatggtaatgaagtatttctggccaagcttattgctcaggcatgcgtatctatttttcctgattccggccatttcaatgttgataacatcagagtttgtaaaattctgggctctggtatcagttcctcttcagtattgcatggcatggtttttaagaaggaaaccgaaggtgatgtaacatctgtcaaagatgcaaaaatagcagtgtactcttgtccttttgatggcatgataacagaaactaagggaacagtgttgataaagactgctgaagaattgatgaattttagtaagggagaagaaaacctcatggatgcacaagtcaaagctattgctgatactggtgcaaatgtcgtagtaacaggtggcaaagtggcagacatggctcttcattatgcaaataaatataatatcatgttagtgaggctaaactcaaaatgggatctccgaagactttgtaaaactgttggtgctacagctcttcctagattgacacctcctgtccttgaagaaatgggacactgtgacagtgtttacctctcagaagttggagatactcaggtggtggtttttaagcatgaaaaggaagatggcgccatttctaccatagtacttcgaggctctacagacaatctgatggatgacatagaaagggcagtagacgatggtgttaatactttcaaagttcttacaagggataaacgtcttgtacccggaggtggagcaacagaaattgaattagccaaacagatcacatcatatggagagacatgtcctggacttgaacagtatgctattaagaagtttgctgaggcatttgaagctattccccgcgcactggcagaaaactctggagttaaggccaatgaagtaatctctaaactttatgcagtacatcaagaaggaaataaaaacgttggattagatattgaggctgaagtccctgctgtaaaggacatgctggaagctggtattctagatacttacctgggaaaatattgggctatcaaactcgctactaatgctgcagtcactgtacttagagtggatcagatcatcatggcaaaaccagctggtgggcccaagcctccaagtgggaagaaagactgggatgatgaccaaaatgattgaaattggcttaatttttactgtaggtgaaggctgtatttgtagtagtactcaagaatcacctgatgttttcttattctccttaaattaagagttattttgtgtttgtattcttggctggatgttataataaacatattgttactgtcaaa

SEQ ID NO: 2195 - DNA, 3082 bp, Homo sapiens
gtttgttgacttccgggagcgcggttgtagttgatctccggagtttcgccatgcggaacttgggggctttcgcggcccgcgtcggtgcggagtagctgctttagccccgaccaaaccgtcctctacagcctcctggccccggcgcaggctgcccgtactgcccgtggcatgagggagccggaagagctgatgcccgattcgggtgctgtgtttacatttgggaaaagtaaatttgctgaaaataatcccggtaaattctggtttaaaaatgatgtccctgtacatctttcatgtggagatgaacattctgctgttgttaccggaaataataaactttacatgtttggcagtaacaactggggtcagttaggattaggatcaaagtcagccatcagcaagccaacatgtgtcaaagctctaaaacctgaaaaagtgaaattagctgcctgtggaaggaaccacaccctggtgtcaacagaaggaggcaatgtatatgcaactggtggaaataatgaaggacagttggggcttggtgacaccgaagaaagaaacacttttcatgtaattagcttttttacatccgagcataagattaagcagctgtctgctggatctaatacttcagctgccctaactgaggatggaagactttttatgtggggtgacaattccgaagggcaaattggtttaaaaaatgtaagtaatgtctgtgtccctcagcaagtgaccattgggaaacctgtctcctggatctcttgtggatattaccattcagcttttgtaacaacagatggtgagctatatgtgtttggagaacctgagaatgggaagttaggtcttcccaatcagctcctgggcaatcacagaacaccccagctggtgtctgaaattccggagaaggtgatccaagtagcctgtggtggagagcatactgtggttctcacggagaatgctgtgtatacctttgggctgggacaatttggtcagctgggtcttggcacttttctttttgaaacttcagaacccaaagtcattgagaatattagggatcaaacaataagttatatttcttgtggagaaaatcacacagctttgataacagatatcggccttatgtatacttttggagatggtcgccacggaaaattaggacttggactggagaattttaccaatcacttcattcctactttgtgctctaattttttgaggtttatagttaaattggttgcttgtggtggatgtcacatggtagtttttgctgctcctcatcgtggtgtggcaaaagaaattgaattcgatgaaataaatgatacttgcttatctgtggcgacttttctgccgtatagcagtttaacctcaggaaatgtactgcagaggactctatcagcacgtatgcggcgaagagagagggagaggtctccagattctttttcaatgaggagaacactacctccaatagaagggactcttggcctttctgcttgttttctccccaattcagtctttccacgatgttctgagagaaacctccaagagagtgtcttatctgaacaggacctcatgcagccagaggaaccagattatttgctagatgaaatgaccaaagaagcagagatagataattcttcaactgtagaaagccttggagaaactactgatatcttaaacatgacacacatcatgagcctgaattccaatgaaaagtcattaaaattatcaccagttcagaaacaaaagaaacaacaaacaattggggaactgacgcaggatacagctcttactgaaaacgatgatagtgatgaatatgaagaaatgtcagaaatgaaagaagggaaagcatgtaaacaacatgtgtcacaagggattttcatgacgcagccagctacgactatcgaagcattttcagatgaggaagtagagatcccagaggagaaggaaggagcagaggattcaaaaggaaatggaatagaggagcaagaggtagaagcaaatgaggaaaatgtgaaggtgcatggaggaagaaaggagaaaacagagatcctatcagatgaccttacagacaaagcagaggatcatgaattttctaaaactgaggaactaaaactagaagatgtggatgaggaaattaatgctgaaaatgtggaaagcaagaagaaaactgtgggagatgatgaaagtgttcctacaggttatcacagtaaaacagaaggagcagaaagaaccaatgatgatagctcagctgaaactattgaaaagaaagaaaaagccaacctagaggaacgggccatttgtgagtacaatgaaaacccaaaaggatacatgcttgatgatgcagatagcagttcattagaaatcctagaaaacagtgaaacaacaccaagcaaagacatgaaaaaaacaaagaagatttttctgttcaaaagagtcccctcaataaatcaaaagattgtcaagaataacaatgagccgctcccagagataaaatccataggagaccagatcattttaaaaagtgataataaagatgccgaccagaaccacatgagtcagaatcatcagaatatcccaccaacaaatacagagagaagatcaaaatcctgtacaatactataaatatatatttatgttttcacagtcaccaagtgtattgtaatgtatacttgaaaaatgttataacttatgaagtaaagtttctgatagtagtctttaaaagatataagacttaatatgttttattcagcttctataagtgtgaccagttttgatatttatttatgctaatatttttaacaagtcatttcaaaatatgtgtatctcaaattctccctaaagtgttgtggccttaactgttcagtattgcaataaaaaatatatttttatatgtggaaaattgaaataagatatttcctagtttttactaaacaattttacttctttataattttataaggcaatatttgcaatcttacgacactgtaacagtttttgatgtatttacaatttttacaaaactgaggtaaaattgtttataatgaacatattttaataaactatatctggtcagttccaaaaaaaaaaa

SEQ ID NO: 2196 - DNA, 3121 bp, Homo sapiens
gtttgttgacttccgggagcgcggttgtagttgatctccggagtttcgccatgcggaacttgggggctttcgcggcccgcgtcggtgcggagtagctgctttagccccgaccaaaccgtcctctacagcctcctggccccggcgcaggctgcccgtactgcccgtggcatgagggagccggaagagctgatgcccgattcgggtgctgtgtttacatttgggaaaagtaaatttgctgaaaataatcccggtaaattctggtttaaaaatgatgtccctgtacatctttcatgtggagatgaacattctgctgttgttaccggaaataataaactttacatgtttggcagtaacaactggggtcagttaggattaggatcaaagtcagccatcagcaagccaacatgtgtcaaagctctaaaacctgaaaaagtgaaattagctgcctgtggaaggaaccacaccctggtgtcaacagaaggaggcaatgtatatgcaactggtggaaataatgaaggacagttggggcttggtgacaccgaagaaagaaacacttttcatgtaattagcttttttacatccgagcataagattaagcagctgtctgctggatctaatacttcagctgccctaactgaggatggaagactttttatgtggggtgacaattccgaagggcaaattggtttaaaaaatgtaagtaatgtctgtgtccctcagcaagtgaccattgggaaacctgtctcctggatctcttgtggatattaccattcagcttttgtaacaacagatggtgagctatatgtgtttggagaacctgagaatgggaagttaggtcttcccaatcagctcctgggcaatcacagaacaccccagctggtgtctgaaattccggagaaggtgatccaagtagcctgtggtggagagcatactgtggttctcacggagaatgctgtgtatacctttgggctgggacaatttggtcagctgggtcttggcacttttctttttgaaacttcagaacccaaagtcattgagaatattagggatcaaacaataagttatatttcttgtggagaaaatcacacagctttgataacagatatcggccttatgtatacttttggagatggtcgccacggaaaattaggacttggactggagaattttaccaatcacttcattcctactttgtgctctaattttttgaggtttatagttaaattggttgcttgtggtggatgtcacatggtagtttttgctgctcctcatcgtggtgtggcaaaagaaattgaattcgatgaaataaatgatacttgcttatctgtggcgacttttctgccgtatagcagtttaacctcaggaaatgtactgcagaggactctatcagcacgtatgcggcgaagagagagggagaggtctccagattctttttcaatgaggagaacactacctccaatagaagggactcttggcctttctgcttgttttctccccaattcagtctttccacgatgttctgagagaaacctccaagagagtgtcttatctgaacaggacctcatgcagccagaggaaccagattatttgctagatgaaatgaccaaagaagcagagatagataattcttcaactgtagaaagccttggagaaactactgatatcttaaacatgacacacatcatgagcctgaattccaatgaaaagtcattaaaattatcaccagttcagaaacaaaagaaacaacaaacaattggggaactgacgcaggatacagctcttactgaaaacgatgatagtgatgaatatgaagaaatgtcagaaatgaaagaagggaaagcatgtaaacaacatgtgtcacaagggattttcatgacgcagccagctacgactatcgaagcattttcagatgaggaagtagagatcccagaggagaaggaaggagcagaggattcaaaaggaaatggaatagaggagcaagaggtagaagcaaatgaggaaaatgtgaaggtgcatggaggaagaaaggagaaaacagagatcctatcagatgaccttacagacaaagcagagtattctgccagtcactcccaaattgtttcagtttaaaaggatcatgaattttctaaaactgaggaactaaaactagaagatgtggatgaggaaattaatgctgaaaatgtggaaagcaagaagaaaactgtgggagatgatgaaagtgttcctacaggttatcacagtaaaacagaaggagcagaaagaaccaatgatgatagctcagctgaaactattgaaaagaaagaaaaagccaacctagaggaacgggccatttgtgagtacaatgaaaacccaaaaggatacatgcttgatgatgcagatagcagttcattagaaatcctagaaaacagtgaaacaacaccaagcaaagacatgaaaaaaacaaagaagatttttctgttcaaaagagtcccctcaataaatcaaaagattgtcaagaataacaatgagccgctcccagagataaaatccataggagaccagatcattttaaaaagtgataataaagatgccgaccagaaccacatgagtcagaatcatcagaatatcccaccaacaaatacagagagaagatcaaaatcctgtacaatactataaatatatatttatgttttcacagtcaccaagtgtattgtaatgtatacttgaaaaatgttataacttatgaagtaaagtttctgatagtagtctttaaaagatataagacttaatatgttttattcagcttctataagtgtgaccagttttgatatttatttatgctaatatttttaacaagtcatttcaaaatatgtgtatctcaaattctccctaaagtgttgtggccttaactgttcagtattgcaataaaaaatatatttttatatgtggaaaattgaaataagatatttcctagtttttactaaacaattttacttctttataattttataaggcaatatttgcaatcttacgacactgtaacagtttttgatgtatttacaatttttacaaaactgaggtaaaattgtttataatgaacatattttaataaactatatctggtcagttccaaaaaaaaaaa

SEQ ID NO: 2197 - DNA, 4718 bp, Homo sapiens
gtttgttgacttccgggagcgcggttgtagttgatctccggagtttcgccatgcggaacttgggggctttcgcggcccgcgtcggtgcggagtagctgctttagccccgaccaaaccgtcctctacagcctcctggccccggcgcaggctgcccgtactgcccgtggcatgagggagccggaagagctgatgcccgattcgggtgctgtgtttacatttgggaaaagtaaatttgctgaaaataatcccggtaaattctggtttaaaaatgatgtccctgtacatctttcatgtggagatgaacattctgctgttgttaccggaaataataaactttacatgtttggcagtaacaactggggtcagttaggattaggatcaaagtcagccatcagcaagccaacatgtgtcaaagctctaaaacctgaaaaagtgaaattagctgcctgtggaaggaaccacaccctggtgtcaacagaaggaggcaatgtatatgcaactggtggaaataatgaaggacagttggggcttggtgacaccgaagaaagaaacacttttcatgtaattagcttttttacatccgagcataagattaagcagctgtctgctggatctaatacttcagctgccctaactgaggatggaagactttttatgtggggtgacaattccgaagggcaaattggtttaaaaaatgtaagtaatgtctgtgtccctcagcaagtgaccattgggaaacctgtctcctggatctcttgtggatattaccattcagcttttgtaacaacagatggtgagctatatgtgtttggagaacctgagaatgggaagttaggtcttcccaatcagctcctgggcaatcacagaacaccccagctggtgtctgaaattccggagaaggtgatccaagtagcctgtggtggagagcatactgtggttctcacggagaatgctgtgtatacctttgggctgggacaatttggtcagctgggtcttggcacttttctttttgaaacttcagaacccaaagtcattgagaatattagggatcaaacaataagttatatttcttgtggagaaaatcacacagctttgataacagatatcggccttatgtatacttttggagatggtcgccacggaaaattaggacttggactggagaattttaccaatcacttcattcctactttgtgctctaattttttgaggtttatagttaaattggttgcttgtggtggatgtcacatggtagtttttgctgctcctcatcgtggtgtggcaaaagaaattgaattcgatgaaataaatgatacttgcttatctgtggcgacttttctgccgtatagcagtttaacctcaggaaatgtactgcagaggactctatcagcacgtatgcggcgaagagagagggagaggtctccagattctttttcaatgaggagaacactacctccaatagaagggactcttggcctttctgcttgttttctccccaattcagtctttccacgatgttctgagagaaacctccaagagagtgtcttatctgaacaggacctcatgcagccagaggaaccagattatttgctagatgaaatgaccaaagaagcagagatagataattcttcaactgtagaaagccttggagaaactactgatatcttaaacatgacacacatcatgagcctgaattccaatgaaaagtcattaaaattatcaccagttcagaaacaaaagaaacaacaaacaattggggaactgacgcaggatacagctcttactgaaaacgatgatagtgatgaatatgaagaaatgtcagaaatgaaagaagggaaagcatgtaaacaacatgtgtcacaagggattttcatgacgcagccagctacgactatcgaagcattttcagatgaggaagtagagatcccagaggagaaggaaggagcagaggattcaaaaggaaatggaatagaggagcaagaggtagaagcaaatgaggaaaatgtgaaggtgcatggaggaagaaaggagaaaacagagatcctatcagatgaccttacagacaaagcagaggtgagtgaaggcaaggcaaaatcagtgggagaagcagaggatgggcctgaaggtagaggggatggaacctgtgaggaaggtagttcaggagcagaacactggcaagatgaggagagggagaagggggagaaagacaagggtagaggagaaatggagaggccaggagagggagagaaggaactagcagagaaggaagaatggaagaagagggatggggaagagcaggagcaaaaggagagggagcagggccatcagaaggaaagaaaccaagagatggaggagggaggggaggaggagcatggagaaggagaagaagaggagggagacagagaagaggaagaagagaaggagggagaagggaaagaggaaggagaaggggaagaagtggagggagaacgtgaaaaggaggaaggagagaggaaaaaggaggaaagagcggggaaggaggagaaaggagaggaagaaggagaccaaggagagggggaagaggaggaaacagaggggagaggggaggaaaaagaggagggaggggaagtagagggaggggaagtagaggaggggaaaggagagagggaagaggaagaggaggagggtgagggggaagaggaggaaggggagggggaagaggaggaaggggagggggaagaggaggaaggagaagggaaaggggaggaagaaggggaagaaggagaaggggaggaagaaggggaggaaggagaaggggagggggaagaggaggaaggagaaggggagggagaagaggaaggagaaggggagggagaagaggaggaaggagaaggggagggagaagaggaaggagaaggggagggagaagaggaggaaggagaagggaaaggggaggaggaaggagaggaaggagaaggggagggggaagaggaggaaggagaaggggaaggggaggatggagaaggggagggggaagaggaggaaggagaatgggagggggaagaggaggaaggagaaggggagggggaagaggaaggagaaggggaaggggaggaaggagaaggggagggggaagaggaggaaggagaaggggagggggaagaggaggaaggggaagaagaaggggaggaagaaggagagggagaggaagaaggggagggagaaggggaggaagaagaggaaggggaagtggaaggggaggtggaaggggaggaaggagagggggaaggagaggaagaggaaggagaggaggaaggagaagaaagggaaaaggagggggaaggagaagaaaacaggaggaacagagaagaggaggaggaagaagaggggaagtatcaggagacaggcgaagaagagaatgaaaggcaggatggagaggagtacaaaaaagtgagcaaaataaaaggatctgtgaaatatggcaaacataaaacatatcaaaaaaagtcagttactaacacacagggaaatgggaaagagcagaggtccaaaatgccagtccagtcaaaacgacttttaaaaaacgggccatcaggttccaaaaagttctggaataatgtattaccacattacttggaattgaagtaacaaaccttaaatgtgacccgattatggccagtcagacaatttaaatgccttgcatataacgggcactcattacgtgttattaaattgattttatgtcaattattttatgtgtagtaaaaaaaaaagcaactgatgcagctgtgttaaggagccaaagacaataggaggcactggtaaattttggcctctctcaaactaaaattttcgtgtatttcccccccaaattataaaaacataactagaaaatattaaaaggtcatatcagattattaacattatatattcattaaaggcagctttaggaaacaggaatatactacaagagtgttttgtttgtgtatacaaatcattccatttttaaatggcacagatgcttaagggctataaaaacttctaatttcttataaatatgttagcactttttttaagttagtgattacagtttacctactgtatagaataattttctaataatggatggtattctaaaactcaattgaggcattcacattttaaagaaagtattgtctttcaccttttatgtgttctttttgcaaaaatctacaaagtgacagctgtgttcagagcttagatcccaaaaacgtgatctcttttagttactatctgggcagatggtagtatatctaatgaaatggtgattaatttaaatgtataatctggaaatatgtaaaacttgaagtattttttgtccaggcaaaggtactcattgggcctcagtttcttcatctctaaaatggagtggatgagatgatgtgataactgcagtcccttctaactcttaaattcttttcattctcacagattcactctatcattattgttattcatgtaagaaacgttttagggagaaaaattacactttaaaattaatttagttttctatacagttgttttctttactcttgaaaagttatgacagctttaacgtctcttgtcttctgtaattttttatttctaaactcctatcatttccaagctttaactgtactttatcagagccttcatttctggtatgtgttatatgccctcaatgtattcactgactgttctgtaatttcagtttgtctgtt

SEQ ID NO: 2198 - DNA, 1694 bp, Homo sapiens
caagtattttgcttcgatgatttcacgtcatcttcaaaacaacctcatgagggctgggtcagttagaacctaaacaaactagagacctggttgcaacccctcaggctctgctgatgctgtccccctttgttcctgcagcgtggaccctgccagcagccaggccatggagctctctgatgtcaccctcattgagggtgtgggtaatgaggtgatggtggtggcaggtgtggtggtgctgattctagccttggtcctagcttggctctctacctacgtagcagacagcggtagcaaccagctcctgggcgctattgtgtcagcaggcgacacatccgtcctccacctggggcatgtggaccacctggtggcaggccaaggcaaccccgagccaactgaactcccccatccatcagaggcaaatacttccctggacaagaaagccagatgaaactgatctaccagggccgcctgctacaagacccagcccgcacactgcgttctctgaacattaccgacaactgtgtgattcactgccaccgctcacccccagggtcagctgttccaggcccctcagcctccttggccccctcggccactgagccacccagccttggtgtcaatgtgggcagcctcatggtgcctgtctttgtggtgctgttgggtgtggtctggtacttccgaatcaattaccgccaattcttcacagcacctgccactgtctccctggtgggagtcaccgtcttcttcagcttcctagtatttgggatgtatggacgataaggacataggaagaaaatgaaaggcatggtctttctcctttatggcctccccacttttcctggccagagctgggcccaagggccggggagggaggggtggaaaggatgtgatggaaatctcctccataggacacaggaggcaagtatgcggcctccccttctcatccacaggagtacagatgtccctcccgtgcgagcacaactcaggtagaaatgaggatgtcatcttccttcacttttagggtcctctgaaggagttcaaagctgctggccaagctcagtggggagcctgggctctgagattccctcccacctgtggttctgactcttcccagtgtcctgcatgtctgcccccagcacccagggctgcctgcaagggcagctcagcatggccccagcacaactccgtagggagcctggagtatccttccatttctcagccaaatactcatcttttgagactgaaatcacactggcgggaatgaagattgtgccagccttctcttatgggcacctagccgccttcaccttcttcctctaccccttagcaggaatagggtgtcctcccttctttcaaagcactttgcttgcattttattttatttttttaagagtccttcatagagctcagtcaggaaggggatggggcaccaagccaagcccccagcattgggagcggccaggccacagctgctgctcccgtagtcctcaggctgtaagcaagagacagcactggcccttggccagcgtcctaccctgcccaactccaaggactgggtatggatcgctgggccctaggctcttgcttctggggctattggagggtcagtgtctgtgactgaataaagttccattttgtggtcctgcaaaaaaaaaaataaaaaaaaaaaaaaaaaaaaaaaaaaaaaaaaaaaa

SEQ ID NO: 2199 - DNA, 2444 bp, Homo sapiens
cccgccccgaagtttgaggggtgtggacggtttgtgacccccttagccgaccctactcctcactggccgggacaactggtcttatcacggaggctgggaccaggcagcccttcggttcgggtgggcccatggaccccagtccaacgccgagggaataggaccatccaaaagcggaaccttcgcctcagaaaaagggtgcgggacccctcctcaccgtgcggtcacggtacggacagggtagatcacaggctgagggacagagcaaagacccctgaggccggacacctggggtcctgccgggcccctccccacgagagttccctgtgtctgtgccaatcgttttcgtctttctttgccgcagtttcttttcctgtaaatcatggttaatgacattaaccttcttaccatcaggggttagttgtggttgtgataaataattactaccgttattaagcaattgcaatttgcagtgtgccaggcactgtgccaagtattttgcttcgatgatttcacgtcatcttcaaaacaacctcatgagggctgggtcagttagaacctaaacaaactagagacctggttgcaacccctcaggctctgctgatgctgtccccctttgttcctgcagcgtggaccctgccagcagccaggccatggagctctctgatgtcaccctcattgagggtgtgggtaatgaggtgatggtggtggcaggtgtggtggtgctgattctagccttggtcctagcttggctctctacctacgtagcagacagcggtagcaaccagctcctgggcgctattgtgtcagcaggcgacacatccgtcctccacctggggcatgtggaccacctggtggcaggccaaggcaaccccgagccaactgaactcccccatccatcagagggtaatgatgagaaggctgaagaggcgggtgaaggtcggggagactccactggggaggctggagctgggggtggtgttgagcccagccttgagcatctccttgacatccaaggcctgcccaaaagacaagcaggtgcaggcagcagcagtccagaggcccccctgagatctgaggatagcacctgcctccctcccagccctggcctcatcactgtgcggctcaaattcctcaatgataccgaggagctggctgtggctaggccagaggataccgtgggtgccctgaagagcaaatacttccctggacaagaaagccagatgaaactgatctaccagggccgcctgctacaagacccagcccgcacactgcgttctctgaacattaccgacaactgtgtgattcactgccaccgctcacccccagggtcagctgttccaggcccctcagcctccttggccccctcggccactgagccacccagacttggtgtcaatgtgggcagcctcatggtgcctgtctttgtggtgctgttgggtgtggtctggtacttccgaatcaattaccgccaattcttcacagcacctgccactgtctccctggtgggagtcaccgtcttcttcagcttcctagtatttgggatgtatggacgataaggacataggaagaaaatgaaaggcatggtctttctcctttatggcctccccacttttcctggccagagctgggcccaagggccggggagggaggggtggaaaggatgtgatggaaatctcctccataggacacaggaggcaagtatgcggcctccccttctcatccacaggagtacagatgtccctcccgtgcgagcacaactcaggtagaaatgaggatgtcatcttccttcacttttagggtcctctgaaggagttcaaagctgctggccaagctcagtggggagcctgggctctgagattccctcccacctgtgttctgactcttcccagtgtcctgcatgtctgcccccagcacccagggctgcctgcaagggcagctcagcatggccccagcacaactccgtagggagcctggagtatccttccatttctcagccaaatactcatcttttgagactgaaatcacactggcgggagtgaagattgtgccagccttctcctatgggcacctagccgccttcaccttcttcctctaccccttagcaggaatagggtgtcctcccttctttcaaagcactttgcttgcattttattttatttttttaagagtccttcatagagctcagtcaggaaggggatggggcaccaagccaagcccccagcattgggagcggccaggccacagctgctgctcccgtagtcctcaggctgtaagcaagagacagcactggcccttggccagcgtcctaccctgcccaactccaaggactgggtatggattgctgggccctaggctcttgcttctggggctattggagggtcagtgtctgtgactgaataaagttccattttgtggtcaaaagaaaaaaaaaaaaaaaaaaaaaa

SEQ ID NO: 2200 - DNA, 2905 bp, Homo sapiens
agcgttgggccgcggtcgcggggccgtctcaggctgccgtcccgcccctcccgtccggccgccgccgccgccaccgccgccaccgcctgggggttggttgaggcggacggcggggtccgggccggagtacgtcgttcccgctgcgctaggggaagcgggcagtcagaaaaatgggtaagaagagtcgagtaaaaactcagaaatctggcactggtgctacagcaactgtgtcaccaaaggaaatcttgaacctgaccagtgagctgctgcagaaatgcagcagtccggcgcctggcccaggaaaagagtgggaagagtatgtgcagatccggactctggttgagaaaatacggaaaaagcaaaaaggtctgtccgttacttttgatggaaaaagagaagattactttcctgatctaatgaaatgggcctctgaaaatggggcttctgtcgagggttttgaaatggttaacttcaaagaagagggctttggtttgagagcaacaagagatatcaaggcagaagaattgtttttatgggttccacgaaaattgctaatgactgttgaatctgctaaaaattcagtgttggggcccttatattctcaagaccgaatccttcaagccatgggaaacatcgcactggcctttcatttgctgtgtgagcgagccagccctaactccttctggcagccctatattcaaaccctccccagtgaatatgacactcctctctactttgaagaagatgaagttcggtatcttcagtccacacaagctatacatgatgtcttcagccagtataaaaacacagctcgacagtacgcctacttctataaagtcatccagacccatcctcatgccaacaaactacccttgaaggattctttcacttacgaggactacaggtgggcagtctcttctgttatgacgaggcaaaaccaaattcccacagaggatggttcccgcgtgaccctggctctgattcctttatgggatatgtgtaaccacaccaacggcctgatcactactggttacaacctggaagatgaccgctgtgagtgtgtggctctgcaggattttcgggctggagagcagatttacattttttatggcactcgatccaacgcagagtttgtgatccacagtggttttttctttgacaataactcacacgacagagtgaaaataaagcttggagtgagtaaaagtgacagactctacgccatgaaggccgaggtcttggctcgtgccggcatccccacttccagtgtttttgcattgcattttaccgagccgcccatctctgctcagcttttggcttttctccgagtattctgtatgactgaagaagaactgaaagaacacttgctgggagacagcgctattgatagaatcttcaccttggggaactcggaatttcctgttagctgggacaacgaggtcaaactttggacatttcttgaagatagagcctcacttcttttaaaaacatataaaacaactattgaggaagataaatccgtcttgaaaaaccacgatctttctgttcgtgcaaaaatggccatcaaattgcgcttaggtgagaaagagattttggaaaaagcagtaaagagtgcagctgtcaaccgggaatactatcgccaacagatggaggaaaaggctccgcttcccaaatatgaagagagtaaccttgggctgttggagagcagcgtgggggactcgaggctccccctggtcttgagaaacctcgaggaggaggctggagtgcaggatgccttgaacatcagagaggcaatcagcaaagcaaaggccacagaaaacgggcttgtaaacggtgaaaactctatccctaatgggaccaggtccgaaaatgaaagtctcaatcaagaaagtaaaagagcagttgaagacgccaaaggatcttcttcagacagcactgctggagttaaggagtagctcgaggtgaagctggatgggggatccagtggagcaggagttgacggacagtccgttcacatcgctgtgtttccttgttaacatttttctttctgcagagaggaagatatgtttttgctgctttatataaaaatggtttttttaagttattttaaaaatctagcttccctttttgattaagattgccatcttgcttttaggcaaaacaaaccaattaacaaacaaccacaagaaagggagaagaggtgcctgtgggagattttgcagacctattgtgggtataggtattttcttcctggggaagaattcagttcccgtctcagctgtacttttgtgggcctgtcatcttgatgaccagaatgaaagcttgctctgcctcctgccagccagaattggtggcgggacttggggatacagcgtgaaggtggggaagttgcacagcagaaaacagaattgaagttgggaaactctagagtctgggcaaaatgtttggttttttctcttaaaaaaaataacaccccattaccaaaagaaaaggtaaggtggcaaccttatttttaatagtttgaaatgatgataatcctaattatataaaaatatatatataaacacacatatatatagtgatttctaaagatttgtttacttttgtgttttgttttactgtactaagaacttgtcctttctccttgaatcaaagtaggacatgcatcatcctcctaattttaaatgttggctctgattttaaagtggtgcatttgattccagccttggtaatggagagtttgcaaacacacagcggcccacagcttcacgtggtggtgtgcagtgtgaggcagctccttggctttcctggttttcacaacaagctagagattttcaaagctacacttttgagtaaaaacccttattaaaagaaaaacatgattaataaaaaaaaaaaaaaaaaa

SEQ ID NO: 2201 - DNA, 1441 bp, Homo sapiens
agcgttgggccgcggtcgcggggccgtctcaggctgccgtcccgcccctcccgtccggccgccgccgccgccaccgccgccaccgcctgggggttggttgaggcggacggcggggtccgggccggagtacgtcgttcccgctgcgctaggggaagcgggcagtcagaaaaatgggtaagaagagtcgagtaaaaactcagaaatctggcactggtgctacagcaactgtgtcaccaaaggaaatcttgaacctgaccagtgagctgctgcagaaatgcagcagtccggcgcctggcccaggaaaagagtgggaagagtatgtgcagatccggactctggttgagaaaatacggaaaaagcaaaaaggtctgtccgttacttttgatggaaaaagagaagattactttcctgatctaatgaaatgggcctctgaaaatggggcttctgtcgagggttttgaaatggttaacttcaaagaagagggctttggtttgagagcaacaagagatatcaaggcagaagaattgtttttatgggttccacgaaaattgctaatgactgttgaatctgctaaaaattcagtgttggggcccttatattctcaagaccgaatccttcaagccatgggaaacatcgcactggcctttcatttgctgtgtgagcgagccagccctaactccttctggcagccctatattcaaaccctccccagtgaatatgacactcctctctactttgaagaagatgaagttcggtatcttcagtccacacaagctatacatgatgtcttcagccagtataaaaacacagctcgacagtacgcctacttctataaagtcatccagacccatcctcatgccaacaaactacccttgaaggattctttcacttacgaggactacaggtgggcagtctcttctgttatgacgaggcaaaaccaaattcccacagaggatggttcccgcgtgaccctggctctgattcctttatgggatatgtgtaaccacaccaacggcctgacaccagaagattccttcgctcttgctgtcgcctctgcctaagaccctccattccttaggcacttacgggactcactcatagacctcctccagcgtggctgccctgagcaccctatgtggaatgactacgcctccagctcatccgccctcctgccctgtcctgttacatttccctctattgtccagatccgcttgtttctgcctttttaaaaaattattgttggttcacccccccgcctcccattagaatggaagatccatgaacgcagggtgattttgggggagggtctgttttgctcattgctatatcgctgtggtttttaatgaattcatgaccggtaaataaatgactgtaaaagccccatgcctaggaaaaaagatcagaaagaaataaaccaaaatgttaacgtgaaaaaaaaaaa

SEQ ID NO: 2202 - DNA, 3133 bp, Homo sapiens
gggtgccggcagcggctggaagcgggaggccagtcctggccgggctgggcgacccgaatggagccagggccggcgctggtcccagcggccgcacctccgggggcacggcgcgtaacaggaggcttccggggctgagagcgttacaggctgcgctccggggccagataggccgggcgctcagaaggggagtatgagcctgatgtgggcagaatccagatgagctggccagtgctgtgaaggagctgagagcacccccgagagccgtgagatggcaccaaaaaccaagaaaggatgtaaagtgacactacctgagaagcctgttaaactagcttcacataccagagacaccacaggtgtatctcagatgttcccttcttcaaaggcgagaacaaagtccctcctgggtgatgatgtcttcagcaccatggcaggcctggaagaagctgatgctgaggtttcaggtatctcagaggcagacccacaggctctgctccaggccatgaaggacctggacggcatggatgctgatatcttaggtctgaagaaatctaattcagcccctagcaaaaaagctgcaaaggaccctgggaaaggagagctgcccaaccaccccaagcctgcagggggtgccattcccaccaagaagtcacttccgtctcccagcagctctgggcatcagaacaggaggttttcctctgaagacttggaagacccattgagaggacttctctcctatgatgaaggaggaatcaccaagcagccgcctgtgacacagagtaaaacagcttctgacaagagccccagcacagtgagagatcaaggtccctctattcctctaactcctggggacacccccatccgaaaaaaagaagaattgttgtttgatgatggggatgacatcatggccaccttggggtttggagacagccccaaagcagagaagaggcagataggagaccaggaagggcctcgccctgctcgctccacgctggatgagctgctgggtcgaggcatggccaccaaactcctggcccgcccgggcaccggggagcacagggagttcaagctagacaagaagtaccagaggccacaggacagtgaagatatgtggggtgacgaggacttcacctttggagcctatcagcccactgtggtctcctctgagggccggcagtcccgccggcagtctgtcagtaggttcttcgcagacagtggcgcagaccccaagggagaaccaggctccaaacagagccctccaatggcttccagccccatccagcccaggaagggaggagctgactggttgggcctcaaggacgaggacttggacctgttccctgcctcacccaccagagaggcccatcgggaaagttcagtgcctgtcacgccctcagtgcctcctcctgcgagccagcactccacgccagctgggctgcccccctccagggcaaagccaccaactgaaggtgcagggtcccctgccaaagccagccaggcttccaagctgcgagcctccaaggaggagaaagaggactggctgagccatgccctgtctcggaagaagtcccaaggcctggccagagagcagcatgctgggacctctgagggcctgcatttggcggggacagcgggccatcccccttctggcagccaacctctcaccagcacacaagggcttgagcacgcagctgctggagggagttctggaacaactgcacgagaaagaccgtgtgtcaggcctggtgtctcggggtcccctgtgactcagaaccatgccgcctcagcactccctacaggttccccaaagaggggaacagcccctggagacctctcagccactgagcctgccacgtgtttcccgagcacccagaaacccacagagccttccgtgcccgtccagcccctgctcccagagtccctggcccggagcctgctgccgagcacagaataccagaagcagctcctggcagcacaggtgcaacttcagtgcagccccgctgagctccaggccgagctgctgcatagccaggcccggctggcagagctggaggcccaggtgcggaagctggagctagaacgggcccagcatgagctgctgctggggagtctgcagcagcagcaccaggcagacctggagctcatcgagagtgcacacagaagccgcatcaaggtgctagaaacatcgtaccagcaacgggaggagcggctccggagagagaacgaagagctgtcagctcggtatctgtcgcagtgccaggaggccgaacaggcccgtgctgagcttacggcccagcaccagcggcgcttggcggccatagcgcaggagaaggaccaggaaatggagcggctccgggagctgcagcgggcgtccatcctagacatgcgcagagaccacgaggagcagctgcagcggctaaagctgctgaaggaccgagaggtcgatgcggccaccagtgccacctcccacacgcggtccctgaatagcatcatccaccagatggagaagttctccagcagcctgcacgagttgtcctcccgcgtggaggcctcgcacctcaccacctcccaggagcgggagctggggatccggcagcgtgacgagcagctgcgggcactgcaggagcggctgggccagcagcagcgggacatggggagggacgaggagggaagcctctgtgctgctcacctgcccaaagcccagctcagcgggtacgcagtggaggcgacaaggaaccaatcacaactacagaggtttctctgatcctcctccactcccgctgcttcaacttgactaagcttaaaaaaactgcttttgccatggctcatcggagtttatacttatttcttagaaaatgtttcctgttatttgctggacaagtcccaaagaacaggcagatgttcttattaaaagatcagcctataagattggtcaggaccaggcgcctctggccacgtgcctctcccctccagcacctgcggtctgcggtggcacctggcagctggaccacagccaggagaagggtactattagccctgcttcaaacatgcagaaactgaggcccggggagattaaataacctgcctgaaatgacagtgagtagctgcgcctggatttgagttctgctctggccaa

SEQ ID NO: 2203 - DNA, 1228 bp, Homo sapiens
gcacctccgggggcacggcgcgtaacaggaggcttccggggctgagagcgttacaggctgcgctccggggccagataggccgggcgctcagaaggggagtatgagcctgatgtgggcagaatccagatgagctggccagtgctgtgaaggagctgagagcacccccgagagccgtgagatggcaccaaaaaccaagaaaggatgtaaaggctccattgatgattttcttggtgaccttctaggggatgatatgacactacctgagaagcctgttaaactagcttcacataccagagacaccacaggtgtatctcagatgttcccttcttcaaaggcgagaacaaagtccctcctgggtgatgatgtcttcagcaccatggcaggcctggaagaagctgatgctgaggtttcaggtatctcagaggcagacccacaggctctgctccaggccatgaaggacctggacggcatggatgctgatatcttaggtctgaagaaatctaattcagcccctagcaaaaaagctgcaaaggaccctgggaaaggagagctgcccaaccaccccaagcctgcagggggtgccattcccaccaagaagtcacttccgtctcccagcagctctgggcatcagaacaggaggttttcctctgaagacttggaagacccattgagaggacttctctcctatgatgaaggaggaatcaccaagcagccgcctgtgacacagagtaaaacagcttctgacaagagccccagcacagtgagagatcaaggtccctctattcctctaactcctggggacacccccatccgaaaaaaagaagaattgttgtttgatgatggggatgacatcatggccaccttggggtttggagacagccccaaagcagagaagaggcagataggagaccaggaagggcctcgccctgctcgctccacgctggatgagctgctgggtcgaggcatggccaccaaactcctggcccgcccgggcaccggggagcacagggagttcaagctagacaagaagtaccagaggccacagggtaaggaggcttgcgggggccgcaacaggacgggagggaggcctctagatcaggctttcatcacaacctataatgagaaatcagcctcacatcctgatacacacatgtgattatacacgtctatagctgagacaaaataatacttaccgtgaaataatacttaccgtgaccactgttcgtgc

SEQ ID NO: 2204 - DNA, 4785 bp, Homo sapiens
catggcgtccccacctcctctgtgagggcggggagtatgagcctgatgtgggcagaatccagatgagctggccagtgctgtgaaggagctgagagcacccccgagagccgtgagatggcaccaaaaaccaagaaaggatgtaaagtgacactacctgagaagcctgttaaactagcttcacataccagagacaccacaggtgtatctcagatgttcccttcttcaaaggcgagaacaaagtccctcctgggtgatgatgtcttcagcaccatggcaggcctggaagaagctgatgctgaggtttcaggtatctcagaggcagacccacaggctctgctccaggccatgaaggacctggacggcatggatgctgatatcttaggtctgaagaaatctaattcagcccctagcaaaaaagctgcaaaggaccctgggaaaggagagctgcccaaccaccccaagcctgcagggggtgccattcccaccaagaagtcacttccgtctcccagcagctctgggcatcagaacaggaggttttcctctgaagacttggaagacccattgagaggacttctctcctatgatgaaggaggaatcaccaagcagccgcctgtgacacagagtaaaacagcttctgacaagagccccagcacagtgagagatcaaggtccctctattcctctaactcctggggacacccccatccgaaaaaaagaagaattgttgtttgatgatggggatgacatcatggccaccttggggtttggagacagccccaaagcagagaagaggcagataggagaccaggaagggcctcgccctgctcgctccacgctggatgagctgctgggtcgaggcatggccaccaaactcctggcccgcccgggcaccggggagcacagggagttcaagctagacaagaagtaccagaggccacaggacagtgaagatatgtggggtgacgaggacttcacctttggagcctatcagcccactgtggtctcctctgagggccggcagtcccgccggcagtctgtcagtaggttcttcgcagacagtggcgcagaccccaagggagaaccaggctccaaacagagccctccaatggcttccagccccatccagcccaggaagggaggagctgactggttgggcctcaaggacgaggacttggacctgttccctgcctcacccaccagagaggcccatcgggaaagttcagtgcctgtcacgccctcagtgcctcctcctgcgagccagcactccacgccagctgggctgcccccctccagggcaaagccaccaactgaaggtgcagggtcccctgccaaagccagccaggcttccaagctgcgagcctccaaggaggagaaagaggactggctgagccatgccctgtctcggaagaagtcccaaggcctggccagagagcagcatgctgggacctctgagggcctgcatttggcggggacagcgggccatcccccttctggcagccaacctctcaccagcacacaagggcttgagcacgcagctgctggagggagttctggaacaactgcacgagaaagaccgtgtgtcaggcctggtgtctcggggtcccctgtgactcagaaccatgccgcctcagcactccctacaggttccccaaagaggggaacagcccctggagacctctcagccactgagcctgccacgtgtttcccgagcacccagaaacccacagagccttccgtgcccgtccagcccctgctcccagagtccctggcccggagcctgctgccgagcacagaataccagaagcagctcctggcagcacaggtgcaacttcagtgcagccccgctgagctccaggccgagctgctgcatagccaggcccggctggcagagctggaggcccaggtgaggggcagcggggccgttggtgctggtggcagggttgcgacaggaggggacactgagagtggctggaagcttccccaggagggaggaagggctgttggcacagggcagcgtggagtacagccacctcccctccctggttgctggccctcctgctgtctcccaggtgcggaagctggagctagaacgggcccagcatgagctgctgctggggagtctgcagcagcagcaccaggcagacctggagctcatcgagagtgcacacagaagccgcatcaaggtgctagaaacatcgtaccagcaacgggaggagcggctccggagagagaacgaagagctgtcagctcggtatctgtcgcagtgccaggaggccgaacaggcccgtgctgagcttacggcccagcaccagcggcgcttggcggccatagcgcaggagaaggaccaggaaatggagcggctccgggagctgcagcgggcgtccatcctagacatgcgcagagaccacgaggagcagctgcagcggctaaagctgctgaaggaccgagaggtcgatgcggccaccagtgccacctcccacacgcggtccctgaatagcatcatccaccagatggagaagttctccagcagcctgcacgagttgtcctcccgcgtggaggcctcgcacctcaccacctcccaggagcgggagctggggatccggcagcgtgacgagcagctgcgggcactgcaggagcggctgggccagcagcagcgggacatggaggaggagcggagccggcaacaggaggtcatcgggaagatggaggcacggctgaatgagcagagccggctgctggagcaggaacgctggcgggtgactgccgagcagtccaaggcggagtccatgcagcgcgccctagaggagcaaaggaaggtcacggcccagcagatggccatggaaagggcggagctggaacgggccaagagcgccttgctggaggagcagaagtctgtcatgctcaagtgcggggaggagcggcggcgcctggctgccgagtgggcggagttctccgcgcagcaaaagctgagctgagctgaagatcagggccagcgagctccgggccgaggagaagcagctggcagcggagagagcagccctggagcaggagcggcaggagctgcggctggagaaggagaggatcaacgccaccgccctgcgtgtcaagctccgcgccgaggaggtggagagcatgagcaaggtggcctccgagaagtacgaggagggggagcgggcattgcgcgaggcccagcaggtgcaggcagagcagcaggcccggttgcaggcggtgcagcaacagcaggagcggctgcggaagcaggagcagcacatgcaccaggagcatctgagtctggcccagcagaggctgcaactggaccgcgcacgacaggacctgccctctagcctcgtgggtctgttccccagggcccagggccctgcagcctccagccagagtgccctcatgcctcctgctcccaccacccgttggtgcagccagccgccaactggcctggaccccagccccttgcacctccatgccaggctggcactgctgaggcacatggcagagcaggaccgtgacttcttggagaatgaacagttcttcctggagaccctgaagaaagggtcctacaatttgacatctcattcagcctgagtgggaccccagccgattccccaacagagggttcggaccccagaactgtcctgttcctccggctgcctccatggaggcagtgcctggggaggattctgagatgcttgaggcctgatgacagctcttccgtggacagggtgcaagtgcatcctttccaaatgtgccagcccggggcagcccctgcctctggggctctgtggtgtaggctatcttaccatggctttggctgccctgccccaaagccattggcttggatctgagggtctgagttggcagcaaggacccccagctctcactgggctctgtgggctccccctgggctctgtgggctccccctgctccacaggtagactgttgtgggctctttttgcctgggcctcttctgaggcaggagctttcttgagggatgccacaaacagccttccctactccctgccagagcagttccctccctgatgagctggagaagggccctctggcctcctgacagtacagggagggcaccagctagatcctcccttgtggtgtgagatgttcctggaactcagccaggccctcctcctcctgggcttgcccagagcccccaccctattcccagcattgcccgaaggaccaaccagtttgggtgaacagtggcctcctcagcttcctccccatctgggtgccccaccggcggcggagggagctgtggcgatggtggggtgtggggagggacgaggagggaagcctctgtgctgctcacctgcccaaagcccagctcagcgggtacgcagtggaggcgacaaggaaccaatcacaactacagaggtttctctgatcctcctccactcccgctgcttcaacttgactaagcttaaaaaaactgcttttgccatggctcatcggagtttatacttatttcttagaaaatgtttcctgttatttgctggacaagtcccaaagaacaggcagatgttcttattaaaagatcagcctataagattggtcaggaccaggcgcctctggccacgtgcctctcccctccagcacctgcggtctgcggtggcacctggcagctggaccacagccaggagaagggtactattagccctgcttcaaacatgcagaaactgaggcccggggagattaaataacctgcctgaaatgacagtgagtagctgcgcctggatttgagttctgctctggccaa

SEQ ID NO: 2205 - DNA, 3145 bp, Homo sapiens
gggtgccggcagcggctggaagcgggaggccagtcctggccgggctgggcgacccgaatggagccagggccggcgctggtcccagcggccgcacctccgggggcacggcgcgtaacaggaggcttccggggctgagagcgttacaggctgcgctccggggccagataggccgggcgctcagaaggggagtatgagcctgatgtgggcagaatccagatgagctggccagtgctgtgaaggagctgagagcacccccgagagccgtgagatggcaccaaaaaccaagaaaggatgtaaagtgacactacctgagaagcctgttaaactagcttcacataccagagacaccacaggtgtatctcagatgttcccttcttcaaaggcgagaacaaagtccctcctgggtgatgatgtcttcagcaccatggcaggcctggaagaagctgatgctgaggtttcaggtatctcagaggcagacccacaggctctgctccaggccatgaaggacctggacggcatggatgctgatatcttaggtctgaagaaatctaattcagcccctagcaaaaaagctgcaaaggaccctgggaaaggagagctgcccaaccaccccaagcctgcagggggtgccattcccaccaagaagtcacttccgtctcccagcagctctgggcatcagaacaggaggttttcctctgaagacttggaagacccattgagaggacttctctcctatgatgaaggaggaatcaccaagcagccgcctgtgacacagagtaaaacagcttctgacaagagccccagcacagtgagagatcaaggtccctctattcctctaactcctggggacacccccatccgaaaaaaagaagaattgttgtttgatgatggggatgacatcatggccaccttggggtttggagacagccccaaagcagagaagaggcagataggagaccaggaagggcctcgccctgctcgctccacgctggatgagctgctgggtcgaggcatggccaccaaactcctggcccgcccgggcaccggggagcacagggagttcaagctagacaagaagtaccagaggccacaggacagtgaagatatgtggggtgacgaggacttcacctttggagcctatcagcccactgtggtctcctctgagggccggcagtcccgccggcagtctgtcagtaggttcttcgcagacagtggcgcagaccccaagggagaaccaggctccaaacagagccctccaatggcttccagccccatccagcccaggaagggaggagctgactggttgggcctcaaggacgaggacttggacctgttccctgcctcacccaccagagaggcccatcgggaaagttcagtgcctgtcacgccctcagtgcctcctcctgcgagccagcactccacgccagctgggctgcccccctccagggcaaagccaccaactgaaggtgcagggtcccctgccaaagccagccaggcttccaagctgcgagcctccaaggaggagaaagaggactggctgagccatgccctgtctcggaagaagtcccaaggcctggccagagagcagcatgctgggacctctgagggcctgcatttggcggggacagcgggccatcccccttctggcagccaacctctcaccagcacacaagggcttgagcacgcagctgctggagggagttctggaacaactgcacgagaaagaccgtgtgtcaggcctggtgtctcggggtcccctgtgactcagaaccatgccgcctcagcactccctacaggttccccaaagaggggaacagcccctggagacctctcagccactgagcctgccacgtgtttcccgagcacccagaaacccacagagccttccgtgcccgtccagcccctgctcccagagtccctggcccggagcctgctgccgagcacagaataccagaagcagctcctggcagcacaggtgcaacttcagtgcagccccgctgagctccaggccgagctgctgcatagccaggcccggctggcagagctggaggcccaggtgcggaagctggagctagaacgggcccagcatgagctgctgctggggagtctgcagcagcagcaccaggcagacctggagctcatcgagagtgcacacagaagccgcatcaaggtgctagaaacatcgtaccagcaacgggaggagcggctccggagagagaacgaagagctgtcagctcggtatctgtcgcagtgccaggaggccgaacaggcccgtgctgagcttacggcccagcaccagcggcgcttggcggccatagcgcaggagaaggaccaggaaatggagcggctccgggagctgcagcgggcgtccatcctagacatgcgcagagaccacgaggagcagctgcagcggctaaagctgctgaaggaccgagaggtcgatgcggccaccagtgccacctcccacacgcggtccctgaatagcatcatccaccagatggagaagttctccagcagcctgcacgagttgtcctcccgcgtggaggcctcgcacctcaccacctcccaggagcgggagctggggatccggcagcgtgacgagcagctgcgggcactgcaggagcggctgggccagcagcagcgggacatggaggaggagcggagccgggacgaggagggaagcctctgtgctgctcacctgcccaaagcccagctcagcgggtacgcagtggaggcgacaaggaaccaatcacaactacagaggtttctctgatcctcctccactcccgctgcttcaacttgactaagcttaaaaaaactgcttttgccatggctcatcggagtttatacttatttcttagaaaatgtttcctgttatttgctggacaagtcccaaagaacaggcagatgttcttattaaaagatcagcctataagattggtcaggaccaggcgcctctggccacgtgcctctcccctccagcacctgcggtctgcggtggcacctggcagctggaccacagccaggagaagggtactattagccctgcttcaaacatgcagaaactgaggcccggggagattaaataacctgcctgaaatgacagtgagtagctgcgcctggatttgagttctgctctggccaa

SEQ ID NO: 2206 - DNA, 3097 bp, Homo sapiens
gcacctccgggggcacggcgcgtaacaggaggcttccggggctgagagcgttacaggctgcgctccggggccagataggccgggcgctcagaaggggagtatgagcctgatgtgggcagaatccagatgagctggccagtgctgtgaaggagctgagagcacccccgagagccgtgagatggcaccaaaaaccaagaaaggatgtaaaggctccattgatgattttcttggtgaccttctaggggatgatatgacactacctgagaagcctgttaaactagcttcacataccagagacaccacaggtgtatctcagatgttcccttcttcaaaggcgagaacaaagtccctcctgggtgatgatgtcttcagcaccatggcaggcctggaagaagctgatgctgaggtttcaggtatctcagaggcagacccacaggctctgctccaggccatgaaggacctggacggcatggatgctgatatcttaggtctgaagaaatctaattcagcccctagcaaaaaagctgcaaaggaccctgggaaaggagagctgcccaaccaccccaagcctgcagggggtgccattcccaccaagaagtcacttccgtctcccagcagctctgggcatcagaacaggaggttttcctctgaagacttggaagacccattgagaggacttctctcctatgatgaaggaggaatcaccaagcagccgcctgtgacacagagtaaaacagcttctgacaagagccccagcacagtgagagatcaaggtccctctattcctctaactcctggggacacccccatccgaaaaaaagaagaattgttgtttgatgatggggatgacatcatggccaccttggggtttggagacagccccaaagcagagaagaggcagataggagaccaggaagggcctcgccctgctcgctccacgctggatgagctgctgggtcgaggcatggccaccaaactcctggcccgcccgggcaccggggagcacagggagttcaagctagacaagaagtaccagaggccacaggacagtgaagatatgtggggtgacgaggacttcacctttggagcctatcagcccactgtggtctcctctgagggccggcagtcccgccggcagtctgtcagtaggttcttcgcagacagtggcgcagaccccaagggagaaccaggctccaaacagagccctccaatggcttccagccccatccagcccaggaagggaggagctgactggttgggcctcaaggacgaggacttggacctgttccctgcctcacccaccagagaggcccatcgggaaagttcagtgcctgtcacgccctcagtgcctcctcctgcgagccagcactccacgccagctgggctgcccccctccagggcaaagccaccaactgaaggtgcagggtcccctgccaaagccagccaggcttccaagctgcgagcctccaaggaggagaaagaggactggctgagccatgccctgtctcggaagaagtcccaaggcctggccagagagcagcatgctgggacctctgagggcctgcatttggcggggacagcgggccatcccccttctggcagccaacctctcaccagcacacaagggcttgagcacgcagctgctggagggagttctggaacaactgcacgagaaagaccgtgtgtcaggcctggtgtctcggggtcccctgtgactcagaaccatgccgcctcagcactccctacaggttccccaaagaggggaacagcccctggagacctctcagccactgagcctgccacgtgtttcccgagcacccagaaacccacagagccttccgtgcccgtccagcccctgctcccagagtccctggcccggagcctgctgccgagcacagaataccagaagcagctcctggcagcacaggtgcaacttcagtgcagccccgctgagctccaggccgagctgctgcatagccaggcccggctggcagagctggaggcccaggtgcggaagctggagctagaacgggcccagcatgagctgctgctggggagtctgcagcagcagcaccaggcagacctggagctcatcgagagtgcacacagaagccgcatcaaggtgctagaaacatcgtaccagcaacgggaggagcggctccggagagagaacgaagagctgtcagctcggtatctgtcgcagtgccaggaggccgaacaggcccgtgctgagcttacggcccagcaccagcggcgcttggcggccatagcgcaggagaaggaccaggaaatggagcggctccgggagctgcagcgggcgtccatcctagacatgcgcagagaccacgaggagcagctgcagcggctaaagctgctgaaggaccgagaggtcgatgcggccaccagtgccacctcccacacgcggtccctgaatagcatcatccaccagatggagaagttctccagcagcctgcacgagttgtcctcccgcgtggaggcctcgcacctcaccacctcccaggagcgggagctggggatccggcagcgtgacgagcagctgcgggcactgcaggagcggctgggccagcagcagcgggacatggaggaggagcggagccgggacgaggagggaagcctctgtgctgctcacctgcccaaagcccagctcagcgggtacgcagtggaggcgacaaggaaccaatcacaactacagaggtttctctgatcctcctccactcccgctgcttcaacttgactaagcttaaaaaaactgcttttgccatggctcatcggagtttatacttatttcttagaaaatgtttcctgttatttgctggacaagtcccaaagaacaggcagatgttcttattaaaagatcagcctataagattggtcaggaccaggcgcctctggccacgtgcctctcccctccagcacctgcggtctgcggtggcacctggcagctggaccacagccaggagaagggtactattagccctgcttcaaacatgcagaaactgaggcccggggagattaaataacctgcctgaaatgacagtgagtagctgcgcctggatttgagttctgctctggccaa

SEQ ID NO: 2207 - DNA, 3133 bp, Homo sapiens; identical to SEQ ID NO: 2202

SEQ ID NO: 2208 - DNA, 1228 bp, Homo sapiens; identical to SEQ ID NO: 2203

SEQ ID NO: 2209 - DNA, 4785 bp, Homo sapiens; identical to SEQ ID NO: 2204

SEQ ID NO: 2210 - DNA, 3145 bp, Homo sapiens; identical to SEQ ID NO: 2205

SEQ ID NO: 2211 - DNA, 3097 bp, Homo sapiens; identical to SEQ ID NO: 2206

SEQ ID NO: 2212 - DNA, 946 bp, Homo sapiens
cggcgcgtgtcacgtggtgtgcgtgtcgaaggtcacggcgcgctcacaatggagctctcggagtctgtgcagaaaggcttccagatgctggcggatccccgctccttcgactccaacgccttcacgcttctcctccgggcggcattccagagtctgctggacgcccaggcggacgaggccgtgttagatcatccagacttgaaacatatcgacccagtggttttaaaacattgtcatgcagcagctgcaacttacatactagaggcaggaaagcaccgagctgacaagtcaactctaagcacttatctagaagactgtaaatttgacagagagcgaatagaactgttttgcacggaatatcagaataataagaattccctagaaatcctactgggaagtataggcagatctctccctcatataacggatgtttcttggcgcttggaatatcagataaagaccaatcaacttcataggatgtacagacctgcatatttggtgaccttaagtgtacagaacactgattccccatcctatccagagattagttttagttgcagcatggaacaattacaggacttggtggggaaacttaaagatgcttcgaaaagcctggaaagagcaactcagttgtaacttggggaagttaacgatccgcccgagtgcagaggaaaaccagaaacgccttgccttcagctgaaccaccgtttgtgcgagctggatgtccttttcagtagaaaagaattttccttttgaatttataccattcatcaattttgacactttaaaaacgtgtgaaagggttaagagggaaagatactgcccaagtatttgaatcgtttagtagtaactgtccatttatcctattttgatctttttcaagtcttctgaaaggaagtagacagtattacaccctgaataaataaggtgttgttttccacaaaga

SEQ ID NO: 2213 - DNA, 4243 bp, Homo sapiens
gcgtgatcggtttccggtcagtggtgtggtaccgggtacccggagacgtgtatcggacggtgggccgcagccatggccgagagaaaacctaacggtggcagcggcggcgcctccacttcctcatcgggcactaacttacttttctcctcctcggccacggagttcagcttcaatgtgcccttcatcccagtcacccaggcctccgcttctccggcctccctgctcttaccgggagaggattccacagatgttggtgaggaggacagcttccttggtcagacttctattcacacatctgccccacagacatttagttacttctctcaggtatcaagcagcagtgatccttttgggaatattggacagtcaccattaacaactgcagcaacctcagttggacaatcaggattccccaagcccctgactgctctcccttttacaactggatcccaagatgtctcgaatgcattttcaccatccatttcgaaggctcaacctggtgctccaccttcctcactgatgggaataaattcttatctgccttctcagccaagtagtctccctccttcatattttgggaaccaaccccaaggaattccccaaccaggatacaatccatatcgccatacccctggcagcagcagggctaatccttacattgcaccaccccagctgcagcagtgccaaacaccaggccctcctgctcatcctccaccttctggaccccctgttcagatgtaccagatgcctccaggatctttgccaccggttccttcttcagtgcagtcaccggcacagcagcaggtacctgccagacctggggctccctctgttcaagtgccatctccttttctacttcaaaaccaatatgagcctgttcagccccactggttttactgcaaggaggtagaatacaaacaactgtggatgccttttagtgtgttcgactctttgaatcttgaagaaatctataattcagttcagccagatccggagagcgtggttcttggcacggatggagggcgctacgatgtttacctctatgaccgaataaggaaggctgcctactgggaagaggagccagccgaagtgagacgctgtacttggttttacaagggggacacagatagtcgatttattccctatactgaggagttcagtgaaaaactagaggctgaatataaaaaagctgtaaccactaatcagtggcaccgaagattagagtttccaagtggagagacaattgttatgcacaatccaaaggttattgttcagttccagccctcctcagtgccagatgaatggggcaccacgcaagatggacagacaaggcccagggttgtaaagcgtggaattgatgataaccttgatgaaattcccgacggggagatgcctcaagttgaccatttggtgtttgtggtgcatggcattggacctgtgtgtgacttacgctttaggagcattattgagtgtgtggatgattttagggtggtttctctcaaattgctgcggacacatttcaagaaatctttagatgacgggaaagtaagcagagtggagttccttccagttcattggcatagttctttgggtggggacgccacaggtgtggacaggaatattaagaaaatcactttgccaagtattggtcgatttcgtcactttaccaatgaaactttgctagatattttattttataacagccccacctactgtcagacaattgtggaaaaagtaggaatggagataaaccatctgcatgcactctttatgagtcggaacccagacttcaaaggaggtgtctctgttgctggtcacagtttaggttctttaatattgtttgacatcctgtctaatcaaaaagatttgaatttatcaaagtgccctggacctcttgctgttgctaatggagttgtgaagcagctacattttcaggaaaagcagatgcctgaagagccaaagctgactttggatgagtcgtatgaccttgttgttgaaaataaagaagtcctaactttgcaagaaactctggaagcacttagcctctctgaatattttagcacttttgaaaaggaaaagattgatatggagtccctgcttatgtgtacagttgatgacctgaaggaaatggggataccccttggacccagaaagaagatagctaactttgtagaacataaagcagccaaactgaaaaaagcagcgtcagaaaagaaggcagtggcggccacttctacaaaaggacaagagcaaagtgcccagaagactaaagacatggcttccctcccctcagaatccaatgagccaaagaggaaacttccagttggtgcttgcgtgtcttctgtgtgtgtgaattatgaatcttttgaagttggcgccggacaggtttctgttgcttacaactcattagattttgaaccagagatattctttgccttggggtctccaattgctatgtttctcactattcgaggagttgataggatagatgagaattacagccttcctacctgtaaagggttcttcaatatttatcatccgcttgatccagtggcatatagattagaacctatgattgttccagatttggacctaaaagctgttctcattccacatcacaaaggcagaaaaagacttcatttagaattgaaagagagtctctctcgtatgggatctgatttgaagcagggttttattagctctctcaaaagtgcttggcagacattaaatgagtttgcccgtgctcatacgtcttcaacccagttgcaagaagaattggagaaggtggccaatcagatcaaagaagaagaagaaaagcaagtagttgaagcagaaaaggttgttgaaagtccagatttttccaaggatgaggactacttaggaaaggttggaatgttaaatggaggccgccgaattgactacgttctccaagaaaaaccaatagagagttttaatgaataccttttcgctcttcagagtcacttatgctattgggaatctgaagatactgctctgttactacttaaagaaatttatcgaacaatgaacattagtccagaacagccccagcattgatcaaacttcagttttactgtactttcttgtctgcacagaaagtcccagtacaacttccattgctgagaaaatcctcagaggactttcccacttcgctcctgtgatggatgacagaagagtgattcattaacaattgctcagccacaattctcggatatagggattcaaaagacaggacacagaactaacacagtgaaaaaaatcagtaccacatttggacagtataggtgagaaaacataattataaaaatgatgccatgaaaaattccacagatcagtttagttgtatagttgtcaaagttatatgtgatatcaatgaagaaatatttgtagcatgtaaacggttatttctgtttcttaaaaagtattgttagtgggctattaaacttggatttttctttttattaatgcagtatgttctttttattcaagtatgaacttgttgagaaactatagtaatatgatttttaagagatttatgttctacttaaaatgtgaattgtacttctgagctgccttaatgcaaggtcatttatatttgttaagaggaaataatcaagatcactcatatcccaactgaatctgaggttttataaatccctcaaacgattgctgagagcctgattgtggaaagaagtgagatgcaccttattttcaagaagtcctgggaagcgctctcctagcacgtccatttccaggaggagaagcaagcagatgagaggttttccattttgtcatccaaggtagctgtgcacttgccttgttgctgaagttccaataatgtgaaaaccaaagtagaggtttttttcttcttctttttgttttctattaatttcacttataccaaagtgtttgaaagtatgaaatgtgttgcttctgagttatataaggctacttcatgacaagactgctttgtaatatttcactttgttttactacaaattcagatcactttgttttactataaattcagattatccaaatattttcctaatactatgtgggaatgctgattttcttttgttacgtagtggaaacattttgcattgtttacatagttctcatggaacatggaaatttttgaaagtgatatatgatacacattttttgtgtatgtattctaattagtgtgaataaagcagtaacattaatgcattttttaagcagc

SEQ ID NO: 2214 - DNA, 3606 bp, Homo sapiens
gaattgaatcaccttggcaacccgcggggcgtgcagcaacgccctttcctccggaagtgggtgtcagaacctccacgtgctgtccctccccctccccttttcggcccagtagcggcggctcagttgctgccatggagtcagccgggctagagcagctcctacgggagctgctgctaccggacaccgagcgcatccgtcgggccacggaacagctccagatcgttcttcgggcccccgccgctttgccggctctctgcgacctgctagcctcggcggccgacccccagatccgccagtttgcggccgtgctgacccgcagacgactgaacacccgctggcgacggctggcggcggagcaacgggagagcctcaagtccctgatcctgacggccctgcagagagaaacagagcactgtgtgagcctcagcctggcccagctctcagccaccatttttcgaaaggaaggcttggaggcctggccacagcttttgcagctgcttcagcacagtacccacagcccccacagcccagagagagagatggggcttttgctgctaagtgtggtggtgacctcccggcccgaggccttccaaccccaccaccgggagcttcttcggcttctgaatgagactcttggtgaggtgggctctcctgggctgctcttctactccctgcgcactctgaccaccatggctccctacctcagcactgaagatgtgcctctcgctcggatgttggtgcccaagctgatcatggccatgcagactctgatccccatagatgaggcaaaggcctgtgaggcccttgaggctttggatgaactgttggagtcagaggtgccggtcatcaccccctacctctctgaagtcctcacattctgcctggaggtagctagaaatgtggccctgggcaatgcgatacgcatacgtattctctgctgcctcactttcttggtcaaagtcaagagcaaggccttactgaagaatcgtctcctgccacccttgctgcacacccttttccccattgtggctgctgagcccccaccaggccagttggatcccgaggaccaggattcagaagaggaagagttggagattgagctgatgggggagactcccaagcatttcgctgtacaagttgtggacatgctggcactacacctgccccccgagaagctctgtccccagctgatgcccatgttggaagaggctttgcggagcgagagcccataccagcgcaaagctggactcctggtgctggccgtgctgtctgacggagctggcgaccacatcaggcagagactgctgcccccactgctgcagattgtgtgcaagggcctggaggacccctcgcaagttgtacgcaatgctgcgctgtttgccctgggccagttctcagaaaacctacagccccatatcagcagctattcaagggaggtaatgccactgctcctcgcctacttgaagtcggtgcctcttggacacacacaccacctagccaaggcctgctatgccctggagaattttgtggagaacctagggcccaaggtgcagccctaccttccggagcttatggaatgcatgctgcagcttctgaggaaccccagcagtccccgggccaaggagctggctgtgagcgccctgggagccattgctacggctgcccaggcctcgctgctgccctacttccctgccatcatggagcacctgcgggaattcctgttaacaggccgtgaggaccttcagcctgtgcagatccagagcctggagacactgggggtgctggcacgagcagtgggggagcccatgaggccgctggctgaggaatgctgccagctgggtctgggcctctgcgaccaggtagacgaccctgacttgcggcgctgcacgtacagcctatttgcagccttatcgggtctgatgggtgagggcctggcgccccacttggaacagatcaccacgctcatgctgctgtcactgcgttccaccgagggcattgtgcctcagtatgacgggagcagctccttccttctgtttgacgatgagagtgatggggaagaagaggaggagctcatggatgaggatgtggaagaagaggatgactcagagatctcagggtacagcgtggagaatgccttcttcgatgagaaggaagacacctgtgctgccgtgggggagatctctgtgaacaccagtgtggccttccttccatacatggaaagtgtctttgaagaagtatttaaactgctggagtgccctcacctgaatgtgcggaaggcagcccatgaggctctgggtcagttttgctgtgcactgcacaaggcctgtcaaagctgcccctcggaacccaacactgctgctttgcaggctgccctggcccgagtcgtgccatcctacatgcaggcagtgaacagggagcgggaacgccaggtggtgatggccgtgctggaggccctgacaggggtgctccgcagctgtgggaccctcacactgaagccccctgggcgcctcgctgagctctgtggcgtgctcaaggctgtgctgcagaggaagacagcctgtcaggatactgacgaggaggaggaagaggaagatgatgatcaggctgaatacgacgccatgttgctggagcacgctggagaggccatccctgccctggcagccgcggctgggggagactcctttgccccattctttgccggtttcctgccattattggtgtgcaagacaaaacagggctgcacagtggcagagaagtcctttgcagtggggaccttggcagagactattcagggcctgggtgctgcctcagcccagtttgtgtctcggctgctccctgtgctgttgagcaccgcccaagaggcagaccccgaggtgcgaagcaatgccatcttcgggatgggcgtgctggcagagcatgggggccaccctgcccaggaacacttccccaagctgctggggctcctttttcccctcctggcgcgggagcgacatgatcgtgtccgtgacaacatctgtggggcacttgcccgcctgttgatggccagtcccaccaggaaaccagagccccaggtgctggctgccctactgcatgccctgccactgaaggaggacttggaggagtgggtcaccattgggcgcctcttcagcttcctgtaccagagcagccctgaccaggttatagatgtggctcccgagcttctgcgtatctgcagcctcattctggctgacaacaagatcccaccagacaccaaggccgcactgttgctgctcctgacgttcctggccaaacagcacaccgacagctttcaagcagctctgggctcactgcctgttgacaaggctcaggagctccaggctgtactgggcctctcctagactgcaggctgcagccagtccagagagaatagagcctgcccaggccttaagaccacctctcagcccagttcagttctgccttaccaaagattctgagactcatacccatttggagccagccccacttgctgccttacagggctgtccctgaggctggatctgttacaaatgagtcatgacatcatactgtaataaaagcagcttgttttctgcttgaacaataaaaaaa

SEQ ID NO: 2215 - DNA, 3635 bp, Homo sapiens
ggcacggagggtcactgggcggcatggcggtgtgtgctcgcctttgcggcgtgggcccgtcgcgcggatgtcggcgccgccagcagcgccggggcccggccgagacggcggcggccgacagcgagccggacacagaccccgaggaggagcgcatcgaggctagcgccggggtcgggggcggcttgtgcgcgggcccctcgccgccgcccccgcgctgctcgctgctggagctgccgcccgagctgctggtggagatcttcgcgtcgctgccgggcacggacctacccagcttggcccaggtctgcacgaagttccggcgcatcctccacaccgacaccatctggaggaggcgttgccgtgaggagtatggtgtttgcgaaaacttgcggaagctggagatcacaggcgtgtcttgtcgggacgtctatgcgaagctgcttcaccgatatagacacattttgggattgtggcagccagatatcgggccatacggaggactgctgaacgtggtggtggacggcctgttcatcatcgggtggatgtacctgcctccccatgacccccacgtcgatgaccctatgagattcaagcctctgttcaggatccacctgatggagaggaaggctgccacagtggagtgcatgtacggccacaaagggccccaccacggccacatccagattgtgaagaaggatgagttctccaccaagtgcaaccagacggaccaccacaggatgtccggcgggaggcaggaggagtttcggacgtggctgagggaggaatgggggcgcacgctggaggacatcttccacgagcacatgcaggagctcatcctgatgaagttcatctacaccagtcagtacgacaactgcctgacctaccgccgcatctacctgccgcccagccgccccgacgacctcatcaagcctggcctcttcaaaggtacctatggcagccacggcctggagattgtgatgctcagcttccacggccggcgtgccaggggcaccaagatcacgggcgaccccaacatccccgctgggcagcagacagtggagatcgacctgaggcatcggatccagctgcccgacctcgagaaccagcgcaacttcaatgagctctcccgcatcgtcctggaggtgcgcgagagggtgcgccaggagcagcaggaaggcgggcacgaggcgggcgagggtcgtggccggcagggcccccgggagtcccagccaagccctgcccagcccagggcagaggcgcccagcaagggcccagatgggacacctggtgaggatggtggcgagcctggggatgccgtagctgcggccgagcagcctgcccagtgtgggcaggggcagccgttcgtgctgcccgtgggcgtgagctccaggaatgaggactacccccgaacctgcaggatgtgtttttatggcacaggcctcatcgcgggccacggcttcaccagccctgaacgcacccccggggtcttcatcctcttcgatgaggaccgcttcgggttcgtctggctggagctgaaatccttcagcctgtacagccgggtccaggccaccttccggaacgcagatgcgccgtccccacaggccttcgatgagatgctcaagaacattcagtccctcacctcctgaccggccacatccttgccgccacatcccgggtggctctggggctctgaactctgacctgtgaatagaagcagcatgcactttggaaatccggccttttgaccagaacgcacacctcgtcggggggcccagtccagccaccccccagcactttatgtagagagtgtgacatagacctgcatatttgtcagtgccatgatggaagaagctgagcatgtcttaccaaaaacagagagaacgagcctggatacagcagatgtaggggacagccgtgggaccgcgtgagaattgaagcggtggggttcccgcaccctgggctggctggtggttttctcgggaagcaggaccctcctgactggtgctcttcctgtgagcggatagagtgatagactgggtcgtgtgtgagacgcatgtgctccaccccactccttttgggggaagccaggcaacagtggcctctgggagggggtcaggaagaggcgaacagctcaggcagcgcaggtgtgatgggcacagtacgcagagcaagctcgggaagttggtaggatctcaggcttggggccgggactctggagtgaatccccatttctctaccggcttgcttggagtttggacagaagcatttcacctctgatctcagcttccccacctgtggagtgggtttagtgacctgagtcactagggaatgtcacctgaatgcacagcccagcccatgcacctgccccagcccctccagctttggagccaaggccatcgttccagccacttgactgtcctcgacggcctgttccagacagggcgtttgttttgtccatgccttcctccctgcacgcacacggcgtcaaaaccaagctgccggccactgtctccagaacgcaaggctccaggcccgtgtgtctgaagcagtgagtggtccacacaggtgccaggagtgcccatatgagatgacgaggaaacccctttgcaggtgaggggacagctttctagaaaagccacacctgcatctggggacacactttggaaagtgggaccctccagcctggagaccccatggactgatgcctccactgctgtgtgccccatgttgtgttaacacctgcgtgtggggaccccatctgaggtcttggctgaggttggcatctcctgaagaacagagagcacggtgtccagagctggcccttcccccagcccacagccagctccgtgcccgagtgggcgtccccagcgagccttccctctctgccgcttgtccttgtgtctgggctgctccaagtccttgtgctgggcaccctggacacgtcctgctggtgagggacctcgggaaggtgacagtctgtgtgccttggtgtggagaccaacctgaggatgtcctgggaaatgttttcctgatgaatttctccttgactggcctttaaagaacataagaattcccattgcccagcctcagtgcatttggcaaatgcttactttgcttcccagagtcagagaattggcaaaggttcctaaatggtaatctggccggcctgggagaaagactcacgagaaaagccagtggagaaagcgcccttccagggcggcagcagcgggagccacgcagaccccgaggcgcacctgctggctcttgtgtgtggccccagtttctagcggcttttgcagcattagcctacaagctttgtcactccctgccctctgtggtggtcactgtttttctctcttgccaaatgaggcagtctctgagtgacggtgactgtggccttgaagcctggaggactgttgggcatgtagactggcaccttgaagattcaccattgtttaaataaaatcaagcaaatgcttttttaccaagagcccgagcctcgctctaagggacgcagtcctagaggcgtgccctttggggcttgaagagcacactgtgggacgcacgtgcttctgattaaaggaatctcagatctcaaaaaaaaaaaaaaaaaaaaaaaaaaaaaaaaaaaaaaaaaa

SEQ ID NO: 2216 - DNA, 1111 bp, Homo sapiens
tccccatgtgacagtgagcggggtccccgctccaggagacgctcgagtctgcgtcccggccctcagcactgtccactgtttcggtgccagcagagaccagcaggcccgggacagttggtgtttggccgtgccgctgtctaacttggtgtgcagagtgaattgccgctgccggagcggagagaggcggagcggccaggagagaggggatttctgtcagcgccggcctcgggagctcggagacatgaacggcttcacgcctgacgagatgagccgcggcggggatgcggccgccgcagtggccgcagtggtcgctgccgcggccgccgccgcctcggcggggaacgggaccggcgcgggcaccggggctgaggtgccgggcgcgggggcggtctcagcggctgggcccccgggggcggccgggccgggccccgggcaactgtgctgcctgcgggaggatggtgagcggtgcggccgggcggcaggcaacgccagcttcagcaagaggatccagaagagcatctcccagaagaaggtgaagatcgagctggataagagcgcaaggcatctttacatatgtgattatcataaaaacttaattcagagtgttcgaaacagaagaaagagaaaagggagtgatgatgatggaggtgattcacctgttcaagatattgataccccagaggttgatttataccaattacaagtaaatacacttaggagatacaaaagacacttcaagctaccaaccagaccaggacttaataaagcacaacttgttgagatagttggttgccactttaggtctattccagtgaatgaaaaagacaccttaacatatttcatctactcagtgaagaatgacaagaacaaatcagatctcaaggttgatagtggtgttcactaggagacgtggaattgagactaataacttggatgttaacactgtttactgttttttcacatgtagaaatgttctttgtgtattttttctacagaggattttctctgattttattttctttgtttctgactctaataattagttggaaactcatataaaatgagctttcctaaattaaatctattttaaataaaggttattactattata

SEQ ID NO: 2217 - DNA, 1546 bp, Homo sapiens
attggtgaagctctaacggctgttttgactggcgtagccggagccggcgacgtgaggcgggcgttgctcgcgcgacaagtagttgctgggacagcgaaatggaggggtgtgtgtctaacctaatggtctgcaacctggcctacagcgggaagctggaagagttgaaggagagtattctggccgataaatccctggctactagaactgaccaggacagcagaactgcattgcactgggcatgctcagctggacatacagaaattgttgaatttttgttgcaacttggagtgccagtgaatgataaagacgatgcaggttggtctcctcttcatattgcggcttctgctggccgggatgagattgtaaaagcccttctgggaaaaggtgctcaagtgaatgctgtcaatcaaaatggctgtactcccttacattatgcagcttcgaaaaacaggcatgagatcgctgtcatgttactggaaggcggggctaatccagatgctaaggaccattatgaggctacagcaatgcaccgggcagcagccaagggtaacttgaagatgattcatatccttctgtactacaaagcatccacaaacatccaagacactgagggtaacactcctctacacttagcctgtgatgaggagagagtggaagaagcaaaactgctggtgtcccaaggagcaagtatttacattgagaataaagaagaaaagacacccctgcaagtggccaaaggtggcctgggtttaatactcaagagaatggtggaaggttaaacagcttggatttattcttactttgtatgttgtgttgttgtccccagtgtcctacaaactaatgtatttgtgcacaagacatcatctatgaatgatgaagttttctcaccttcaaagtcttataaacatgttgactcttgttcctgctgagttacttgttcgaagcttacagcttgttttccaggcatcgaataactgttgagattgttctactgttgtcgtatattcttctatattgaattctggttaatttggagtaactaattctgtggctgttgtgagtcttcagcaccctcccatgtaccttatatccctctctgaaacagaacagctccaatagcaacaagctagttgttctgccagatgtttctatgtggattctgtaatgttcctccatacagttaaaacatcctaacttgtttttcaagctcactcaggcctacgccaaacgtttctgttttttttaaccatgaggtttaatttatttttgtgataggagggatatttacatattttagtggaccacattttaagttggatggtgtgctctaaaatactgaaaaacaatagcccatatacctatgtatttgtttttgatgggttgtttactctgaaataaaatgtatggttttcttaaaaggaagttttaaagtacctattttgtgtcatcctgtattgaaaagaatgtcaagcttgttaaaatgacatgtaacaaaaatgtattttgatttgtatttcagaaactaaaaaataaaatgttgaaagaa

SEQ ID NO: 2218 - DNA, 1467 bp, Homo sapiens
attggtgaagctctaacggctgttttgactggcgtagccggagccggcgacgtgaggcgggcgttgctcgcgcgacaagtagttgctgggacagcgaaatggaggggtgtgtgtctaacctaatggtctgcaacctggcctacagcgggaagctggaagagttgaaggagagtattctggccgataaatccctggctactagaactgaccaggacagcagaactgcattgcactgggcatgctcagctggacatacagaaattgttgaatttttgttgcaacttggagtgccagtgaatgataaagacgatgcaggttggtctcctcttcatattgcggcttctgctggccgggatgagattgtaaaagcccttctgggaaaaggtgctcaagtgaatgctgtcaatcaaaatggctgtactcccttacattatgcagcttcgaaaaacaggcatgagatcgctgtcatgttactggaaggcggggctaatccagatgctaaggaccattatgaggctacagcaatgcaccgggcagcagccaaggacacttagcctgtgatgaggagagagtggaagaagcaaaactgctggtgtcccaaggagcaagtatttacattgagaataaagaagaaaagacacccctgcaagtggccaaaggtggcctgggtttaatactcaagagaatggtggaaggttaaacagcttggatttattcttactttgtatgttgtgttgttgtccccagtgtcctacaaactaatgtatttgtgcacaagacatcatctatgaatgatgaagttttctcaccttcaaagtcttataaacatgttgactcttgttcctgctgagttacttgttcgaagcttacagcttgttttccaggcatcgaataactgttgagattgttctactgttgtcgtatattcttctatattgaattctggttaatttggagtaactaattctgtggctgttgtgagtcttcagcaccctcccatgtaccttatatccctctctgaaacagaacagctccaatagcaacaagctagttgttctgccagatgtttctatgtggattctgtaatgttcctccatacagttaaaacatcctaacttgtttttcaagctcactcaggcctacgccaaacgtttctgttttttttaaccatgaggtttaatttatttttgtgataggagggatatttacatattttagtggaccacattttaagttggatggtgtgctctaaaatactgaaaaacaatagcccatatacctatgtatttgtttttgatgggttgtttactctgaaataaaatgtatggttttcttaaaaggaagttttaaagtacctattttgtgtcatcctgtattgaaaagaatgtcaagcttgttaaaatgacatgtaacaaaaatgtattttgatttgtatttcagaaactaaaaaataaaatgttgaaagaa

SEQ ID NO: 2219 - DNA, 2114 bp, Homo sapiens
ccgcgcagtcgtcacccgcccgggatcaggaggccgggggcgcccgccggtcgggcctgggcggccgcatgaagctgacgcggaagatggttctgacccgagccaaggcctcggagctgcacagcgtgcgcaagctcaactgctggggcagccgcctcacagatatctccatttgccaggagatgcccagcctggaggtgatcacgctcagtgtcaacagcatctccaccctggagcctgtgagccggtgccagcgcctgagtgagctgtacctgcggaggaaccgcatccccagcctggctgagctcttctacctgaaggggctgccgcgtctgcgggtgctgtggctggccgagaacccgtgctgcggcaccagcccccaccgctaccgcatgaccgtgctgcgcaccctgccgcgcctacagaagctggacaaccaggctgtgacggaggaggagctgtcccgtgcactgagtgagggagaggagatcactgcggccccagagagagagggcacaggccacggcggccccaagctatgctgcacactgagctccctcagctccgctgctgagactggccgggacccgctggacagcgaggaggaggcaaccagcggcgcccaggatgaacgtggcctgaagccgccttcccggggccagtttccttccctctcagccagggatgcctcgagcagccacaggggcaggaacgtcctgactgccatcctgctgctgctgcgggagctggatgcagaggggctggaggccgtgcagcagactgtgggcagccggctgcaggccctgcgtggggaagaggtgcaggagcacgccgagtgaccgcaggacctgaacgccgctccagcctccacggggaccccagcgtcttccccagcccccgggagctggagggtggctgccatggccgcagccccggccccacacaaaagcctccccggtttgccacatcggccgagggcaggagtgggtgttaggtactggctaaccggggcggtggagatgcctgtctacaccagtcctgtccccaggactccccttctgtggtctggaggttctaggctggcctgggctcttaaagggaggattttgcaggctgtcctccctaataaaagattttcccaaggttgatctggaggtgacgtttcccaaggcatggttgtgacagtcttcctgaaagcaagggccgtttctccacagaatgaggaggtcttcacggatggctttgccgattccagcccttggtccttggatagatttctgttgggcaagggagacttcgagaatgctggcacccatagcgacatctgccctgagctgctcagcaggcaggcagcagcctcccgcacccatgggagagagttttgttttcttggccgggctgggcaggtgcgccttcctttctctctcctgtgaagaactgcaggagggccctcagctgtgaggttgtggatgaacaggcctgttcgccctggggtccgggcctggcacaggaagcagctagactaggggagtccttggagcatctgagaggggttttctttcctctgggaagagtcgcaagtcttatgaggatgccacaatctgggcagtgacccgtggccctggggaccttcctagtgccccccaaaaccaaggaagcattcacgtgagatggggagtcagccttccagctggtgtgtaggaaagccaggtccctgggcccttgtcccatgtggggttgagatccagatctccatgagatattcccatcctccgccgagcggtgatgcgtgaccgtgtgtgcaggccgctgttctcccaagctcggggccatgccgtgccaccgtcaccagagccagctgcagcactggggcagccactgtcgccggacttggggaagcccagggtgaagacagtcactcatccgtgcaagctctccagaagggatgcaagctctccagaaggggtgtgatctctgagcagtggggagtggagtcaccactcgggacatagagggtggacagttcaggcctgtgtctgcctccttgggactgtggagtgggtgccctcagtaaagcgctttgttggaatggtaaaaaaaaaaaaaaaaaaaaa

SEQ ID NO: 2220 - DNA, 3118 bp, Homo sapiens
  misc_feature 1625, 1627: n = A,T,C or G
gccctttcacagcaagacccggaagccgcgggcaaactcagactcgaagccctcccgcctcctgcccacaatggcctctgctgacaagaatggcgggagcgtgtcctctgtgtccagcagccgcctgcagagccggaagccacccaacctctccatcaccatcccgccacccgagaaagagacccaggcccctggcgagcaggacagcatgctgcctgagaggaagaacccagcctacttgaagagcgtcagcctccaggagccacgcagccgatggcaggagagttcagagaagcgccctggcttccgccgccaggcctcactgtcccagagcatccgcaagggcgcagcccagtggtttggagtcagcggcgactgggaggggcagcggcagcagtggcagcgccgcagcctgcaccactgcagcatgcgctacggccgcctgaaggcctcgtgccagcgtgacctggagctccccagccaggaggcaccgtccttccagggcactgagtccccaaagccctgcaagatgcccaagattgtggatccgctggcccggggccgggccttccgccacccggaggagatggacaggccccacgccctgcacccaccgctgacccccggagtcctgtccctcacctccttcaccagtgtccgttctggctactcccacctgccacgccgcaagagaatgtctgtggcccacatgagcttgcaagctgccgctgccctcctcaaggggcgctcggtgctggatgccaccggacagcggtgccgggtggtcaagcgcagctttgccttcccgagcttcctggaggaggatgtggtcgatggggcagacacgtttgactcctccttttttagtaaggaagaaatgagctccatgcctgatgatgtctttgagtcccccccactctctgccagctacttccgagggatcccacactcagcctcccctgtctcccccgatggggtgcaaatccctctgaaggagtatggccgagccccagtccccgggccccggcgcggcaagcgcatcgcctccaaggtgaagcactttgcctttgatcggaagaagcggcactacggcctcggcgtggtgggcaactggctgaaccgcagctaccgccgcagcatcagcagcactgtgcagcggcagctggagagcttcgacagccaccggccctacttcacctactggctgaccttcgtccatgtcatcatcacgctgctggtgatttgcacgtatggcatcgcacccgtgggctttgcccagcacgtcaccacccagctggtgctgcggaacaaaggtgtgtacgagagcgtgaagtacatccagcaggagaacttctgggttggccccagctcgattgacctgatccacctgggggccaagttctcaccctgcatccggaaggacgggcagatcgagcagctggtgctgcgcgagcgagacctggagcgggactcaggctgctgtgtccagaatgaccactccggatgcatccagacccagcggaaggactgctcggagactttggccacttttgtcaagtggcaggatgacactgggccccccatggacaagtctgatctgggccagaagcggacttcgggggctntntgccaccaggaccccaggacctgcgaggagccagcctccagcggtgcccacatctggcccgatgacatcactaagtggccgatctgcacagagcaggccaggagcaaccacacaggcttcctgcacatggactgcgagatcaagggccgcccctgctgcatcggcaccaagggcagctgtgagatcaccacccgggaatactgtgagttcatgcacggctatttccatgaggaagcaacactctgctcccaggtgcactgcttggacaaggtgtgtgggctgctgcccttcctcaaccctgaggtcccagatcagttctacaggctctggctgtctctcttcctacatgctggcgtggtgcactgcctcgtgtctgtggtctttcaaatgaccatcctgagggacctggagaagctggccggctggcaccgtatcgccatcatcttcatcctcagtggcatcacaggcaacctcgccagtgccatctttctcccataccgggcagaggtgggcccggccggctcacagttcggcctcctcgcctgcctcttcgtggagctcttccagagctggccgctgctggagaggccctggaaggccttcctcaacctctcggccatcgtgctcttcctgttcatctgtggcctcctgccctggatcgacaacatcgcccacatcttcggcttcctcagtggcctgctgctggccttcgccttcctgccctacatcaccttcggcaccagcgacaagtaccgcaagcgggcactcatcctggtgtcactgctggcctttgccggcctcttcgccgccctcgtgctgtggctgtacatctaccccattaactggccctggatcgagcacctcacctgcttccccttcaccagccgcttctgcgagaagtatgagctggaccaggtgctgcactgaccgctgggccacacggctgcccctcagccctgctggaacagggtctgcctgcgagggctgccctctgcagagcgctctctgtgtgccagagagccagagacccaagacagggcccgggctctggacctgggtgcccccctgccaggcgaggctgactccgcgtgagatggttggttaaggcggggtttttctggggcgtgaggcctgtgagatcctgacccaagctcaggcacacccaaggcacctgcctctctgagtcttgggtctcagttcctaatatcccgctccttgctgagaccatctcctggggcagggtccttttcttcccaggtcctcagcgctgcctctgctggtgccttctcccccactactactggagcgtgcccttgctggggacgtggctgtgccctcagttgcccccagggctgggtgcccaccatgccccttcctctttctcctcctacctctgccctgtgagcccatccataaggctctcagatgggacattgtgggaaaggctttggccatggtctgggggcagagaacaaggggggagacacaagt

SEQ ID NO: 2221 - DNA, 3596 bp, Homo sapiens
gccgctcgcaggcgccgcacggagttgcgtcccggggacttggggccgcagggagctgtgagtacccaggaagctgcaccgtgtggcctggagctgtctatctgtccttccagccacctgtctgtccagccacccttccacagactgaggcttgacaccggagcatctgtacagagcaaggagaagacaagaacatgctctaaagcccttcacagcaagacccaggaagccgcgggcaaactcagactcgaagccctcccgcctcctgcccacaatggcctctgctgacaagaatggcgggagcgtgtcctctgtgtccagcagccgcctgcagagccggaagccacccaacctctccatcaccatcccgccacccgagaaagagacccaggcccctggcgagcaggacagcatgctgcctgagggttttcagaataggaggctaaagaaaagccagcccaggacctgggcttcacacaccaccgcctgccctccctccttcctccccaagaggaagaacccagcctacttgaagagcgtcagcctccaggagccacgcagccgatggcaggagagttcagagaagcgccctggcttccgccgccaggcctcactgtcccagagcatccgcaagggcgcagcccagtggtttggagtcagcggcgactgggaggggcagcggcagcagtggcagcgccgcagcctgcaccactgcagcatgcgctacggccgcctgaaggcctcgtgccagcgtgacctggagctccccagccaggaggcaccgtccttccagggcactgagtccccaaagccctgcaagatgcccaagattgtggatccgctggcccggggccgggccttccgccacccggaggagatggacaggccccacgccctgcacccaccgctgacccccggagtcctgtccctcacctccttcaccagtgtccgttctggctactcccacctgccacgccgcaagagaatgtctgtggcccacatgagcttgcaagctgccgctgccctcctcaaggggcgctcggtgctggatgccaccggacagcggtgccgggtggtcaagcgcagctttgccttcccgagcttcctggaggaggatgtggtcgatggggcagacacgtttgactcctccttttttagtaaggaagaaatgagctccatgcctgatgatgtctttgagtcccccccactctctgccagctacttccgagggatcccacactcagcctcccctgtctcccccgatggggtgcaaatccctctgaaggagtatggccgagccccagtccccgggccccggcgcggcaagcgcatcgcctccaaggtgaagcactttgcctttgatcggaagaagcggcactacggcctcggcgtggtgggcaactggctgaaccgcagctaccgccgcagcatcagcagcactgtgcagcggcagctggagagcttcgacagccaccggccctacttcacctactggctgaccttcgtccatgtcatcatcacgctgctggtgatttgcacgtatggcatcgcacccgtgggctttgcccagcacgtcaccacccagctggtgctgcggaacaaaggtgtgtacgagagcgtgaagtacatccagcaggagaacttctgggttggccccagctcgattgacctgatccacctgggggccaagttctcaccctgcatccggaaggacgggcagatcgagcagctggtgctgcgcgagcgagacctggagcgggactcaggctgctgtgtccagaatgaccactccggatgcatccagacccagcggaaggactgctcggagactttggccacttttgtcaagtggcaggatgacactgggccccccatggacaagtctgatctgggccagaagcggacttcgggggctgtctgccaccaggaccccaggacctgcgaggagccagcctccagcggtgcccacatctggcccgatgacatcactaagtggccgatctgcacagagcaggccaggagcaaccacacaggcttcctgcacatggactgcgagatcaagggccgcccctgctgcatcggcaccaagggcagctgtgagatcaccacccgggaatactgtgagttcatgcacggctatttccatgaggaagcaacactctgctcccaggtgcactgcttggacaaggtgtgtgggctgctgcccttcctcaaccctgaggtcccagatcagttctacaggctctggctgtctctcttcctacatgctggcgtggtgcactgcctcgtgtctgtggtctttcaaatgaccatcctgagggacctggagaagctggccggctggcaccgtatcgccatcatcttcatcctcagtggcatcacaggcaacctcgccagtgccatctttctcccataccgggcagaggtgggcccggccggctcacagttcggcctcctcgcctgcctcttcgtggagctcttccagagctggccgctgctggagaggccctggaaggccttcctcaacctctcggccatcgtgctcttcctgttcatctgtggcctcctgccctggatcgacaacatcgcccacatcttcggcttcctcagtggcctgctgctggccttcgccttcctgccctacatcaccttcggcaccagcgacaagtaccgcaagcgggcactcatcctggtgtcactgctggcctttgccggcctcttcgccgccctcgtgctgtggctgtacatctaccccattaactggccctggatcgagcacctcacctgcttccccttcaccagccgcttctgcgagaagtatgagctggaccaggtgctgcactgaccgctgggccacacggctgcccctcagccctgctggaacagggtctgcctgcgagggctgccctctgcagagcgctctctgtgtgccagagagccagagacccaagacagggcccgggctctggacctgggtgcccccctgccaggcgaggctgactccgcgtgagatggttggttaaggcggggtttttctggggcgtgaggcctgtgagatcctgacccaagctcaggcacacccaaggcacctgcctctctgagtcttgggtctcagttcctaatatcccgctccttgctgagaccatctcctggggcagggtccttttcttcccaggtcctcagcgctgcctctgctggtgccttctcccccactactactggagcgtgcccttgctggggacgtggctgtgccctcagttgcccccagggctgggtgcccaccatgccccttcctctttctcctcctacctctgccctgtgagcccatccataaggctctcagatgggacattgtgggaaaggctttggccatggtctgggggcagagaacaaggggggagacacaagtagacctcaggtagaacgacactgggcggagccaccccagggcctgctcccagggagtgctcgaggcgcatcaggcccgttttttaccagtttatatcacggtcttcatttttaaaagtaacgctaactttgtagggacgatgtctcatggattaaataatattctttatggcaaaaaaaaaaaaaaa

SEQ ID NO: 2222 - DNA, 2430 bp, Homo sapiens
tttgtaacttcacttcagcctcccattgatcgctttctgcaaccattcagactgatctcgggctcctatttcatttacattgtgtgcacaccaagtaacaagtgggaaaactttagagggtacttaaaccccagaaaattctgaaaccgggctcttgagccgctatcctcgggcctgctcccaccctgtggagtgcactttcgttttcaataaatctctgcttttgttgcttcattctttccttgctttgtttgtgtgtttgtccagttctttgttcaacacgccaagaacctggacactcttcactggtaacatattttggcaagccaaccaggagaaaagaatttctgcttggacactgcatagctgctgggaaaatgaacatcagtgttgatttggaaacgaattatgccgagttggttctagatgtgggaagagtcactcttggagagaacagtaggaaaaaaatgaaggattgtaaactgagaaaaaagcagaatgaaagggtctcacgagctatgtgtgctctgctcaattctggagggggagtgatcaaggctgaaattgagaatgaagactatagttatacaaaagatggaataggactagatttggaaaattcttttagtaacattctgttatttgttcctgagtacttagacttcatgcagaatggtaactactttctgatttttgtgaagtcatggagcttgaacacctctggtctgcggattaccaccttgagctccaatttgtacaaaagagatataacatctgcaaaagtcatgaatgccactgctgcactggagttcctcaaagacatgaaaaagactagagggagattgtatttaagaccagaattgctggcaaagaggccccgtgttgatatacaagaagaaaataacatgaaggccttggccggggttttttttgatagaacagaacttgatcggaaagaaaaattgacctttactgaatccacacatgttgaaattaaaaacttctcgacagaaaagttgttacaacgaattaaagagattctccctcaatatgtttctgcatttgcaaatactgatggaggatatttgttcattggtttaaatgaagataaagaaataattggctttaaagcagagatgagtgacctcgatgacttagaaagagaaatcgaaaagtccattaggaagatgcctgtgcatcacttctgtatggagaagaagaagataaattattcatgcaaattccttggagtatatgataaaggaagtctttgtggatatgtctgtgcactcagagtggagcgcttctgctgtgcagtgtttgctaaagagcctgattcctggcatgtgaaagataaccgtgtgatgcagttgaccaggaaggaatggatccagttcatggtggaggctgaaccaaaattttccagttcatatgaagaggtgatctctcaaataaatacgtcattacctgctccccacagttggcctcttttggaatggcaacggcagagacatcactgtccagggctatcaggaaggataacgtatactccagaaaacctttgcagaaaactgttcttacaacatgaaggacttaagcaattaatatgtgaagaaatggactctgtcagaaagggctcactgatcttctctaggagctggtctgtggatctgggcttgcaagagaaccacaaagtcctctgtgatgctcttctgatttcccaggacagtcctccagtcctatacaccttccacatggtacaggatgaggagtttaaaggctattctacacaaactgccctaaccttaaagcagaagctggcaaaaattggtggttacactaaaaaagtgtgtgtcatgacaaagatcttctacttgagccctgaaggcatgacaagctgccagtatgatttaaggtcgcaagtaatttaccctgaatcctactattttacaagaaggaaatacttgctgaaagccctttttaaagccttaaagagactcaagtctctgagagaccagttttcctttgcagaaaatctataccagataatcggtatagattgctttcagaagaatgataaaaagatgtttaaatcttgtcgaaggctcacctgatggaaaatggactgggctactgagatatttttcattatatatttgataacattctctaattctgtgaaaatatttctttgaaaactttgcaagttaagcaacttaatgtgatgttggataattgggttttgtctattttcacttctccctaaataatcttcacagatattgtttgagggatattaggaaaattaatttgttaactcgtctgtgcacagtattatttactctgtctgtagttcctgaataaattttcttccatgcttgaaaaaaaaaaaaaaaaaaaaaaaaaaaaaaaaaaaaaaaaaaaaaaaaa

SEQ ID NO: 2223 - DNA, 3528 bp, Homo sapiens
agccaaggactctggagccgccgccgccgctgctgcggttcatatccggagtagacggagccgcagtagacggatccgcggctgcaccaaaccactgcccctcggagcctggtagtgggccacaagcccccagtcccagaggcgtggtgggtcgggcagagtcggaagaactggctttctagctggaagatgcggaaggggagcgactaggccgcttgcgtctgggcctggcagaagggaccggattttctggcatccttaaatcttgtgtcaaggattggttataatataaccagaaaccatgacggcggctgagaacgtatgctacacgttaattaacgtgccaatggattcagaaccaccatctgaaattagcttaaaaaatgatctagaaaaaggagatgtaaagtcaaagactgaagctttgaagaaagtaatcattatgattctgaatggtgaaaaacttcctggacttctgatgaccatcattcgttttgtgctacctcttcaggatcacactatcaagaaattacttctggtattttgggaaattgttcctaaaacaactccagatgggagacttttacatgagatgatccttgtatgtgatgcatacagaaaggatcttcaacatcctaatgaatttattcgaggatctactcttcgttttctttgcaaattgaaagaagcagaattgctagaacctttaatgccagctattcgtgcatgtttggagcatcgacacagctatgttagaagaaatgctgttttggccatctataccatctatagaaattttgaacatcttatacctgatgctcctgaactgatacatgattttctggtgaatgagaaggatgcaagttgcaaaaggaatgcatttatgatgctaattcatgcagatcaggatcgagctttggattacttaagtacttgcattgatcaagttcaaacatttggagacattctgcagctggttattgttgaactgatttataaggtctgtcatgctaatccatcagaaagagctcgttttattcgctgcatctataacttattacagtcatccagccctgctgtaaaatatgaagctgctgggacattagtgacactctctagtgcaccaactgcaatcaaggctgctgctcagtgttacattgatttaattattaaggagagcgacaacaatgtaaaactcatagttttggatcgcttgatagaattaaaagagcatcctgctcatgaacgagtactacaggatctggttatggatatcctaagagtattgagcacaccagacttagaagtacgaaagaaaactctgcagttagcactggatcttgtctcttctagaaatgttgaagagctggttattgtcctgaagaaggaagtgataaaaacaaataatgtgtctgagcatgaagatactgacaaatacagacaactcctagtgcgaacattgcattcctgttctgtccgatttccagatatggctgcaaatgttattcctgtgttaatggaatttctcagtgacaacaacgaagcagcagctgctgatgtcttggagtttgttcgtgaagccattcagcgctttgataacctgagaatgcttattgttgagaagatgcttgaagtctttcatgctattaaatctgtcaagatttaccgaggagcattatggatcctgggagaatactgtagtaccaaggaagacattcagagtgtgatgactgagatccgcaggtcccttggagagatcccaattgtagagtcagaaataaagaaagaagctggtgaattaaaacctgaagaagaaataactgtagggccagttcagaaattggttactgaaatgggtacctatgcaactcagagtgcccttagcagttctagacccaccaagaaagaggaagacagacctcccttgagaggattccttctggatggagatttctttgttgctgcctcccttgccacaactctgaccaagattgcattgcgctatgtagctttggttcaggagaagaaaaagcaaaattcttttgttgctgaggctatgttgctcatggctactatcctgcatttgggaaaatcctctcttcctaagaagccaattactgatgatgatgtggatcgaatttccctgtgcctcaaggtcttgtctgaatgttcacctttaatgaatgacattttcaataaggaatgcagacagtccctttctcacatgttatctgctaaactagaagaagagaaattatcccaaaagaaagaatctgaaaagaggaatgtgacagtacagcctgatgaccccatttccttcatgcaactaactgctaagaatgaaatgaactgcaaggaagatcagtttcagctgagtttactggcagcaatgggtaacacacagaggaaagaggcagcagatcccctagcatctaaacttaacaaggtcacccaattgacaggtttctcagatcctgtatatgcagaagcttacgttcatgtcaaccaatatgatattgtcctggatgtacttgttgtgaaccaaaccagtgatactttgcagaattgcacattagaactagctacactaggggatctgaaacttgtggaaaagccgtctcctttgactcttgctcctcatgacttcgcaaatattaaagctaacgtcaaagtagcatcaacagaaaatggaataatttttggtaatatagtttatgatgtctctggagcagcaagtgacagaaattgtgtggttctcagtgatattcacatcgacatcatggactatatccagcctgcaacttgcactgatgcagaattccgtcagatgtgggccgaatttgaatgggaaaacaaagtgacagttaacaccaacatggttgatttaaatgactacttacagcacatattaaagtcaaccaatatgaaatgcctgactccagaaaaggccctttctggttactgtggctttatggcagccaacctttatgctcgttccatatttggtgaagatgcacttgcaaatgtcagcattgagaagccaattcaccagggaccagatgctgctgttaccggccatataagaattcgtgcaaagagccagggaatggccttaagtcttggagataaaatcaacttgtcacagaagaaaactagtatataaaaataaacaaaaagtccttgaagctttacagttaatttaggtatgggcttactggactccaacatcttttgtactctttcatgcttatatagaatctgagttcatgctgaatacttttcagccaataatttatagcctttcccttaaatcaagattgagtttaaaattatagtttgtcttttgtcttaacagttctgaatgctgtcctcaaagtatataatgtttcatgtaccaagacccttttcacagtacaataaacagatctattcataaatttttgttattttataaataaatgattacataattttagttataaaaaaaaaaaaaaaaaaaaagaaaaaaaaaaaaaaaaaaaaaaaaaa

SEQ ID NO: 2224 - DNA, 993 bp, Homo sapiens
aggccggaaccatggcagtgaccaaggagctcttacagatggacctgtacgcgctgctaggcattgaggagaaggcagcggacaaagaggtaaagaaggcgtataggcagaaggccctctcctgccacccagacaaaaatccagataatcccagagcagctgaactcttccaccagctttctcaggccttggaggtgctgaccgatgctgcagccagggctgcatatgacaaggtcaggaaagccaagaagcaagcagcagagaggacccagaaacttgatgagaaaaggaagaaagtgaagcttgacctggaggcccgggagcggcaggcccaggcccaggagagtgaggaggaagaggagagccggagcaccaggacactagagcaagagatcgaacgcctgagagaagagggttcccggcagctggaggaacagcagaggctcatccgggagcagatacgccaggagcgtgaccagaggttgagaggaaaggcagaaaatactgaaggccaaggaacccccaaactaaagctaaaatggaagtgcaagaaggaggatgagtcaaaaggtggctactccaaagacgtcctcctacggcttttgcagaagtatggtgaggttctcaacctggtgctttccagtaagaagccaggcactgctgtggtggagtttgcaaccgtcaaggcagcggagctggctgtccagaatgaagttggcctggtggataaccctctgaagatttcctggttggagggacagccccaggatgccgtgggccgcagccactcaggactgtcaaagggctcagtgctgtcagagagggactacgagagcctcgtcatgatgcgcatgcgccaggcggccgagcggcaacagctgatcgcacggatgcagcaggaagaccaggaggggccgcctacgtagccccagctccagccatccacccctcagcccttttcttcaacgtcaccaataaatttttttttttttt

SEQ ID NO: 2225 - DNA, 2737 bp, Homo sapiens
gcggggccaagatggcgccgagcgccgggtgagcagcgtctcggctgccgctagagttttcctgctccccgcgctcgggtggcgggggcgggtctgagtggtaccccggaggagaccctttgaaggtcccttgtggggactggaaagaggacggttggttgtgtgtctgtgctcgtggggaccccgtgtgtgtgcctgcattggagagatgttgcaggagatggggtgggctctctgaacctcctttcgcgctgcccggggatcttcgacctgcttctctgctgggatctcgcttaagttaacccttccctgggacgccttcctgccgcctccactgatctgaggagatcctgtgactgtagcgtgttttatgagcctttactggcagagggtaccgccgggtattgaaggattcgtaggagttcgccagggaagtgggacacgaccccctcttgtaaacccggcgccaggcacagaggtctccgtctctccaccgggggcttcatccttccagggaggagaagagggactccagaatggctgaggagaagaagctgaagcttagcaacactgtgctgccctcggagtccatgaaggtggtggctgaatccatgggcatcgcccagattcaggaggagacctgccagctgctaacggatgaggtcagctaccgcatcaaagagatcgcacaggatgccttgaagttcatgcacatggggaagcggcagaagctcaccaccagtgacattgactacgccttgaagctaaagaatgtcgagccactctatggcttccacgcccaggagttcattcctttccgcttcgcctctggtgggggccgggagctttacttctatgaggagaaggaggttgatctgagcgacatcatcaatacccctctgccccgggtgcccctggacgtctgcctcaaagctcattggctgagcatcgagggctgccagccagctatccccgagaacccgcccccagctcccaaagagcaacagaaggctgaagccacagaacccctgaagtcagccaagccaggccaggaggaagacggacccctgaagggcaaaggtcaaggggccaccacagccgacggcaaagggaaagagaagaaggcgccgcccttgctggagggggcccccttgcgactgaagccccggagcatccacgagttgtctgtggagcagcagctctactacaaggagatcaccgaggcctgcgtgggctcctgcgaggccaagagggcggaagccctgcaaagcattgccacggaccctggactgtatcagatgctgccacggttcagtacctttatctcggagggggtccgtgtgaacgtggttcagaacaacctggccctactcatctacctgatgcgtatggtgaaagcgctgatggacaaccccacgctctatctagaaaaatacgtccatgagctgattccagctgtgatgacctgcatcgtgagcagacagttgtgcctgcgaccagatgtggacaatcactgggcactccgagactttgctgcccgcctggtggcccagatctgcaagcattttagcacaaccactaacaacatccagtcccggatcaccaagaccttcaccaagagctgggtggacgagaagacgccctggacgactcgttatggctccatcgcaggcttggctgagctgggacacgatgttatcaagactctgattctgccccggctgcagcaggaaggggagcggatccgcagtgtgctggacggccctgtgctgagcaacattgaccggattggagcagaccatgtgcagagcctcctgctgaaacactgtgctcctgttctggcaaagctgcgcccaccgcctgacaatcaggacgcctatcgggcagaattcgggtcccttgggcccctcctctgctcccaggtggtcaaggctcgggcccaggctgctctgcaggctcagcaggtcaacaggaccactctgaccatcacgcagccccggcccacgctgaccctctcgcaggccccacagcctggccctcgcacccctggcttgctgaaggttcctggctccatcgcacttcctgtccagacactggtgtctgcacgagcggctgccccaccacagccttcccctcctccaaccaagtttattgtaatgtcatcgtcctccagcgccccatccacccagcaggtcctgtccctcagcacctcggcccccggctcaggttccaccaccacttcgcccgtcaccaccaccgtccccagcgtgcagcccatcgtcaagttggtctccaccgccaccaccgcaccccccagcactgctccctctggtcctgggagtgtccagaagtacatcgtggtctcacttcccccaacaggggagggcaaaggaggccccacctcccatccttctccagttcctcccccggcatcgtccccgtccccactcagcggcagtgccctttgtggggggaagcaggaggctggggacagtccccctccagctccagggactccaaaagccaatggctcccagcccaactccggctcccctcagcctgctccgtgatgctccacctgccagcccccggattcccacacatgcagacatgtacacacgtgcacgtacacacatgcatgctcgctaagcggaaggaagttgtagattgcttccttcatgtcactttctttttagatattgtacagccagtttctcagaataaaagtttggtttgt

SEQ ID NO: 2226 - DNA, 2383 bp, Homo sapiens
gcggggccaagatggcgccgagcgccgggtgagcagcgtctcggctgccgctagagttttcctgctccccgcgctcgggtggcgggggcgggtctgagtggtaccccggaggagaccctttgaaggtcccttgtggggactggaaagaggacgggtctccgtctctccaccgggggcttcatccttccagggaggagaagagggactccagaatggctgaggagaagaagctgaagcttagcaacactgtgctgccctcggagtccatgaaggtggtggctgaatccatgggcatcgcccagattcaggaggagacctgccagctgctaacggatgaggtcagctaccgcatcaaagagatcgcacaggatgccttgaagttcatgcacatggggaagcggcagaagctcaccaccagtgacattgactacgccttgaagctaaagaatgtcgagccactctatggcttccacgcccaggagttcattcctttccgcttcgcctctggtgggggccgggagctttacttctatgaggagaaggaggttgatctgagcgacatcatcaatacccctctgccccgggtgcccctggacgtctgcctcaaagctcattggctgagcatcgagggctgccagccagctatccccgagaacccgcccccagctcccaaagagcaacagaaggctgaagccacagaacccctgaagtcagccaagccaggccaggaggaagacggacccctgaagggcaaaggtcaaggggccaccacagccgacggcaaagggaaagagaagaaggcgccgcccttgctggagggggcccccttgcgactgaagccccggagcatccacgagttgtctgtggagcagcagctctactacaaggagatcaccgaggcctgcgtgggctcctgcgaggccaagagggcggaagccctgcaaagcattgccacggaccctggactgtatcagatgctgccacggttcagtacctttatctcggagggggtccgtgtgaacgtggttcagaacaacctggccctactcatctacctgatgcgtatggtgaaagcgctgatggacaaccccacgctctatctagaaaaatacgtccatgagctgattccagctgtgatgacctgcatcgtgagcagacagttgtgcctgcgaccagatgtggacaatcactgggcactccgagactttgctgcccgcctggtggcccagatctgcaagcattttagcacaaccactaacaacatccagtcccggatcaccaagaccttcaccaagagctgggtggacgagaagacgccctggacgactcgttatggctccatcgcaggcttggctgagctgggacacgatgttatcaagactctgattctgccccggctgcagcaggaaggggagcggatccgcagtgtgctggacggccctgtgctgagcaacattgaccggattggagcagaccatgtgcagagcctcctgctgaaacactgtgctcctgttctggcaaagctgcgcccaccgcctgacaatcaggacgcctatcgggcagaattcgggtcccttgggcccctcctctgctcccaggtggtcaaggctcgggcccaggctgctctgcaggctcagcagccccggcccacgctgaccctctcgcaggccccacagcctggccctcgcacccctggcttgctgaaggttcctggctccatcgcacttcctgtccagacactggtgtctgcacgagcggctgccccaccacagccttcccctcctccaaccaagtttattgtaatgtcatcgtcctccagcgccccatccacccagcaggtcctgtccctcagcacctcggcccccggctcaggttccaccaccacttcgcccgtcaccaccaccgtccccagcgtgcagcccatcgtcaagttggtctccaccgccaccaccgcaccccccagcactgctccctctggtcctgggagtgtccagaagtacatcgtggtctcacttcccccaacaggggagggcaaaggaggccccacctcccatccttctccagttcctcccccggcatcgtccccgtccccactcagcggcagtgccctttgtggggggaagcaggaggctggggacagtccccctccagctccagggactccaaaagccaatggctcccagcccaactccggctcccctcagcctgctccgtgatgctccacctgccagcccccggattcccacacatgcagacatgtacacacgtgcacgtacacacatgcatgctcgctaagcggaaggaagttgtagattgcttccttcatgtcactttctttttagatattgtacagccagtttctcagaataaaagtttggtttgt

SEQ ID NO: 2227 - DNA, 2707 bp, Homo sapiens
gcggggccaagatggcgccgagcgccgggtgagcagcgtctcggctgccgctagagttttcctgctccccgcgctcgggtggcgggggcgggtctgagtggtaccccggaggagaccctttgaaggtcccttgtggggactggaaagaggacggttggttgtgtgtctgtgctcgtggggaccccgtgtgtgtgcctgcattggagagatgttgcaggagatggggtgggctctctgaacctcctttcgcgctgcccggggatcttcgacctgcttctctgctgggatctcgcttaagttaacccttccctgggacgccttcctgccgcctccactgatctgaggagatcctgtgactgtagcgtgttttatgagcctttactggcagagggtaccgccgggtattgaaggattcgtaggagttcgccagggaagtgggacacgaccccctcttgtaaacccggcgccaggcacagaggtctccgtctctccaccgggggcttcatccttccagggaggagaagagggactccagaatggctgaggagaagaagctgaagcttagcaacactgtgctgccctcggagtccatgaaggtggtggctgaatccatgggcatcgcccagattcaggaggagacctgccagctgctaacggatgaggatgccttgaagttcatgcacatggggaagcggcagaagctcaccaccagtgacattgactacgccttgaagctaaagaatgtcgagccactctatggcttccacgcccaggagttcattcctttccgcttcgcctctggtgggggccgggagctttacttctatgaggagaaggaggttgatctgagcgacatcatcaatacccctctgccccgggtgcccctggacgtctgcctcaaagctcattggctgagcatcgagggctgccagccagctatccccgagaacccgcccccagctcccaaagagcaacagaaggctgaagccacagaacccctgaagtcagccaagccaggccaggaggaagacggacccctgaagggcaaaggtcaaggggccaccacagccgacggcaaagggaaagagaagaaggcgccgcccttgctggagggggcccccttgcgactgaagccccggagcatccacgagttgtctgtggagcagcagctctactacaaggagatcaccgaggcctgcgtgggctcctgcgaggccaagagggcggaagccctgcaaagcattgccacggaccctggactgtatcagatgctgccacggttcagtacctttatctcggagggggtccgtgtgaacgtggttcagaacaacctggccctactcatctacctgatgcgtatggtgaaagcgctgatggacaaccccacgctctatctagaaaaatacgtccatgagctgattccagctgtgatgacctgcatcgtgagcagacagttgtgcctgcgaccagatgtggacaatcactgggcactccgagactttgctgcccgcctggtggcccagatctgcaagcattttagcacaaccactaacaacatccagtcccggatcaccaagaccttcaccaagagctgggtggacgagaagacgccctggacgactcgttatggctccatcgcaggcttggctgagctgggacacgatgttatcaagactctgattctgccccggctgcagcaggaaggggagcggatccgcagtgtgctggacggccctgtgctgagcaacattgaccggattggagcagaccatgtgcagagcctcctgctgaaacactgtgctcctgttctggcaaagctgcgcccaccgcctgacaatcaggacgcctatcgggcagaattcgggtcccttgggcccctcctctgctcccaggtggtcaaggctcgggcccaggctgctctgcaggctcagcaggtcaacaggaccactctgaccatcacgcagccccggcccacgctgaccctctcgcaggccccacagcctggccctcgcacccctggcttgctgaaggttcctggctccatcgcacttcctgtccagacactggtgtctgcacgagcggctgccccaccacagccttcccctcctccaaccaagtttattgtaatgtcatcgtcctccagcgccccatccacccagcaggtcctgtccctcagcacctcggcccccggctcaggttccaccaccacttcgcccgtcaccaccaccgtccccagcgtgcagcccatcgtcaagttggtctccaccgccaccaccgcaccccccagcactgctccctctggtcctgggagtgtccagaagtacatcgtggtctcacttcccccaacaggggagggcaaaggaggccccacctcccatccttctccagttcctcccccggcatcgtccccgtccccactcagcggcagtgccctttgtggggggaagcaggaggctggggacagtccccctccagctccagggactccaaaagccaatggctcccagcccaactccggctcccctcagcctgctccgtgatgctccacctgccagcccccggattcccacacatgcagacatgtacacacgtgcacgtacacacatgcatgctcgctaagcggaaggaagttgtagattgcttccttcatgtcactttctttttagatattgtacagccagtttctcagaataaaagtttggtttgt

SEQ ID NO: 2228 - DNA, 2441 bp, Homo sapiens
gcggggccaagatggcgccgagcgccgggtgagcagcgtctcggctgccgctagagttttcctgctccccgcgctcgggtggcgggggcgggtctgagtggtaccccggaggagaccctttgaaggtcccttgtggggactggaaagaggacgggtctccgtctctccaccgggggcttcatccttccagggaggagaagagggactccagaatggctgaggagaagaagctgaagcttagcaacactgtgctgccctcggagtccatgaaggtggtggctgaatccatgggcatcgcccagattcaggaggagacctgccagctgctaacggatgaggtcagctaccgcatcaaagagatcgcacaggatgccttgaagttcatgcacatggggaagcggcagaagctcaccaccagtgacattgactacgccttgaagctaaagaatgtcgagccactctatggcttccacgcccaggagttcattcctttccgcttcgcctctggtgggggccgggagctttacttctatgaggagaaggaggttgatctgagcgacatcatcaatacccctctgccccgggtgcccctggacgtctgcctcaaagctcattggctgagcatcgagggctgccagccagctatccccgagaacccgcccccagctcccaaagagcaacagaaggctgaagccacagaacccctgaagtcagccaagccaggccaggaggaagacggacccctgaagggcaaaggtcaaggggccaccacagccgacggcaaagggaaagagaagaaggcgccgcccttgctggagggggcccccttgcgactgaagccccggagcatccacgagttgtctgtggagcagcagctctactacaaggagatcaccgaggcctgcgtgggctcctgcgaggccaagagggcggaagccctgcaaagcattgccacggaccctggactgtatcagatgctgccacggttcagtacctttatctcggagggggtccgtgtgaacgtggttcagaacaacctggccctactcatctacctgatgcgtatggtgaaagcgctgatggacaaccccacgctctatctagaaaaatacgtccatgagctgattccagctgtgatgacctgcatcgtgagcagacagttgtgcctgcgaccagatgtggacaatcactgggcactccgagactttgctgcccgcctggtggcccagatctgcaagcattttagcacaaccactaacaacatccagtcccggatcaccaagaccttcaccaagagctgggtggacgagaagacgccctggacgactcgttatggctccatcgcaggcttggctgagctgggacacgatgttatcaagactctgattctgccccggctgcagcaggaaggggagcggatccgcagtgtgctggacggccctgtgctgagcaacattgaccggattggagcagaccatgtgcagagcctcctgctgaaacactgtgctcctgttctggcaaagctgcgcccaccgcctgacaatcaggacgcctatcgggcagaattcgggtcccttgggcccctcctctgctcccaggtggtcaaggctcgggcccaggctgctctgcaggctcagcaggtcaacaggaccactctgaccatcacgcagccccggcccacgctgaccctctcgcaggccccacagcctggccctcgcacccctggcttgctgaaggttcctggctccatcgcacttcctgtccagacactggtgtctgcacgagcggctgccccaccacagccttcccctcctccaaccaagtttattgtaatgtcatcgtcctccagcgccccatccacccagcaggtcctgtccctcagcacctcggcccccggctcaggttccaccaccacttcgcccgtcaccaccaccgtccccagcgtgcagcccatcgtcaagttggtctccaccgccaccaccgcaccccccagcactgctccctctggtcctgggagtgtccagaagtacatcgtggtctcacttcccccaacaggggagggcaaaggaggccccacctcccatccttctccagttcctcccccggcatcgtccccgtccccactcagcggcagtgccctttgtggggggaagcaggaggctggggacagtccccctccagctccagggactccaaaagccaatggctcccagcccaactccggctcccctcagcctgctccgtgatgctccacctgccagcccccggattcccacacatgcagacatgtacacacgtgcacgtacacacatgcatgctcgctaagcggaaggaagttgtagattgcttccttcatgtcactttctttttagatattgtacagccagtttctcagaataaaagtttggtttgtaagttctgaaaaaaaaaaaaaaaaaaaa

SEQ ID NO: 2229 - DNA, 3461 bp, Homo sapiens
atggtgacaatgtgtggaggacataggccagagaattttcttcaccaagtcttgacagaatttggtgaagaactagctggagaaggcaagagtgaagtgggcgggggggccccgcgctcctacctgcaagtggccagtgccgagtgctgggccgccgctcctgccgtgcatgttggggagccagtacatgcaggtgggctccacacggagaggggcgccgaccccgtgatagggctttacctggtacatcggggtggcgcgtgccagacaccaacggtcggaaaccgccagacaccaacgctcggaatccacgccaggccacgacggagggcgactacctcccttctgaccctgctgctggcgttcggaaaaaacgcagtccggtgtgctctgattggtccaggctctttgacgtcacggactcgacctttgacagagccactaggcgaaaaggagagacgggaagtattttttccgccccgcccggaaagggtggagcacaacgtcgaaagcagccgttgggagcccaggaggcggggcgcctgtgggagccgtggagggaactttcccagtccccgaggcggatccggtgttgcatccttggagcgagctgagagctcgagtacagaacctgctaaggccatcaaacctattgatcggaagtcagtccatcagatttgctctgggccggtggtaccgagtctaagcactgcggtgaaggagttagtagaaaacagtctggatgctggtgccactaatattgatctaaagcttaaggactatggagtggatctcattgaagtttcaggcaatggatgtggggtagaagaagaaaacttcgaaggcttaactctgaaacatcacacatctaagattcaagagtttgccgacctacctcaggttgaaacttttggctttcggggggaagctctgagctcactttgtgcactgagtgatgtcaccatttctacctgccatgtatcggcgaaggttgggactcgactggtgtttgatcactatgggaaaatcatccagaaaaccccctacccccaccccagagggatgacagtcagtgtgaagcagttattttctacgctacctgtgcaccataaagaatttcaaaggaatattaagaagaaacgtgcctgcttccccttcgccttctgccgtgattgtcagtttcctgaggcctccccagccatgcttcctgtacagcctgcagaactgactcctagaagtaccccaccccacccctgctccttggaggacaacgtgatcactgtattcagctctgtcaagaatggtccaggttcttctagatgatctgcacaaatggttcctctcctccttcctgatgtctgccattagcactggaataaagttcctgctgaaaatccacatctcccctgggtccggtgttctggaagtgagagagacaatgtcacacctcaaggagacagctctctagacaggaaggttattcacgtcccatgtcaagtctagctagagttcagagcaattgagaagtgcgattttatctcctgcctttcattctataccctgcttctgaaccatcgtgttcaactgtgaaactcacgctttggtgaccctgactccaaaacttaatacacccaaggtcagccccagtgatctgcttcatagcgaggactttgggtgggtcttcccagggagtagggcaccctcagagaatgtggctttggacttcatcacagctagggtcttttgtgtcacttcagatctaaacttgtaactgtgctagatctgtttctaatgtgacaacatcacaaaccacgagtccagaagcctaatccataatcctacctcctcatgacgaagtctcatgctctgtgctcaacatggttagctgcacaagatgtaaaccaaagcttcactgaaccctcgacccaaatcggtaactcaagtgcatcaatcataatgaacctccccgaactcagtatttatgattatttttgaggcagggtctcactctgtcgccccggctggagtgcagtggcaggatcagggctccctgcagccccgacctcccaggctccagcgatcctcctgcctcagcctcttgagtagttgggagtagagatgcctcccacatcgcctggctaatttttgtatttttgtggagaggggatatctcgccacgttgccgaggcttgaagccagatcaagcaattgggttccttggatttccgaaatagaccccaatattctgcctttaccccggaggatgcagatgtaccttctctcaggccgatgacctcaggcctccacggtccctggagctctaggaaaggtgggcgcgatctcgcgcccacacccagtgctctgggtcataagcctggatctggaaaaacaaacgcgctttgagaagacggggactccccaggatacccctctctcccctcgtccagcctccagcccacccgattcctccccacatcctccacgtccccaggccccacccacctcctccaactcctccggggaaacccaagccctgcagcgcatggaacagaagaactggaaccgacgcttctggaacaaggctatctgagagcagttcttcctggccctcgggttcatgggacggcataactggaaccaatgcttagggcgcaagggtatgtgagagtgggtcttcccgtacaggaagtagaagatcttttgtttgggggcctcgtcgtcctcctccatgtcattggccagatagctgaggacagaaatcaggttgctgctcaggggcaccaccaggagagacctccggctgaggtcagcttcccagagaggaaggtaagggaccgtccctagctcaggactggcacccaccctgcagagagccacgccttcctcaggagggctctgctggacagagacctgatcaagggcatctcccactccttcaggatggagacaaaaacccaactggtgaccaagagtggtggcttaggcctggaatcccagcacactgggaggccgaagcaggaggatcacttgaggccaggagtttgagacaggcctgggcaacatagcaagacccttgtctctattaaaaatataaaaaatacgccagacgtggtggctcatgcctgtaatcccagcactttggaaggctgaagcaggtggattgcttgagaccaggagtttgagaccagcctggccaacacagagaaaccccatttatgctaaaaatacaaaaatcagcctggtgcggtggcacacccattagtcctagctactcaagaggctgaagcataagaattgtgtgaacccaggaggcggaggttgcagtgagccaagattgggcccctccattccagcctgagagacacagcaacactcttgtcttgataaataaataaataaataaataaataaataaataaataactgtccaggtgtggtggcacagccctgtagtcggagct

SEQ ID NO: 2230 - DNA, 3474 bp, Homo sapiens
gcagccgttgggagcccaggaggcggggcgcctgtgggagccgtggagggaactttcccagtccccgaggcggatccggtgttgcatccttggagcgagctgagagctcgaggtgagctgggctcgcggtcgcccctctcgcgcgccctctttaagaaccacggcgtccaacctccctggaaatggggggaacatggccgaggcgcgtggcgaggccgcctcgtggaggccccggagcggcatcctcagcgccccagcgatccggtgcccattaggtgcgccttgaagccgaggcaagctccttcggggtgctgggctgcgggcaaagaattcggccctgtgaagagttgggttcggcctgtctcaggccctgcccacatcccatcacagggccgtggacttgaagccggaacgtgaaatccctatagactgaatgcatttccttcctacctgttctctctccccttttatttttatttttatattattttatttttaatttttactttatttttttgtagagacggggatttagctatgttgcccaagctggtctggaactccggagctcaagcagtccgcccgccttggccccccaaagcgctggaattacaggcgtaatgcactgtgcctggcctttaaaaaaaaattgaggttattttggggacagtagagcgtccagacacatcctaatttgcatagctgcgcagttttaaaaaatgcaatgcatttttacctgttaggaacctgctaaggccatcaaacctattgatcggaagtcagtccatcagatttgctctgggccggtggtaccgagtctaagcactgcggtgaaggagttagtagaaaacagtctggatgctggtgccactaatattgatctaaagcttaaggactatggagtggatctcattgaagtttcaggcaatggatgtggggtagaagaagaaaacttcgaaggcttaatgatgtcaccatttctacctgccatgtatcggcgaaggttgggactcgactggtgtttgatcactatgggaaaatcatccagaaaaccccctacccccaccccagagggatgacagtcagtgtgaagcagttattttctacgctacctgtgcaccataaagaatttcaaaggaatattaagaagaaacgtgcctgcttccccttcgccttctgccgtgattgtcagtttcctgaggcctccccagccatgcttcctgtacagcctgcagaactgactcctagaagtaccccaccccacccctgctccttggaggacaacgtgatcactgtattcagctctgtcaagaatggtccaggttcttctagatgatctgcacaaatggttcctctcctccttcctgatgtctgccattagcactggaataaagttcctgctgaaaatccacatctcccctgggtccggtgttctggaagtgagagagacaatgtcacacctcaaggagacagctctctagacaggaaggttattcacgtcccatgtcaagtctagctagagttcagagcaattgagaagtgcgattttatctcctgcctttcattctataccctgcttctgaaccatcgtgttcaactgtgaaactcacgctttggtgaccctgactccaaaacttaatacacccaaggtcagccccagtgatctgcttcatagcgaggactttgggtgggtcttcccagggagtagggcaccctcagagaatgtggctttggacttcatcacagctagggtcttttgtgtcacttcagatctaaacttgtaactgtgctagatctgtttctaatgtgacaacatcacaaaccacgagtccagaagcctaatccataatcctacctcctcatgacgaagtctcatgctctgtgctcaacatggttagctgcacaagatgtaaaccaaagcttcactgaaccctcgacccaaatcggtaactcaagtgcatcaatcataatgaacctccccgaactcagtatttatgattatttttgaggcagggtctcactctgtcgccccggctggagtgcagtggcaggatcagggctccctgcagccccgacctcccaggctccagcgatcctcctgcctcagcctcttgagtagttgggagtagagatgcctcccacatcgcctggctaatttttgtatttttgtggagaggggatatctcgccacgttgccgaggcttgaagccagatcaagcaattgggttccttggatttccgaaatagaccccaatattctgcctttaccccggaggatgcagatgtaccttctctcaggccgatgacctcaggcctccacggtccctggagctctaggaaaggtgggcgcgatctcgcgcccacacccagtgctctgggtcataagcctggatctggaaaaacaaacgcgctttgagaagacggggactccccaggatacccctctctcccctcgtccagcctccagcccacccgattcctccccacatcctccacgtccccaggccccacccacctcctccaactcctccggggaaacccaagccctgcagcgcatggaacagaagaactggaaccgacgcttctggaacaaggctatctgagagcagttcttcctggccctcgggttcatgggacggcataactggaaccaatgcttagggcgcaagggtatgtgagagtgggtcttcccgtacaggaagtagaagatcttttgtttgggggcctcgtcgtcctcctccatgtcattggccagatagctgaggacagaaatcaggttgctgctcaggggcaccaccaggagagacctccggctgaggtcagcttcccagagaggaaggtaagggaccgtccctagctcaggactggcacccaccctgcagagagccacgccttcctcaggagggctctgctggacagagacctgatcaagggcatctcccactccttcaggatggagacaaaaacccaactggtgaccaagagtggtggcttaggcctggaatcccagcacactgggaggccgaagcaggaggatcacttgaggccaggagtttgagacaggcctgggcaacatagcaagacccttgtctctattaaaaatataaaaaatacgccagacgtggtggctcatgcctgtaatcccagcactttggaaggctgaagcaggtggattgcttgagaccaggagtttgagaccagcctggccaacacagagaaaccccatttatgctaaaaatacaaaaatcagcctggtgcggtggcacacccattagtcctagctactcaagaggctgaagcataagaattgtgtgaacccaggaggcggaggttgcagtgagccaagattgggcccctccattccagcctgagagacacagcaacactcttgtcttgataaataaataaataaataaataaataaataaataaataactgtccaggtgtggtggcacagccctgtagtcggagct

SEQ ID NO: 2231 - DNA, 3577 bp, Homo sapiens
gcagccgttgggagcccaggaggcggggcgcctgtgggagccgtggagggaactttcccagtccccgaggcggatccggtgttgcatccttggagcgagctgagagctcgaggtgagctgggctcgcggtcgcccctctcgcgcgccctctttaagaaccacggcgtccaacctccctggaaatggggggaacatggccgaggcgcgtggcgaggccgcctcgtggaggccccggagcggcatcctcagcgccccagcgatccggtgcccattaggtgcgccttgaagccgaggcaagctccttcggggtgctgggctgcgggcaaagaattcggccctgtgaagagttgggttcggcctgtctcaggccctgcccacatcccatcacagggccgtggacttgaagccggaacgtgaaatccctatagactgaatgcatttccttcctacctgttctctctccccttttatttttatttttatattattttatttttaatttttactttatttttttgtagagacggggatttagctatgttgcccaagctggtctggaactccggagctcaagcagtccgcccgccttggccccccaaagcgctggaattacaggcgtaatgcactgtgcctggcctttaaaaaaaaattgaggttattttggggacagtagagcgtccagacacatcctaatttgcatagctgcgcagttttaaaaaatgcaatgcatttttacctgttaggaacctgctaaggccatcaaacctattgatcggaagtcagtccatcagatttgctctgggccggtggtaccgagtctaagcactgcggtgaaggagttagtagaaaacagtctggatgctggtgccactaatattgatctaaagcttaaggactatggagtggatctcattgaagtttcaggcaatggatgtggggtagaagaagaaaacttcgaaggcttaactctgaaacatcacacatctaagattcaagagtttgccgacctacctcaggttgaaacttttggctttcggggggaagctctgagctcactttgtgcactgagtgatgtcaccatttctacctgccatgtatcggcgaaggttgggactcgactggtgtttgatcactatgggaaaatcatccagaaaaccccctacccccaccccagagggatgacagtcagtgtgaagcagttattttctacgctacctgtgcaccataaagaatttcaaaggaatattaagaagaaacgtgcctgcttccccttcgccttctgccgtgattgtcagtttcctgaggcctccccagccatgcttcctgtacagcctgcagaactgactcctagaagtaccccaccccacccctgctccttggaggacaacgtgatcactgtattcagctctgtcaagaatggtccaggttcttctagatgatctgcacaaatggttcctctcctccttcctgatgtctgccattagcactggaataaagttcctgctgaaaatccacatctcccctgggtccggtgttctggaagtgagagagacaatgtcacacctcaaggagacagctctctagacaggaaggttattcacgtcccatgtcaagtctagctagagttcagagcaattgagaagtgcgattttatctcctgcctttcattctataccctgcttctgaaccatcgtgttcaactgtgaaactcacgctttggtgaccctgactccaaaacttaatacacccaaggtcagccccagtgatctgcttcatagcgaggactttgggtgggtcttcccagggagtagggcaccctcagagaatgtggctttggacttcatcacagctagggtcttttgtgtcacttcagatctaaacttgtaactgtgctagatctgtttctaatgtgacaacatcacaaaccacgagtccagaagcctaatccataatcctacctcctcatgacgaagtctcatgctctgtgctcaacatggttagctgcacaagatgtaaaccaaagcttcactgaaccctcgacccaaatcggtaactcaagtgcatcaatcataatgaacctccccgaactcagtatttatgattatttttgaggcagggtctcactctgtcgccccggctggagtgcagtggcaggatcagggctccctgcagccccgacctcccaggctccagcgatcctcctgcctcagcctcttgagtagttgggagtagagatgcctcccacatcgcctggctaatttttgtatttttgtggagaggggatatctcgccacgttgccgaggcttgaagccagatcaagcaattgggttccttggatttccgaaatagaccccaatattctgcctttaccccggaggatgcagatgtaccttctctcaggccgatgacctcaggcctccacggtccctggagctctaggaaaggtgggcgcgatctcgcgcccacacccagtgctctgggtcataagcctggatctggaaaaacaaacgcgctttgagaagacggggactccccaggatacccctctctcccctcgtccagcctccagcccacccgattcctccccacatcctccacgtccccaggccccacccacctcctccaactcctccggggaaacccaagccctgcagcgcatggaacagaagaactggaaccgacgcttctggaacaaggctatctgagagcagttcttcctggccctcgggttcatgggacggcataactggaaccaatgcttagggcgcaagggtatgtgagagtgggtcttcccgtacaggaagtagaagatcttttgtttgggggcctcgtcgtcctcctccatgtcattggccagatagctgaggacagaaatcaggttgctgctcaggggcaccaccaggagagacctccggctgaggtcagcttcccagagaggaaggtaagggaccgtccctagctcaggactggcacccaccctgcagagagccacgccttcctcaggagggctctgctggacagagacctgatcaagggcatctcccactccttcaggatggagacaaaaacccaactggtgaccaagagtggtggcttaggcctggaatcccagcacactgggaggccgaagcaggaggatcacttgaggccaggagtttgagacaggcctgggcaacatagcaagacccttgtctctattaaaaatataaaaaatacgccagacgtggtggctcatgcctgtaatcccagcactttggaaggctgaagcaggtggattgcttgagaccaggagtttgagaccagcctggccaacacagagaaaccccatttatgctaaaaatacaaaaatcagcctggtgcggtggcacacccattagtcctagctactcaagaggctgaagcataagaattgtgtgaacccaggaggcggaggttgcagtgagccaagattgggcccctccattccagcctgagagacacagcaacactcttgtcttgataaataaataaataaataaataaataaataaataaataactgtccaggtgtggtggcacagccctgtagtcggagct

SEQ ID NO: 2232 - DNA, 3444 bp, Homo sapiens
gcagccgttgggagcccaggaggcggggcgcctgtgggagccgtggagggaactttcccagtccccgaggcggatccggtgttgcatccttggagcgagctgagagctcgaggtgagctgggctcgcggtcgcccctctcgcgcgccctctttaagaaccacggcgtccaacctccctggaaatggggggaacatggccgaggcgcgtggcgaggccgcctcgtggaggccccggagcggcatcctcagcgccccagcgatccggtgcccattaggtgcgccttgaagccgaggcaagctccttcggggtgctgggctgcgggcaaagaattcggccctgtgaagagttgggttcggcctgtctcaggccctgcccacatcccatcacagggccgtggacttgaagccggaacgtgaaatccctatagactgaatgcatttccttcctacctgttctctctccccttttatttttatttttatattattttatttttaatttttactttatttttttgtagagacggggatttagctatgttgcccaagctggtctggaactccggagctcaagcagtccgcccgccttggccccccaaagcgctggaattacaggcgtaatgcactgtgcctggcctttaaaaaaaaattgaggttattttggggacagtagagcgtccagacacatcctaatttgcatagctgcgcagttttaaaaaatgcaatgcatttttacctgttaggaacctgctaaggccatcaaacctattgatcggaagtcagtccatcagatttgctctgggccggtggtaccgagtctaagcactgcggtgaaggagttagtagaaaacagtctggatgctggtgccactaatattgatctaaagcttaaggactatggagtggatctcattgaagtttcaggcaatggatgtggggtagaagaagaaaacttcgaaggcttaatgatgtcaccatttctacctgccatgtatcggcgaaggttgggactcgactggtgtttgatcactatgggaaaatcatccagaaaaccccctacccccaccccagagggatgacagtcagtgtgaagcagttattttctacgctacctgtgcaccataaagaatttcaaaggaatattaagaagaaacgtgcctgcttccccttcgccttctgccgtgattgtcagtttcctgaggcctccccagccatgcttcctgtacagcctgcagaactgactcctagaagtaccccaccccacccctgctccttggaggacaacgtgatcactgtattcagctctgtcaagaatggtccaggttccctccttcctgatgtctgccattagcactggaataaagttcctgctgaaaatccacatctcccctgggtccggtgttctggaagtgagagagacaatgtcacacctcaaggagacagctctctagacaggaaggttattcacgtcccatgtcaagtctagctagagttcagagcaattgagaagtgcgattttatctcctgcctttcattctataccctgcttctgaaccatcgtgttcaactgtgaaactcacgctttggtgaccctgactccaaaacttaatacacccaaggtcagccccagtgatctgcttcatagcgaggactttgggtgggtcttcccagggagtagggcaccctcagagaatgtggctttggacttcatcacagctagggtcttttgtgtcacttcagatctaaacttgtaactgtgctagatctgtttctaatgtgacaacatcacaaaccacgagtccagaagcctaatccataatcctacctcctcatgacgaagtctcatgctctgtgctcaacatggttagctgcacaagatgtaaaccaaagcttcactgaaccctcgacccaaatcggtaactcaagtgcatcaatcataatgaacctccccgaactcagtatttatgattatttttgaggcagggtctcactctgtcgccccggctggagtgcagtggcaggatcagggctccctgcagccccgacctcccaggctccagcgatcctcctgcctcagcctcttgagtagttgggagtagagatgcctcccacatcgcctggctaatttttgtatttttgtggagaggggatatctcgccacgttgccgaggcttgaagccagatcaagcaattgggttccttggatttccgaaatagaccccaatattctgcctttaccccggaggatgcagatgtaccttctctcaggccgatgacctcaggcctccacggtccctggagctctaggaaaggtgggcgcgatctcgcgcccacacccagtgctctgggtcataagcctggatctggaaaaacaaacgcgctttgagaagacggggactccccaggatacccctctctcccctcgtccagcctccagcccacccgattcctccccacatcctccacgtccccaggccccacccacctcctccaactcctccggggaaacccaagccctgcagcgcatggaacagaagaactggaaccgacgcttctggaacaaggctatctgagagcagttcttcctggccctcgggttcatgggacggcataactggaaccaatgcttagggcgcaagggtatgtgagagtgggtcttcccgtacaggaagtagaagatcttttgtttgggggcctcgtcgtcctcctccatgtcattggccagatagctgaggacagaaatcaggttgctgctcaggggcaccaccaggagagacctccggctgaggtcagcttcccagagaggaaggtaagggaccgtccctagctcaggactggcacccaccctgcagagagccacgccttcctcaggagggctctgctggacagagacctgatcaagggcatctcccactccttcaggatggagacaaaaacccaactggtgaccaagagtggtggcttaggcctggaatcccagcacactgggaggccgaagcaggaggatcacttgaggccaggagtttgagacaggcctgggcaacatagcaagacccttgtctctattaaaaatataaaaaatacgccagacgtggtggctcatgcctgtaatcccagcactttggaaggctgaagcaggtggattgcttgagaccaggagtttgagaccagcctggccaacacagagaaaccccatttatgctaaaaatacaaaaatcagcctggtgcggtggcacacccattagtcctagctactcaagaggctgaagcataagaattgtgtgaacccaggaggcggaggttgcagtgagccaagattgggcccctccattccagcctgagagacacagcaacactcttgtcttgataaataaataaataaataaataaataaataaataaataactgtccaggtgtggtggcacagccctgtagtcggagct

SEQ ID NO: 2233 - DNA, 2801 bp, Homo sapiens
tttgagaatcaataaatcttgagatcatttatggttttgcaattcaacctgaaaaatgaagtcaaagcttttatcaaaacaaagcatgtttagtgctctctgtctcactgtcttttagatgccagaccttagattttatgatgactcctcaaccgtttagatctcggttatctcagagggatcatcagctttttaagaaaattttgagagaaaagcaagtgaagaaaagagtagtcagtgcccaacatcacggatctctcactgaacacaccatgcctggtattctctcacagtgatgtcaccatttctacctgccatgtatcggcgaaggttgggactcgactggtgtttgatcactatgggaaaatcatccagaaaaccccctacccccaccccagagggatgacagtcagtgtgaagcagttattttctacgctacctgtgcaccataaagaatttcaaaggaatattaagaagaaacgtgcctgcttccccttcgccttctgccgtgattgtcagtttcctgaggcctccccagccatgcttcctgtacagcctgcagaactgactcctagaagtaccccaccccacccctgctccttggaggacaacgtgatcactgtattcagctctgtcaagaatggtccaggttcttctagatgatctgcacaaatggttcctctcctccttcctgatgtctgccattagcactggaataaagttcctgctgaaaatccacatctcccctgggtccggtgttctggaagtgagagagacaatgtcacacctcaaggagacagctctctagacaggaaggttattcacgtcccatgtcaagtctagctagagttcagagcaattgagaagtgcgattttatctcctgcctttcattctataccctgcttctgaaccatcgtgttcaactgtgaaactcacgctttggtgaccctgactccaaaacttaatacacccaaggtcagccccagtgatctgcttcatagcgaggactttgggtgggtcttcccagggagtagggcaccctcagagaatgtggctttggacttcatcacagctagggtcttttgtgtcacttcagatctaaacttgtaactgtgctagatctgtttctaatgtgacaacatcacaaaccacgagtccagaagcctaatccataatcctacctcctcatgacgaagtctcatgctctgtgctcaacatggttagctgcacaagatgtaaaccaaagcttcactgaaccctcgacccaaatcggtaactcaagtgcatcaatcataatgaacctccccgaactcagtatttatgattatttttgaggcagggtctcactctgtcgccccggctggagtgcagtggcaggatcagggctccctgcagccccgacctcccaggctccagcgatcctcctgcctcagcctcttgagtagttgggagtagagatgcctcccacatcgcctggctaatttttgtatttttgtggagaggggatatctcgccacgttgccgaggcttgaagccagatcaagcaattgggttccttggatttccgaaatagaccccaatattctgcctttaccccggaggatgcagatgtaccttctctcaggccgatgacctcaggcctccacggtccctggagctctaggaaaggtgggcgcgatctcgcgcccacacccagtgctctgggtcataagcctggatctggaaaaacaaacgcgctttgagaagacggggactccccaggatacccctctctcccctcgtccagcctccagcccacccgattcctccccacatcctccacgtccccaggccccacccacctcctccaactcctccggggaaacccaagccctgcagcgcatggaacagaagaactggaaccgacgcttctggaacaaggctatctgagagcagttcttcctggccctcgggttcatgggacggcataactggaaccaatgcttagggcgcaagggtatgtgagagtgggtcttcccgtacaggaagtagaagatcttttgtttgggggcctcgtcgtcctcctccatgtcattggccagatagctgaggacagaaatcaggttgctgctcaggggcaccaccaggagagacctccggctgaggtcagcttcccagagaggaaggtaagggaccgtccctagctcaggactggcacccaccctgcagagagccacgccttcctcaggagggctctgctggacagagacctgatcaagggcatctcccactccttcaggatggagacaaaaacccaactggtgaccaagagtggtggcttaggcctggaatcccagcacactgggaggccgaagcaggaggatcacttgaggccaggagtttgagacaggcctgggcaacatagcaagacccttgtctctattaaaaatataaaaaatacgccagacgtggtggctcatgcctgtaatcccagcactttggaaggctgaagcaggtggattgcttgagaccaggagtttgagaccagcctggccaacacagagaaaccccatttatgctaaaaatacaaaaatcagcctggtgcggtggcacacccattagtcctagctactcaagaggctgaagcataagaattgtgtgaacccaggaggcggaggttgcagtgagccaagattgggcccctccattccagcctgagagacacagcaacactcttgtcttgataaataaataaataaataaataaataaataaataaataactgtccaggtgtggtggcacagccctgtagtcggagct

SEQ ID NO: 2234 - DNA, 3096 bp, Homo sapiens
gagccgtggagggaactttcccagtccccgaggcggatccggtgttgcatccttggagcgagctgagagctcgaggtgagctgggctcgcggtcgcccctctcgcgcgccctctttaagaaccacggcgtccaacctccctggaaatggggggaacatggccgaggcgcgtggcgaggccgcctcgtggaggccccggagcggcatcctcagcgccccagcgatccggtgcccattagatttctttagtacagaacctgctaaggccatcaaacctattgatcggaagtcagtccatcagatttgctctgggccggtggtaccgagtctaagcactgcggtgaaggagttagtagaaaacagtctggatgctggtgccactaatattgatctaaagcttaaggactatggagtggatctcattgaagtttcaggcaatggatgtggggtagaagaagaaaacttcgaaggcttaatctctttcagctctgaaacatcacacatctaagattcaagagtttgccgacctacctcaggttgaaacttttggctttcggggggaagctctgagctcactttgtgcactgagtgatgtcaccatttctacctgccatgtatcggcgaaggttgggactcgactggtgtttgatcactatgggaaaatcatccagaaaaccccctacccccaccccagagggatgacagtcagtgtgaagcagttattttctacgctacctgtgcaccataaagaatttcaaaggaatattaagaagaaacgtgcctgcttccccttcgccttctgccgtgattgtcagtttcctgaggcctccccagccatgcttcctgtacagcctgcagaactgactcctagaagtaccccaccccacccctgctccttggaggacaacgtgatcactgtattcagctctgtcaagaatggtccaggttcttctagatgatctgcacaaatggttcctctcctccttcctgatgtctgccattagcactggaataaagttcctgctgaaaatccacatctcccctgggtccggtgttctggaagtgagagagacaatgtcacacctcaaggagacagctctctagacaggaaggttattcacgtcccatgtcaagtctagctagagttcagagcaattgagaagtgcgattttatctcctgcctttcattctataccctgcttctgaaccatcgtgttcaactgtgaaactcacgctttggtgaccctgactccaaaacttaatacacccaaggtcagccccagtgatctgcttcatagcgaggactttgggtgggtcttcccagggagtagggcaccctcagagaatgtggctttggacttcatcacagctagggtcttttgtgtcacttcagatctaaacttgtaactgtgctagatctgtttctaatgtgacaacatcacaaaccacgagtccagaagcctaatccataatcctacctcctcatgacgaagtctcatgctctgtgctcaacatggttagctgcacaagatgtaaaccaaagcttcactgaaccctcgacccaaatcggtaactcaagtgcatcaatcataatgaacctccccgaactcagtatttatgattatttttgaggcagggtctcactctgtcgccccggctggagtgcagtggcaggatcagggctccctgcagccccgacctcccaggctccagcgatcctcctgcctcagcctcttgagtagttgggagtagagatgcctcccacatcgcctggctaatttttgtatttttgtggagaggggatatctcgccacgttgccgaggcttgaagccagatcaagcaattgggttccttggatttccgaaatagaccccaatattctgcctttaccccggaggatgcagatgtaccttctctcaggccgatgacctcaggcctccacggtccctggagctctaggaaaggtgggcgcgatctcgcgcccacacccagtgctctgggtcataagcctggatctggaaaaacaaacgcgctttgagaagacggggactccccaggatacccctctctcccctcgtccagcctccagcccacccgattcctccccacatcctccacgtccccaggccccacccacctcctccaactcctccggggaaacccaagccctgcagcgcatggaacagaagaactggaaccgacgcttctggaacaaggctatctgagagcagttcttcctggccctcgggttcatgggacggcataactggaaccaatgcttagggcgcaagggtatgtgagagtgggtcttcccgtacaggaagtagaagatcttttgtttgggggcctcgtcgtcctcctccatgtcattggccagatagctgaggacagaaatcaggttgctgctcaggggcaccaccaggagagacctccggctgaggtcagcttcccagagaggaaggtaagggaccgtccctagctcaggactggcacccaccctgcagagagccacgccttcctcaggagggctctgctggacagagacctgatcaagggcatctcccactccttcaggatggagacaaaaacccaactggtgaccaagagtggtggcttaggcctggaatcccagcacactgggaggccgaagcaggaggatcacttgaggccaggagtttgagacaggcctgggcaacatagcaagacccttgtctctattaaaaatataaaaaatacgccagacgtggtggctcatgcctgtaatcccagcactttggaaggctgaagcaggtggattgcttgagaccaggagtttgagaccagcctggccaacacagagaaaccccatttatgctaaaaatacaaaaatcagcctggtgcggtggcacacccattagtcctagctactcaagaggctgaagcataagaattgtgtgaacccaggaggcggaggttgcagtgagccaagattgggcccctccattccagcctgagagacacagcaacactcttgtcttgataaataaataaataaataaataaataaataaataaataactgtccaggtgtggtggcacagccctgtagtcggagct

SEQ ID NO: 2235 - DNA, 2808 bp, Homo sapiens
gccgtggagggaactttcccagtccccgaggcggatccggtgttgcatccttggagcgagctgagagctcgagtacagaacctgctaaggccatcaaacctattgatcggaagtcagtccatcagatttgctctgggccggtggtaccgagtctaagcactgcggtgaaggagttagtagaaaacagtctggatgctggtgccactaatattgatctaaagcttaaggactatggagtggatctcattgaagtttcaggcaatggatgtggggtagaagaagaaaacttcgaaggcttaatgatgtcaccatttctacctgccatgtatcggcgaaggttgggactcgactggtgtttgatcactatgggaaaatcatccagaaaaccccctacccccaccccagagggatgacagtcagtgtgaagcagttattttctacgctacctgtgcaccataaagaatttcaaaggaatattaagaagaaacgtgcctgcttccccttcgccttctgccgtgattgtcagtttcctgaggcctccccagccatgcttcctgtacagcctgcagaactgactcctagaagtaccccaccccacccctgctccttggaggacaacgtgatcactgtattcagctctgtcaagaatggtccaggttcttctagatgatctgcacaaatggttcctctcctccttcctgatgtctgccattagcactggaataaagttcctgctgaaaatccacatctcccctgggtccggtgttctggaagtgagagagacaatgtcacacctcaaggagacagctctctagacaggaaggttattcacgtcccatgtcaagtctagctagagttcagagcaattgagaagtgcgattttatctcctgcctttcattctataccctgcttctgaaccatcgtgttcaactgtgaaactcacgctttggtgaccctgactccaaaacttaatacacccaaggtcagccccagtgatctgcttcatagcgaggactttgggtgggtcttcccagggagtagggcaccctcagagaatgtggctttggacttcatcacagctagggtcttttgtgtcacttcagatctaaacttgtaactgtgctagatctgtttctaatgtgacaacatcacaaaccacgagtccagaagcctaatccataatcctacctcctcatgacgaagtctcatgctctgtgctcaacatggttagctgcacaagatgtaaaccaaagcttcactgaaccctcgacccaaatcggtaactcaagtgcatcaatcataatgaacctccccgaactcagtatttatgattatttttgaggcagggtctcactctgtcgccccggctggagtgcagtggcaggatcagggctccctgcagccccgacctcccaggctccagcgatcctcctgcctcagcctcttgagtagttgggagtagagatgcctcccacatcgcctggctaatttttgtatttttgtggagaggggatatctcgccacgttgccgaggcttgaagccagatcaagcaattgggttccttggatttccgaaatagaccccaatattctgcctttaccccggaggatgcagatgtaccttctctcaggccgatgacctcaggcctccacggtccctggagctctaggaaaggtgggcgcgatctcgcgcccacacccagtgctctgggtcataagcctggatctggaaaaacaaacgcgctttgagaagacggggactccccaggatacccctctctcccctcgtccagcctccagcccacccgattcctccccacatcctccacgtccccaggccccacccacctcctccaactcctccggggaaacccaagccctgcagcgcatggaacagaagaactggaaccgacgcttctggaacaaggctatctgagagcagttcttcctggccctcgggttcatgggacggcataactggaaccaatgcttagggcgcaagggtatgtgagagtgggtcttcccgtacaggaagtagaagatcttttgtttgggggcctcgtcgtcctcctccatgtcattggccagatagctgaggacagaaatcaggttgctgctcaggggcaccaccaggagagacctccggctgaggtcagcttcccagagaggaaggtaagggaccgtccctagctcaggactggcacccaccctgcagagagccacgccttcctcaggagggctctgctggacagagacctgatcaagggcatctcccactccttcaggatggagacaaaaacccaactggtgaccaagagtggtggcttaggcctggaatcccagcacactgggaggccgaagcaggaggatcacttgaggccaggagtttgagacaggcctgggcaacatagcaagacccttgtctctattaaaaatataaaaaatacgccagacgtggtggctcatgcctgtaatcccagcactttggaaggctgaagcaggtggattgcttgagaccaggagtttgagaccagcctggccaacacagagaaaccccatttatgctaaaaatacaaaaatcagcctggtgcggtggcacacccattagtcctagctactcaagaggctgaagcataagaattgtgtgaacccaggaggcggaggttgcagtgagccaagattgggcccctccattccagcctgagagacacagcaacactcttgtcttgataaataaataaataaataaataaataaataaataaataactgtccaggtgtggtggcacagccctgtagtcggagct

SEQ ID NO: 2236 - DNA, 2928 bp, Homo sapiens
ccggtgttgcatccttggagcgagctgagagctcgagtacagaacctgctaaggccatcaaacctattgatcggaagtcagtccatcagatttgctctgggccggtggtaccgagtctaagcactgcggtgaaggagttagtagaaaacagtctggatgctggtgccactaatattgtgctgggattacaggcatgaaccaccgcgcctggcccccgttctccttactggatctaaagcttaaggactatggagtggatctcattgaagtttcaggcaatggatgtggggtagaagaagaaaacttcgaaggcttaactctgaaacatcacacatctaagattcaagagtttgccgacctacctcaggttgaaacttttggctttcggggggaagctctgagctcactttgtgcactgagtgatgtcaccatttctacctgccatgtatcggcgaaggttgggactcgactggtgtttgatcactatgggaaaatcatccagaaaaccccctacccccaccccagagggatgacagtcagtgtgaagcagttattttctacgctacctgtgcaccataaagaatttcaaaggaatattaagaagaaacgtgcctgcttccccttcgccttctgccgtgattgtcagtttcctgaggcctccccagccatgcttcctgtacagcctgcagaactgactcctagaagtaccccaccccacccctgctccttggaggacaacgtgatcactgtattcagctctgtcaagaatggtccaggttcttctagatgatctgcacaaatggttcctctcctccttcctgatgtctgccattagcactggaataaagttcctgctgaaaatccacatctcccctgggtccggtgttctggaagtgagagagacaatgtcacacctcaaggagacagctctctagacaggaaggttattcacgtcccatgtcaagtctagctagagttcagagcaattgagaagtgcgattttatctcctgcctttcattctataccctgcttctgaaccatcgtgttcaactgtgaaactcacgctttggtgaccctgactccaaaacttaatacacccaaggtcagccccagtgatctgcttcatagcgaggactttgggtgggtcttcccagggagtagggcaccctcagagaatgtggctttggacttcatcacagctagggtcttttgtgtcacttcagatctaaacttgtaactgtgctagatctgtttctaatgtgacaacatcacaaaccacgagtccagaagcctaatccataatcctacctcctcatgacgaagtctcatgctctgtgctcaacatggttagctgcacaagatgtaaaccaaagcttcactgaaccctcgacccaaatcggtaactcaagtgcatcaatcataatgaacctccccgaactcagtatttatgattatttttgaggcagggtctcactctgtcgccccggctggagtgcagtggcaggatcagggctccctgcagccccgacctcccaggctccagcgatcctcctgcctcagcctcttgagtagttgggagtagagatgcctcccacatcgcctggctaatttttgtatttttgtggagaggggatatctcgccacgttgccgaggcttgaagccagatcaagcaattgggttccttggatttccgaaatagaccccaatattctgcctttaccccggaggatgcagatgtaccttctctcaggccgatgacctcaggcctccacggtccctggagctctaggaaaggtgggcgcgatctcgcgcccacacccagtgctctgggtcataagcctggatctggaaaaacaaacgcgctttgagaagacggggactccccaggatacccctctctcccctcgtccagcctccagcccacccgattcctccccacatcctccacgtccccaggccccacccacctcctccaactcctccggggaaacccaagccctgcagcgcatggaacagaagaactggaaccgacgcttctggaacaaggctatctgagagcagttcttcctggccctcgggttcatgggacggcataactggaaccaatgcttagggcgcaagggtatgtgagagtgggtcttcccgtacaggaagtagaagatcttttgtttgggggcctcgtcgtcctcctccatgtcattggccagatagctgaggacagaaatcaggttgctgctcaggggcaccaccaggagagacctccggctgaggtcagcttcccagagaggaaggtaagggaccgtccctagctcaggactggcacccaccctgcagagagccacgccttcctcaggagggctctgctggacagagacctgatcaagggcatctcccactccttcaggatggagacaaaaacccaactggtgaccaagagtggtggcttaggcctggaatcccagcacactgggaggccgaagcaggaggatcacttgaggccaggagtttgagacaggcctgggcaacatagcaagacccttgtctctattaaaaatataaaaaatacgccagacgtggtggctcatgcctgtaatcccagcactttggaaggctgaagcaggtggattgcttgagaccaggagtttgagaccagcctggccaacacagagaaaccccatttatgctaaaaatacaaaaatcagcctggtgcggtggcacacccattagtcctagctactcaagaggctgaagcataagaattgtgtgaacccaggaggcggaggttgcagtgagccaagattgggcccctccattccagcctgagagacacagcaacactcttgtcttgataaataaataaataaataaataaataaataaataaataactgtccaggtgtggtggcacagccctgtagtcggagct

SEQ ID NO: 2237 - DNA, 2479 bp, Homo sapiens
cgggcggacgagagagctgcgagctaacgggtccggacgacggcggcggcggcggcggcggcggcgacggctttctgcgcgggcggcggcggcggccggagcggcgagcatggcccgcgcggcgccgggcgctgactgagggtcgtgctgcggcagcctggcgcccgacatgtgaaggggaacctgccaggggattactgtgagctcacagcaggataggctggccccgggggagtggggatgggcagaacctgggccaggagtattaggaaggagacctggaccctggtagggagctcagcacaagctcgcctgacccagatggtattggacacagtgccccgctgaacagcagctgttcccagcgccagaggaccccacagccacagtaggagctttgcgacccctacgcaactgcagctggggctggggccaccaggagaagggaccagcacctcagatgggaagcagaagggcaagacctactgcggaaaggatctcgatctctgcagcggagttttcccacactcacagagcttcctgtttttgtcctctcagggttggggtctggctcccctcctctggcagaggttttgggccaggaggtgggacaacacttgcatggaacccaagtcccctgaagcccctgtgctctctgttgtgattggagttctagggcttccccgctgccgggaacgaggggccgcctcattgtctgctcatgaaccacaaggaccccgactgctccagactggattatttcaagccgccaaagagggggacccctagagctggcagccagcaatcccaagggactagagggctgcaatggactgacctccccctcaccagggtggcaggagaggcagagcctctgtggcctagctagtgacggagagacccgatgaagccctaagcaggggccccgcctgactcagggacaggacagccactcctgccaacgtgtgttctccctacatgagggagggcgtggcaagggacccctgccactgtcccctgctgcagcacgtgcccctatgccctttgcatgtggtgccagaataggcaggctacgccgtggctggcccctcagcgggctgggaaaagagtggccacggtgaccgtcacccgcctgccggcaccatgaagtgctccctgcgggtgtggttcctctccgtggccttcctgctggtgttcatcatgtccctgctcttcacctactcgcaccacagcatggccacgctcccctacctggactcaggggccctggatgggacgcaccgggtgaagctggtgcccggctatgccggcctgcagcgcctcagcaaggagaggctctcgggcaagagctgtgcctgtcgccgctgcatgggcgatgccggtgcctccgactggtttgacagccactttgacggtaacatttcccccgtctggacccgagagaacatggatcttccaccggacgtccagaggtggtggatgatgctgcagccccagttcaagtcacacaacaccaatgaggtgctggagaagctgttccagatagtgcctggcgagaacccctaccgcttccgggacccccaccagtgccggcgctgtgccgtggtggggaactcgggcaacctgcggggctctggctatgggcaggacgtggacgggcacaacttcatcatgaggatgaatcaggcgccaaccgtgggctttgagcaggatgttggcagccgaaccacccaccatttcatgtaccctgagagtgccaagaacctgcccgccaacgtcagcttcgtgctggtgcccttcaaggtcctggaccttctgtggatcgccagcgccttgtccacggggcagatccgattcacctacgccccagtgaagtccttccttcgagtggataaagaaaaggtccagatctacaacccagccttcttcaagtatatccacgacaggtggacagagcatcacgggcggtacccttccacggggatgctggtgcttttctttgccctgcatgtgtgtgatgaggtgaacgtgtacgggttcggggccgacagccggggcaactggcaccactactgggagaacaaccggtacgcgggcgagttccggaagactggcgtgcacgacgcggacttcgaggcccacatcatcgacatgctggccaaggccagcaagatcgaagtctaccggggcaactgagccgggcctcgccgcgacccttccggcccatctatcgggcaccggggctccggcccgggacccaggaccagcaacccgcgaccaatcatgctgcagcccaggggcgtctgctgtgccccgccaatcacgagactgggggaccggccgggcctggcaccaatctgcgctgcggtcgggcggagcttctgtttctcccagccaatcatgtgactcaaggaaaacttccggcgctgtgtccagtctcctccaatcaatggccttcgggggcgggccagcggccgct

SEQ ID NO: 2238 - DNA, 774 bp, Homo sapiens
atgaaggtccatatgcttgtaggtgtgctggtcatggtgggcttcacagtaggaaaggttcctgttcccgacatccggacgtgccacttctgcctcgtagaagacccttctgtaggatgcatttcaggctcagagaagtgtaccatcagcagctcatccctgtgcatggtgatcaccatctattatgatgtcaaggttcgcttcatcgttcgaggctgtggacagtacatttcctaccgctgccaagaaaaacgcaacacctactttgcagagtactggtatcaggcccagtgctgtcagtacgattattgcaactcctggtcaagcccccaactccagagctctctgccggagccccatgacaggcccctggccctgcctctgtctgactcccagattcagtggttctaccaggccctgaacctctccctgcccctccccaatttccatgctgggacggagcctgatggcctggaccccatggtcacactgtccctgaacctgggcttgtcttttgctgagctgcgccgcatgtacttgttcctcaatagttcaggacttttggttcttccccaggctggactcttgacacctcacccttcctgaattccacagtgcaaatatctttctgtaacaccctcagcatcctgcactgccctctctgaaaacacccacattctttggtcactgtgatttcttaggcctccgtctgttgtaccactagcatctatatgacttttgtgtaattttctctcttgaactctggtgctgttt

SEQ ID NO: 2239 - DNA, 1806 bp, Homo sapiens
ccacgcgtccggtgggacagtgtctccaggtagtgaggcccaacctctttaaaacaaacaaacaaacaaacaaaaaaccaaaatgcaaacgtgagtagagaatgaaatacacagtttaaatgccctcactatctttgggttactaatatactaagcctttctggactaagtaaaagatgcaggttcctgcggctagggatagaagccagactggcgtcttcagaatctcccaccaaggctgtacctctggaggagttctaggtttggatttggtcatctcaagaagagtcttcagatggattttaaaattgaacacacttgggatggttttccagtgaagcatgagcccgtatttatcaggctgaatccaggtgacagaggagtgatgatggacattagtgctccatttttcagggatcctccagccccacttggagaaccaggaaaacctttcaatgaactgtgggattatgaagttgtggaagcatttttcttgaatgatataactgagcaatatttagaagttgaactttgtccccacggacagcatttagtgcttttactttctggaagaagaaatgtgtggaaacaagaacttcctttatcgttcagagtgtccagaggagagacaaaatgggaaggcaaagcttatctcccttggagttattttccaccaaatgtgacaaaattcaattcatttgcaattcatggatcaaaagataaacgaagttatgaagctctttaccctgtacctcagcatgaactgcagcaaggacaaaaacctgatttccattgcctagaatacttcaagtctttcaattttaacacactgcttggagaagagtggaaacaaccggaatcagacctgtggctaatagagaaatgtgatatataggagtaatagataaccataccgatcattttttcctctataccttttaagataaacaaaaaataaatatcaattttttaagatgtcatgcatacatttcaacaacaaatatcttcatagaagtcactgaaaatatagtatctgtggcaaattgtatatgattaacaagaaaatatatgattctttgtagatgatttcatctgtaaagtcacaatgtttctcagagtcacttagtccaggatgttgcattcccagcacacagtacagttattcttgaaaactacaagtgaaaaagggggaacaattgaggttgtccaaggccacctagaggactgtcttgcactaccttgtgattcaaccatttcattcctagatatataccccagaaaaatgactgctcatagcagctttattcataatagcacaaaattgtaaacagtgaaatttccatccataggaaaatggatagacaaactacaatatagtcagtggaatactgttcatttaaaaaaggactgctgatacatgcaacaacctgtatgaatctcaaaaacattaagttgagcaaaacaaaccaaacataacatactatctaattacttttatattaaagccacttccaggcaaaactaatatttgatgatagataccagaacagtggctgcttagagtgagggcagggaattcaaattgaatggaaaaggggcctgaggaaattttctggggtgattgaaatgttttgtattttgatctggatgatggttatgtagctgcatatatttgtcaacattcctcatgctgtatgtttagatttgtgattttactatatgtaaattaattccttaataaaatactattataaaataagctgtaaattaaatggaattaacttcaagtttaaaaaaaaaaaaaaa

SEQ ID NO: 2240 - DNA, 1124 bp, Homo sapiens
aaatgcacaacccggacggaagtgcctctccgacagcagatccaggctcggagctccagacgctgggacaggccgcccgcagaccacccccgccgcgcgcgggacacgacgccccccgcaggacacgcccatcagcccggaaacccctgagctgcttctcccggaggccgatgcccacccgggagcccccaaagactcgcggctcccgggggcacctgcatactcacccgcctgggcctgggcccccgctgcagggactggcgccccgaggcctcaaaaccagcgccccccgccctccgtgccagccccagccgggaccccacaaggcaaagaccaagaagattgtgtttgaggatgagttgctctcccaggccctcctgggcgccaagaagcctattggagccatccctaaggggcataagcctaggccccacccagtgcccgactatgagcttaagtacccgccagtgagcagtgagagggaacggagccgctatgtcgcagtgttccaggaccagtacggagagttcttggagctccagcacgaggtggggtgtgcacaggcaaagctcaggcagctggaggccctgctgagctccctgcccccaccccaaagccagaaggaggcccaagttgcagcccgggtttggagggagtttgagatgaagcgaatggatcctggcttcctggacaagcaggctcgctgccactacctgaagggtaaactgaggcatctcaagactcagatccagaaattcgatgaccaaggagacagcgagggctccgtgtacttctaagtgcccctgcagatgggcagagggatgcatggggatgcaggtcccttgcatttcttggtatctctcagcttttcctcttgcagctccccctaccaggggtcgctttctcctggattgcaaatgcctcttcagtttggactcagctctgacagcccctcctccaggaaggccttccaggacttcctcctctgggtcctctagctctgaccctacagggactccagatctcaacctgttccctggaagtagggcctgctctccatcccagtgaaataaacatgtattagacacctaaaaaaaaaaaaaaaaaaaaaaaaaaaaaaaaaa

SEQ ID NO: 2241 - DNA, 928 bp, Homo sapiens
cgagcccgtgcgggccctttaagggccgggggcgtgtagcgggcccgccccctccccgcggcgcccgcagtccgttaagtgcgagccccggcgcaggggccggatctggccgggggccggcggcggtgtgggagcggcgcgtcatgtacaccatcaccaaggggcccagcaagctggtcgcgcagcgccgcacaggtcccacgcagcagcaggtggagggccggctcggcgagctcctgaaatgccggcagcccgcgccgccgacctcgcagcccccgcgggcgcagccctttgcgcagccgccgggaccctggcccctgtcgagtccagggccaaggcttgtgttcaatcgtgtgaatggccggcgggccccctccacgtccccatccttcgaggggacccaggagacctacacagtggcccacgaggagaatgtccgctttgtgtccgaagcctggcagcaggtgcaacagcagctggatggtggcccagccggtgagggcgggccaaggcctgtgcagtacgtggagaggacccccaatccccggctgcagaactttgtgcccattgacctagacgagtggtgggcgcagcagttcctggcgagaatcaccagctgttcctagtggctgctgggagggggcgctgctacacggccgacctgtcgccaggagagaagcatggcgccctgcccacccactgcgcctggctgggtgccggccacacctgaagtgccagcatttggacttttgcacctttttttcccttggcccggctgtcccaaccaagctgccatggccaagggccgaacccgtctgacctcagccctgctcactgtgcccagggaccagcgaccagcccctggggctggcagggaggagctccaggctaataaagtggagaaactgtcaaaaaaaaaaaaaaaaaa

SEQ ID NO: 2242 - DNA, 4462 bp, Homo sapiens
cgcagcggaggaaagaggatggcgacctcgtcgatgccggagtcagagaggaacgtggctacgaaagcctcggagtgaagttcccagaccctacgccccgctgtcaggcagcccgccgatcagatggaggagaacgaggtggagagcagcagcgacgcggcccctgggcctggccggcccgaggagccctctgagagcggcctgggtgtgggcacctcagaagccgtgtccgccgacagcagcgacgccgcggccgccccggggcaggcagaggccgatgactctggcgtggggcaaagctcggaccgcggcagccgttctcaggaggaggtatctgagagcagctcgagcgcagaccccctgcctaatagctacctccctgattcatcgtctgtgtctcatgggccagtggcaggggtgacaggcggtcccccagcacttgtgcactctagtgcactcccagaccccaacatgctggtgtccgactgcacagcttcctcctcggacctgggctcggccatcgacaagatcatcgagtccaccatcgggcccgacctcatccagaactgcatcactgtgaccagtgctgaggatggcggggccgagaccacacggtacctgatcctacagggcccagatgatggagcccccatgacatcaccaatgtccagttccaccttggcccacagcctagcagccattgaggccctggcagatggccccacatccacatccacatgcctggaggcacagggtgggcccagctccccggtgcagctgcccccagcctccggtgccgaagagccggacctgcagagcctggaggccatgatggaggtggtggtggtgcagcagttcaaatgcaagatgtgccagtaccggagcagcaccaaggccacactgctgcgccacatgcgggaacgccacttccgtccagtagcagcagccgcagcagcagctggtaaaaaaggacgtctacggaagtggagcacctccaccaagagccaagaggaagagggaccagaggaggaggacgatgatgacattgtagacgctggagccattgatgacctggaggaggatagcgactataatccagctgaggatgagccccgaggccggcagcttcggctccagcgccccacccccagtaccccaaggccccgaaggagacctggccggccccggaagctgccccgcctggagatctcagacctcccagatggtgtggaaggagagcctctagtgagttcccagagtggacagagccctccagagccacaggatcccgaggctcccagctcctcaggcccaggacacctggtggccatgggcaaggtgagcaggacccctgtggaagctggtgtgagccagtcagatgcagagaacgcagccccctcctgcccggatgagcatgacactctgccccggcgccgaggtcgaccttccaggcgcttcctaggcaagaaataccgcaagtactattacaagtcgcccaaaccacttttgaggcccttcctgtgccgcatctgtggttctcgctttctgtcccacgaggacctgcgcttccacgtcaactcccatgaggctggcgatccccagctcttcaagtgcctgcagtgcagctatcgttcccgccgctggtcctcgctcaaggagcacatgttcaaccacgtgggcagcaagccctacaagtgtgacgagtgcagctacaccagtgtctaccggaaggacgtcattcggcacgccgctgtgcacagccgggaccggaagaagaggccagatccgactccaaagctgagctctttcccctgccctgtgtgtggccgtgtgtaccccatgcagaaaagactcacgcagcacatgaagacgcacagcactgagaagccccacatgtgtgacaagtgtggaaagtcctttaagaagcgctacaccttcaaaatgcacctgctcacgcacatccaggctgttgccaaccgcaggttcaagtgtgagttctgtgagtttgtttgtgaagacaagaaggcactgctgaaccaccagttgtcccacgtcagtgacaagcccttcaaatgcagcttttgtccctaccgcaccttccgagaggacttcttgctgtcccatgtggctgtcaagcacacaggggccaagcccttcgcctgtgagtactgccacttcagcacacggcacaagaagaacctgcgcctgcacgtacggtgccgacacgcaagcagcttcgaggaatgggggaggcgccaccctgaggagcccccctcccgccgtcgccccttcttctctctgcagcagattgaggagctgaagcagcagcacagtgcggcccctggaccacctcccagttccccaggacctcctgagatacccccagaggcgacaactttccagtcatctgaggctccctcattgctctgttctgacaccctgggcggcgccaccatcatctaccagcaaggagctgaggagtcgacagcgatggccacgcagacagccttggatcttctgctgaacatgagtgctcagcgggaactggggggcacagccctgcaggtggctgtggtgaagtcggaagatgtggaagcagggttagcatcccctggtgggcagccctcccctgaaggtgccactccacaggtggtcaccctccacgtggcagagccagggggcggtgcagcagccgagagccagctaggccctcctgacctaccgcagatcaccctggcacctggtccatttggtgggactggctacagtgtcatcacagcaccccctatggaggagggaacatcagctcctggcacaccttacagcgaggagcccgcaggagaggcagcccaggctgtggttgtgagtgacaccctaaaagaagctggcacccactacatcatggctactgatggtacccagttgcaccacattgagctcaccgcagatggctccatctccttcccaagtccagatgctctggcctctggtgccaaatggcccctgctgcagtgtgggggactgcccagagacggccctgagcccccatctccagccaagacccactgcgtaggggactcccagagctctgcctcctcacctcctgcaaccagcaaagccctgggcctggcagtgcccccgtcaccgccatctgcagccactgctgcatcaaagaagttttcctgcaagatctgtgccgaggccttccctggccgagctgagatggagagtcacaagcgggcccacgctgggcctggtgccttcaagtgccccgactgccccttcagtgcccgccagtggcccgaggtccgggcgcacatggcacagcactcaagcctacggccccaccagtgtagccagtgcagctttgcctccaagaacaagaaggacctgcgtcggcacatgctgactcacacaaaggagaagccttttgcatgccacctctgcgggcagcgtttcaaccgtaacgggcacctcaagttccacatccagcggctgcacagtcctgatgggaggaagtcaggaacccctacagcccgggcccctacccagaccccaacccagaccatcatcctgaacagtgatgacgaaacactggccaccctgcacactgcactccagtccagtcacggggtcctgggcccagagcggctacagcaggcactgagccaggaacacatcatcgttgcccaggaacagacagtgaccaatcaggaggaagccgcctacatccaagagatcaccacggcagatggccagaccgtacagcacctggtgacctccgacaaccaggtgcagtatatcatctcccaggatggtgtccagcacctgctcccccaggaatatgttgtggtccctgaaggccatcacatccaggtacaggagggccagatcacacacatccagtatgaacaaggagccccgttccttcaggagtcccagatccagtatgtgcctgtgtccccaggccagcagcttgtcacacaggctcaacttgaggctgcagcacactcagctgtcacagcagtggctgatgctgccatggcccaagcccagggcctgtttggtacagacgagacagtgcccgaacacattcaacagctgcagcaccagggcatcgagtacgacgtcatcaccctggccgatgactgagccccgagggcccaacacagatcatggatttgcggccagctctcctgggggtagggggccaccaggactcacctccctcttcatttaggatctccagatactggatagccagcatcctctcattcccagggagccagacctgtgctgttggggttaggggcagccatgggccccagccaggacatgctgggtgccccagcctgcaggcaggctttgggagagaaatttatttttgtttgggtggacccactggcctgtcagtctcaataaagggaccggagtccagtcctgaacagcttaaaaaaaaaaa

SEQ ID NO: 2243 - DNA, 2567 bp, Homo sapiens
ctccggcgcagtgttgggactgtctgggtatcggaaagcaagcctacgttgctcactattacgtataatccttttcttttcaagatgcctgaggaagtgcaccatggagaggaggaggtggagacttttgcctttcaggcagaaattgcccaactcatgtccctcatcatcaataccttctattccaacaaggagattttccttcgggagttgatctctaatgcttctgatgccttggacaagattcgctatgagagcctgacagacccttcgaagttggacagtggtaaagagctgaaaattgacatcatccccaaccctcaggaacgtaccctgactttggtagacacaggcattggcatgaccaaagctgatctcataaataatttgggaaccattgccaagtctggtactaaagcattcatggaggctcttcaggctggtgcagacatctccatgattgggcagtttggtgttggcttttattctgcctacttggtggcagagaaagtggttgtgatcacaaagcacaacgatgatgaacagtatgcttgggagtcttctgctggaggttccttcactgtgcgtgctgaccatggtgagcccattggcaggggtaccaaagtgatcctccatcttaaagaagatcagacagagtacctagaagagaggcgggtcaaagaagtagtgaagaagcattctcagttcataggctatcccatcaccctttatttggagaaggaacgagagaaggaaattagtgatgatgaggcagaggaagagaaaggtgagaaagaagaggaagataaagatgatgaagaaaaacccaagatcgaagatgtgggttcagatgaggaggatgacagcggtaaggataagaagaagaaaactaagaagatcaaagagaaatacattgatcaggaagaactaaacaagaccaagcctatttggaccagaaaccctgatgacatcacccaagaggagtatggagaattctacaagagcctcactaatgactgggaagaccacttggcagtcaagcacttttctgtagaaggtcagttggaattcagggcattgctatttattcctcgtcgggctccctttgacctttttgagaacaagaagaaaaagaacaacatcaaactctatgtccgccgtgtgttcatcatggacagctgtgatgagttgataccagagtatctcaattttatccgtggtgtggttgactctgaggatctgcccctgaacatctcccgagaaatgctccagcagagcaaaatcttgaaagtcattcgcaaaaacattgttaagaagtgccttgagctcttctctgagctggcagaagacaaggagaattacaagaaattctatgaggcattctctaaaaatctcaagcttggaatccacgaagactccactaaccgccgccgcctgtctgagctgctgcgctatcatacctcccagtctggagatgagatgacatctctgtcagagtatgtttctcgcatgaaggagacacagaagtccatctattacatcactggtgagagcaaagagcaggtggccaactcagcttttgtggagcgagtgcggaaacggggcttcgaggtggtatatatgaccgagcccattgacgagtactgtgtgcagcagctcaaggaatttgatgggaagagcctggtctcagttaccaaggagggtctggagctgcctgaggatgaggaggagaagaagaagatggaagagagcaaggcaaagtttgagaacctctgcaagctcatgaaagaaatcttagataagaaggttgagaaggtgacaatctccaatagacttgtgtcttcaccttgctgcattgtgaccagcacctacggctggacagccaatatggagcggatcatgaaagcccaggcacttcgggacaactccaccatgggctatatgatggccaaaaagcacctggagatcaaccctgaccaccccattgtggagacgctgcggcagaaggctgaggccgacaagaatgataaggcagttaaggacctggtggtgctgctgtttgaaaccgccctgctatcttctggcttttcccttgaggatccccagacccactccaaccgcatctatcgcatgatcaagctaggtctaggtattgatgaagatgaagtggcagcagaggaacccaatgctgcagttcctgatgagatcccccctctcgagggcgatgaggatgcgtctcgcatggaagaagtcgattaggttaggagttcatagttggaaaacttgtgcccttgtatagtgtccccatgggctcccactgcagcctcgagtgcccctgtcccacctggctccccctgctggtgtctagtgtttttttccctctcctgtccttgtgttgaaggcagtaaactaagggtgtcaagccccattccctctctactcttgacagcaggattggatgttgtgtattgtggtttattttattttcttcattttgttctgaaattaaagtatgcaaaataaagaatatgccgttttaaaaaaaaaaaaaaaaaaaaaaaaaaaaa

SEQ ID NO: 2244 - DNA, 4623 bp, Homo sapiens
gatgctgggccaggagctttgtgtacacccctccacttcagctgagccagggcatgtctgcggcccaggccagggcgcagtgtgtgccctgggggcccaggcctgcatggctcctctgggtagggggtcgggggcacccccaaggatggtcccttagggtgatgttttggctttggggtgacttcagcaatgtccctgcgagacaagggcggggaagaagaatgttttgaatacgactgccaggatgaagagaggaagccaacccacaggcagcatgacacccaggacctcttggaagaggttttatgtgctgaaagagttggccagatgactaagacatataatgacatagatgctgtcactcggcttcttgaggagaaagagcgggatttagaattggccgctcgcatcggccagtcgttgttgaagaagaacaagaccctaaccgagaggaacgagctgctggaggagcaggtggaacacatcagggaggaggtgtctcagctccggcatgagctgtccatgaaggatgagctgcttcagttctacaccagcgctgcggaggagagtgagcccgagtccgtttgctcaaccccgttgaagaggaatgagtcgtcctcctcagtccagaattactttcatttggattctcttcaaaagaagctgaaagaccttgaagaggagaatgttgtacttcgatccgaggccagccagctgaagacagagaccatcacctatgaggagaaggagcagcagctggtcaatgactgcgtgaaggagctgagggatgccaatgtccagattgctagtatctcagaggaactggccaagaagacggaagatgctgcccgccagcaagaggagatcacacacctgctatcgcaaatagttgatttgcagaaaaaggcaaaagcttgcgcagtggaaaatgaagaacttgtccagcatctgggggctgctaaggatgcccagcggcagctcacagccgagctgcgtgagctggaggacaagtacgcagagtgcatggagatgctgcatgaggcgcaggaggagctgaagaacctccggaacaaaaccatgcccaataccacgtctcggcgctaccactcactgggcctgtttcccatggattccttggcagcagagattgagggaacgatgcgcaaggagctgcagttggaagaggccgagtctccagacatcactcaccagaagcgtgtctttgagacagtaagaaacatcaaccaggttgtcaagcagagatctctgaccccttctcccatgaacatccccggctccaaccagtcctcggccatgaactccctcctgtccagctgcgtcagcaccccccggtccagcttctacggcagcgacataggcaacgtcgtcctcgacaacaagaccaacagcatcattctggaaacagaggcagccgacctgggaaacgatgagcggagtaagaagccggggacgccgggcaccccaggctcccacgacctggagacggcgctgaggcggctgtccctgcgccgggagaactacctctcggagaggaggttctttgaggaggagcaagagaggaagctccaggagctggcggagaagggcgagctgcgcagcggctccctcacacccactgagagcatcatgtccctgggcacgcactcccgcttctccgagttcaccggcttctctggcatgtccttcagcagccgctcctacctgcctgagaagctccagatcgtgaagccgctggaaggttccgccacacttcaccactggcagcagttggcccaacctcaccttgggggcatcctggacccccggcccggtgtggtcaccaagggcttccggacgctggatgttgacctggacgaagtgtactgccttaacgactttgaagaagatgacacaggtgaccacatttctctcccacgcctagctacctccactccagttcagcacccagagacctcaggtgagaggtcccaagcacgtgtgactgtctcaggcagcagaagttacccgagccggcctcaggcttccccagaggagatgcaggagccgccagcggccacggaggaggaggaggaggaggaggaggaggaggggtctggtgagggcaccacgataagtcctgtaaacttggcacctttcccggaggcagagttttgggccattctcacctctgttccaggcaccatccgtagtggttctctgtctgtagcttccgctcgtctgtgtgggtgatgattaaagcattctcattgcacagttctgtttttaaatacagagtctgatgcctcctatttgtaacaatgggtgtagctcccctgcccatcttggaggtgcatggcccatcagggatctttaaagtgggagcaggaaaggctgctaaaaaaaaaaaaaaaaaaagtgggcttttgggtccctgaaaacatcagtgcccttcttcctggtctgggtgtctccctgagtctaaggggaagattctcaagtcccctggtgatttccaagtggagctgagcagttttagggaaattgagtgctgggtcattcagaaggtaaatgagatcatctgttacctgtacgctgtattaaaatagaaccaggaaaggctcaggatttcagacatttcgtcagccttttcactttcccagcttcaatggaggtatatatgtcattttcttttcagcttacacatgtgttcaaagtggatttttaaaaagtgttttagcaatactccttaaccaaataaaccttcggagaacatcactaagcttttccagagagaagaccctagatgaagttggaaaagagctctggctgactccacccactgtccccaagcattaaaggtgtggccatgagtttacagaattacccacattccagttgccactgggatgaaaagctttgtgctcagagctctgggaatcatgggatcacatggttactgtttaccccaacagcatgctctgtctagactggacctcccagccccttgtgttgggaaggcaaagcttttgtggagtcaggggggagactgagaaaaaatgaattaaccctgtgttgtcatcctcatgacattcctgaggattcaccaggttagaagtgaggacgtttatctttgtgattcataattttcatttgtgaaggccacaacactccccttgaaatacagggcaggaaagagctgaggttcttggtggtgtctcccattcccctggctaatttcagacagctgtggtcaagggattttacttgggatcaacttttccttttttccttgacattaattttagagaagtcatcaagtcatgtgatttgtttagcacataggcttatttatggtttgattttttttaggcagttatattactagattaagcttgtgagggaatgaaaatgttttttatttgttatctacacactcgaaaaagagaaaccagctgcggtactgtcccatttttgtcatcagcaccagtgtccgtcaggaaggcaggtggtggtgcagaaacatgatgcctggctgattttcgtggctaaaggggtaggccttatgttgattgggatgctcccctacagccttacaggtagaatagaaggtgagttctggaagtgcaaagaagcaccattaagtgcatcttctagaagttgtacagaaggactaaagcttatcaagtcaacaaagaacttaccttggaggatagagagagagaagggaccaattatgaggactgacatcctggccactctccttaaaataaacactgacatttttcttgcttgttctctctgtactcaaacctgtggcaaattcatcctagcaacgttatttgacgaggggcatgaacatttatagttgaaactgtagaaagggtcaggttggaggtgtgtaataaaaaagaattacctaggttgccaaaggtaatttaggaagggtctgatcatttagatgagagttctttggggcttattttctgggtaaggctcatctttaaaaactggcttcagaggggagaggggagaacaatgaattggctctattttctctattgggaattacaggaccattttgattcttagaatgtaaaaagcatatcgctaagtaaatcatcctggaggtcccaagtagctctatgcctgcaatcatggagacacaggcagacagataagcttcatggggaaggcatggggcatcctctgtcttgggatttgtatccatggtggtctggtccctgccttttaatccgtcctctacgcttgggcttttctgttaccaaacagcactatcccaggaactattgtctgcctgggaacactcagtagggagacactttggagacaggaggtgatgaacctttttatgtgcagctggtatgatagaaggaaattgggaaaacttgtatgctaggcacttttgtccagagcctgctgtcccatggagaaaaagttttaagcactgaaaaaatttgattaatgtatttaaatgtattatttgaagcatcattcacttgttgatttttacaatcccatgtcttaaaaaggatgaatccatgttattgtattgtaaataatttagattattaaaatggattgtttaaaaaaaaaaaaaaaaaa

SEQ ID NO: 2245 - DNA, 1044 bp, Homo sapiens
tccagtttccagttccggcctccaaggggcgggcagaagttggaaacatgcggctgtcggtcgctgcagcgatctcccatggccgcgtatttcgccgtatgggcctcggtcccgagtcccgcatccatctgttgcggaacttgctcacagggctggtgcggcacgaacgcatcgaggcaccatgggcgcgtgtggacgaaatgaggggctacgcggagaagctcatcgactatgggaagctgggagacactaacgaacgagccatgcgcatggctgacttctggctcacagagaaggatttgatcccaaagctgtttcaagtactggcccctcggtacaaagatcaaactgggggctacacaagaatgctgcagatcccaaatcggagtttggatcgggccaagatggcagtgatcgagtataaagggaattgcctcccacccctgcctctgcctcgcagagacagccaccttacactcctaaaccagctgctgcagggtttgcggcaggacctcaggcaaagccaggaagcaagcaaccacagctcccacacagctcaaacaccagggatttaactggatctgaagagtctgcagcccttaatcagtacccatgatcacaggcctttggagcacttttactctctgagaagaactggagctagagatgtaaaatggacagtcttgatggggttgagaaccttctggggagccagatgaccctctctttgcacaatagataaaagtctttatatgaatatatataaatttatttattttttccttcctgtgggatttctggagaatgagaattatccaaatgctcagtctacctgagatagtaaattcatggcttatgcttctggtccttaaatttgggttatttttggttagtgcaattttgtttttcttaatgccagtttacatgggaatgcatcctataattccaaatgttgccagaggtggttgtgttttgacatctggtctcctagagatgagtgcttgggatttcttagagaaagattacttcctgacaggggtaggg

SEQ ID NO: 2246 - DNA, 2682 bp, Homo sapiens
cagcggcctttgcggttccaacatggcggagctgacggtggaggttcgcggctctaacggggctttctacaagggatttatcaaagatgttcatgaagactcccttacagttgtttttgaaaataattggcaaccagaacgccaggttccatttaatgaagttagattaccaccaccacctgatataaaaaaagaaattagtgaaggagatgaagtagaggtatattcaagagcaaatgaccaagagccatgtgggtggtggttggctaaagttcggatgatgaaaggagaattttatgtcattgaatatgctgcttgtgacgctacttacaatgaaatagtcacatttgaacgacttcggcctgtcaatcaaaataaaactgtcaaaaaaaataccttctttaaatgcacagtggatgttcctgaggatttgagagaggcgtgtgctaatgaaaatgcacataaagattttaagaaagcagtaggagcatgcagaattttttaccatccagaaacaacacagctaatgatactgtctgccagtgaagcaactgtgaagagagtaaacatcttaagtgacatgcatttgcgaagtattcgtacgaagttgatgcttatgtccagaaatgaagaggccactaagcatttagaatgcacaaaacaacttgcagcagcttttcatgaggaatttgttgtgagagaagatttaatgggcctggcaataggaacacatggtagtaacatccagcaagctaggaaggttcctggagttaccgccattgagctagatgaagatactggaacattcagaatctacggagagagtgctgatgctgtaaaaaaggctagaggtttcttggaatttgtggaggattttattcaggttcctaggaatctcgttggaaaagtaattggaaaaaatggcaaagttattcaagaaatagtggacaaatctggtgtggttcgagtgagaattgaaggggacaatgaaaataaattacccagagaagacggtatggttccatttgtatttgttggcactaaagaaagcattggaaatgtgcaggttcttctagagtatcatattgcctatctaaaggaagtagaacagctaagaatggaacgcctacagattgatgaacagctgcgacagattggttctaggtcttatagcggaagaggcagaggtcgtcggggacctaattacacctccggttatggtacaaattctgagctgtctaacccctctgaaacggaatctgagcgtaaagacgagctgagtgattggtcattggcaggagaagatgatcgagacagccgacatcagcgtgacagcaggagacgcccaggaggaagaggcagaagtgtttcagggggtcgaggtcgtggtggaccacgtggtggcaaatcctccatcagttctgtgctcaaagatccagacagcaatccatacagcttacttgataatacagaatcagatcagactgcagacactgatgccagcgaatctcatcacagtactaaccgtcgtaggcggtctcgtagacgaaggactgatgaagatgctgttctgatggatggaatgactgaatctgatacagcttcagttaatgaaaatgggctaggcaaaagatgtgattgaagagcatggtccttcagaaaaggcaataaacggcccaactagtgcttctggcgatgacatttctaagctacagcgtactccaggagaagaaaagattaataccttaaaagaagaaaacactcaagaagcagcagtcctgaatggtgtttcataaactgaagaagttcctagtttacagttcttttacattacatttacaatagtgcttgtacaagcttgccaaagatagaatatggatcgccagtctttacatcgcactttcagttcctccatttggaattcaaaaaggggagggatcctgaagaaatcatatgttaaacatactttgacacctactgtgttataaaatatatcatcagatgtgccttgagaatagtatatgtaacattaaaaaaaagttgctggctataggaaatgttattttgttttcaaaatatggcagagatggggggtggtgggtggggtgggatccctaacgtaatattctttatgaaagcattagctgcttttgttacatttttaatatgcaaccacttcttcacctgaggaaaactagaatgaaatgcagtctaaaatattttgcactgaattgtaatttcttcattagtttagtctggaaactggtctgttttaatgtgttttttaaatgctgtatgtagaggaaaatctgcagaccactggaatacatttgttaaactctcatctgcagggacactgggcgatacttggcagtgactgttctaccttgaggctttgtttggtttatttattaaagtgtacagtatttaaaaatcaaacatagctttagttaaaacactaagctgaattagtcatgtccattcagacataacctgaactactgaaaagatcaatttccagaaggtttattctgtataaactacatgttagtcttcagtagagtatcttttttttttccttttttttttttttatttcggttgtttgatgtgcaatatgtttttgtatgcaggtagtaaataaactttgatcttccatttgctgaaaaaaaaaaaaaaaaaa

SEQ ID NO: 2247 - DNA, 3118 bp, Homo sapiens
cagcggcctttgcggttccaacatggcggagctgacggtggaggttcgcggctctaacggggctttctacaagtcaattcacaatgaatcaaatgtccccattttggaactctgaagtatttataattgatctctatacatatctacaatctactgcttgtttctacttagactttgactccattactcattttgcctcacaaagtgagttggtactttgacaaaggttggaaaggacactagccacctgtgtgtgcactgaaatcatgtacgcttgaacatttggaattttatgtccagccataatccacttgcatatgcactttgtggaaactgtggtcttcagaactctggaagaatgagaatggcggagtggaaaagagtcctggatttgaagtaaacagatgagaattctagggatttatcaaagatgttcatgaagactcccttacagttgtttttgaaaataattggcaaccagaacgccaggttccatttaatgaagttagattaccaccaccacctgatataaaaaaagaaattagtgaaggagatgaagtagaggtatattcaagagcaaatgaccaagagccatgtgggtggtggttggctaaagttcggatgatgaaaggagaattttatgtcattgaatatgctgcttgtgacgctacttacaatgaaatagtcacatttgaacgacttcggcctgtcaatcaaaataaaactgtcaaaaaaaataccttctttaaatgcacagtggatgttcctgaggatttgagagaggcgtgtgctaatgaaaatgcacataaagattttaagaaagcagtaggagcatgcagaattttttaccatccagaaacaacacagctaatgatactgtctgccagtgaagcaactgtgaagagagtaaacatcttaagtgacatgcatttgcgaagtattcgtacgaagttgatgcttatgtccagaaatgaagaggccactaagcatttagaatgcacaaaacaacttgcagcagcttttcatgaggaatttgttgtgagagaagatttaatgggcctggcaataggaacacatggtagtaacatccagcaagctaggaaggttcctggagttaccgccattgagctagatgaagatactggaacattcagaatctacggagagagtgctgatgctgtaaaaaaggctagaggtttcttggaatttgtggaggattttattcaggttcctaggaatctcgttggaaaagtaattggaaaaaatggcaaagttattcaagaaatagtggacaaatctggtgtggttcgagtgagaattgaaggggacaatgaaaataaattacccagagaagacggtatggttccatttgtatttgttggcactaaagaaagcattggaaatgtgcaggttcttctagagtatcatattgcctatctaaaggaagtagaacagctaagaatggaacgcctacagattgatgaacagctgcgacagattggttctaggtcttatagcggaagaggcagaggtcgtcggggacctaattacacctccggttatggtacaaattctgagctgtctaacccctctgaaacggaatctgagcgtaaagacgagctgagtgattggtcattggcaggagaagatgatcgagacagccgacatcagcgtgacagcaggagacgcccaggaggaagaggcagaagtgtttcagggggtcgaggtcgtggtggaccacgtggtggcaaatcctccatcagttctgtgctcaaagatccagacagcaatccatacagcttacttgataatacagaatcagatcagactgcagacactgatgccagcgaatctcatcacagtactaaccgtcgtaggcggtctcgtagacgaaggactgatgaagatgctgttctgatggatggaatgactgaatctgatacagcttcagttaatgaaaatgggctagtcacagttgcagattatatttctagagctgagtctcagagcagacaaagaaacctcccaagggaaactttggctaaaaacaagaaagaaatggcaaaagatgtgattgaagagcatggtccttcagaaaaggcaataaacggcccaactagtgcttctggcgatgacatttctaagctacagcgtactccaggagaagaaaagattaataccttaaaagaagaaaacactcaagaagcagcagtcctgaatggtgtttcataaactgaagaagttcctagtttacagttcttttacattacatttacaatagtgcttgtacaagcttgccaaagatagaatatggatcgccagtctttacatcgcactttcagttcctccatttggaattcaaaaaggggagggatcctgaagaaatcatatgttaaacatactttgacacctactgtgttataaaatatatcatcagatgtgccttgagaatagtatatgtaacattaaaaaaaagttgctggctataggaaatgttattttgttttcaaaatatggcagagatggggggtggtgggtggggtgggatccctaacgtaatattctttatgaaagcattagctgcttttgttacatttttaatatgcaaccacttcttcacctgaggaaaactagaatgaaatgcagtctaaaatattttgcactgaattgtaatttcttcattagtttagtctggaaactggtctgttttaatgtgttttttaaatgctgtatgtagaggaaaatctgcagaccactggaatacatttgttaaactctcatctgcagggacactgggcgatacttggcagtgactgttctaccttgaggctttgtttggtttatttattaaagtgtacagtatttaaaaatcaaacatagctttagttaaaacactaagctgaattagtcatgtccattcagacataacctgaactactgaaaagatcaatttccagaaggtttattctgtataaactacatgttagtcttcagtagagtatcttttttttttccttttttttttttttatttcggttgtttgatgtgcaatatgtttttgtatgcaggtagtaaataaactttgatcttccatttgctgaaaaaaaaaaaaaaaaaa

SEQ ID NO: 2248 - DNA, 2774 bp, Homo sapiens
cagcggcctttgcggttccaacatggcggagctgacggtggaggttcgcggctctaacggggctttctacaagggatttatcaaagatgttcatgaagactcccttacagttgtttttgaaaataattggcaaccagaacgccaggttccatttaatgaagttagattaccaccaccacctgatataaaaaaagaaattagtgaaggagatgaagtagaggtatattcaagagcaaatgaccaagagccatgtgggtggtggttggctaaagttcggatgatgaaaggagaattttatgtcattgaatatgctgcttgtgacgctacttacaatgaaatagtcacatttgaacgacttcggcctgtcaatcaaaataaaactgtcaaaaaaaataccttctttaaatgcacagtggatgttcctgaggatttgagagaggcgtgtgctaatgaaaatgcacataaagattttaagaaagcagtaggagcatgcagaattttttaccatccagaaacaacacagctaatgatactgtctgccagtgaagcaactgtgaagagagtaaacatcttaagtgacatgcatttgcgaagtattcgtacgaagttgatgcttatgtccagaaatgaagaggccactaagcatttagaatgcacaaaacaacttgcagcagcttttcatgaggaatttgttgtgagagaagatttaatgggcctggcaataggaacacatggtagtaacatccagcaagctaggaaggttcctggagttaccgccattgagctagatgaagatactggaacattcagaatctacggagagagtgctgatgctgtaaaaaaggctagaggtttcttggaatttgtggaggattttattcaggttcctaggaatctcgttggaaaagtaattggaaaaaatggcaaagttattcaagaaatagtggacaaatctggtgtggttcgagtgagaattgaaggggacaatgaaaataaattacccagagaagacggtatggttccatttgtatttgttggcactaaagaaagcattggaaatgtgcaggttcttctagagtatcatattgcctatctaaaggaagtagaacagctaagaatggaacgcctacagattgatgaacagctgcgacagattggttctaggtcttatagcggaagaggcagaggtcgtcggggacctaattacacctccggttatggtacaaattctgagctgtctaacccctctgaaacggaatctgagcgtaaagacgagctgagtgattggtcattggcaggagaagatgatcgagacagccgacatcagcgtgacagcaggagacgcccaggaggaagaggcagaagtgtttcagggggtcgaggtcgtggtggaccacgtggtggcaaatcctccatcagttctgtgctcaaagatccagacagcaatccatacagcttacttgataatacagaatcagatcagactgcagacactgatgccagcgaatctcatcacagtactaaccgtcgtaggcggtctcgtagacgaaggactgatgaagatgctgttctgatggatggaatgactgaatctgatacagcttcagttaatgaaaatgggctagtcacagttgcagattatatttctagagctgagtctcagagcagacaaagaaacctcccaagggaaactttggctaaaaacaagaaagaaatggcaaaagatgtgattgaagagcatggtccttcagaaaaggcaataaacggcccaactagtgcttctggcgatgacatttctaagctacagcgtactccaggagaagaaaagattaataccttaaaagaagaaaacactcaagaagcagcagtcctgaatggtgtttcataaactgaagaagttcctagtttacagttcttttacattacatttacaatagtgcttgtacaagcttgccaaagatagaatatggatcgccagtctttacatcgcactttcagttcctccatttggaattcaaaaaggggagggatcctgaagaaatcatatgttaaacatactttgacacctactgtgttataaaatatatcatcagatgtgccttgagaatagtatatgtaacattaaaaaaaagttgctggctataggaaatgttattttgttttcaaaatatggcagagatggggggtggtgggtggggtgggatccctaacgtaatattctttatgaaagcattagctgcttttgttacatttttaatatgcaaccacttcttcacctgaggaaaactagaatgaaatgcagtctaaaatattttgcactgaattgtaatttcttcattagtttagtctggaaactggtctgttttaatgtgttttttaaatgctgtatgtagaggaaaatctgcagaccactggaatacatttgttaaactctcatctgcagggacactgggcgatacttggcagtgactgttctaccttgaggctttgtttggtttatttattaaagtgtacagtatttaaaaatcaaacatagctttagttaaaacactaagctgaattagtcatgtccattcagacataacctgaactactgaaaagatcaatttccagaaggtttattctgtataaactacatgttagtcttcagtagagtatcttttttttttccttttttttttttttatttcggttgtttgatgtgcaatatgtttttgtatgcaggtagtaaataaactttgatcttccatttgctgaaaaaaaaaaaaaaaaaa

SEQ ID NO: 2249 - DNA, 1360 bp, Homo sapiens
agtaccccgtctcgctcggttccgcggcggccacgctccgggagacttccggcagggcgggcgcggggtcttggcgaacggtcttcggaagcggcggcggcgcgatgaccacgctacgggcctttacctgcgacgacctgttccgcttcaacaacattaacttggatccacttacagaaacttatgggattcctttctacctacaatacctcgcccactggccagagtatttcattgttgcagaggcacctggtggagaattaatgggttatattatgggtaaagcagaaggctcagtagctagggaagaatggcacgggcacgtcacagctctgtctgttgccccagaatttcgacgccttggtttggctgctaaacttatggagttactagaggagatttcagaaagaaagggtggattttttgtggatctctttgtaagagtatctaaccaagttgcagttaacatgtacaagcagttgggctacagtgtatataggacggtcatagagtactattcggccagcaacggggagcctgatgaggacgcttatgatatgaggaaagcactttccagggatactgagaagaaatccatcataccattacctcatcctgtgaggcctgaagacattgaataaccctgggcagtggttcttaggcagatactctagatgctttatggacaatattattttcattggatgattctggagctctattaggagaaaagtaatcattttaggtcttaaagacttcaagaaaatacaggttatcaatttattttaaatctcattgtttccagttagcaatatcatacctattaaagctgttcattgtaacaaaattcaatcaaaaaggcagctaggtcagaaggaaacataccactctcatggttcatagtattcactgtatgtatgctagggaaaagacttgctccagtctcctcctcagttctgtgcctgagaaccactgctgcatatatttgtttttaaattttgtattgaactgttaattgaagctttaaaagcatatatgaaatgtataaatctaagatgtataatacattattgactctatgaatgttttctgaagtttgttagtcatttgtaaaactaaatcagattgtaatcccagtactttgggaggccaaggcaggctgattgcttgaggtcaggagtttgagaccagcctggccaaaatctatactaaaaaaaatacaaaaattagctgggcatcccagctatgcagaagctgaagcacaagaattgcttgaaccctggaggtggaggttgcagtgagctgagatcgtcccactgcactccagcccgggcaacagagtaagaccctgcctcaagaa

SEQ ID NO: 2250 - DNA, 1346 bp, Homo sapiens
ggggcttgcgaggatcggaagctggtcagcagctgttgggatgtgtacatcgtgaagcccacctggtggccgtggttaaattgtatccaaatgaaatgacactgatcactgcgtcccctgcagcagatgctgtctcagtcatgtaacttggatccacttacagaaacttatgggattcctttctacctacaatacctcgcccactggccagagtatttcattgttgcagaggcacctggtggagaattaatgggttatattatgggtaaagcagaaggctcagtagctagggaagaatggcacgggcacgtcacagctctgtctgttgccccagaatttcgacgccttggtttggctgctaaacttatggagttactagaggagatttcagaaagaaagggtggattttttgtggatctctttgtaagagtatctaaccaagttgcagttaacatgtacaagcagttgggctacagtgtatataggacggtcatagagtactattcggccagcaacggggagcctgatgaggacgcttatgatatgaggaaagcactttccagggatactgagaagaaatccatcataccattacctcatcctgtgaggcctgaagacattgaataaccctgggcagtggttcttaggcagatactctagatgctttatggacaatattattttcattggatgattctggagctctattaggagaaaagtaatcattttaggtcttaaagacttcaagaaaatacaggttatcaatttattttaaatctcattgtttccagttagcaatatcatacctattaaagctgttcattgtaacaaaattcaatcaaaaaggcagctaggtcagaaggaaacataccactctcatggttcatagtattcactgtatgtatgctagggaaaagacttgctccagtctcctcctcagttctgtgcctgagaaccactgctgcatatatttgtttttaaattttgtattgaactgttaattgaagctttaaaagcatatatgaaatgtataaatctaagatgtataatacattattgactctatgaatgttttctgaagtttgttagtcatttgtaaaactaaatcagattgtaatcccagtactttgggaggccaaggcaggctgattgcttgaggtcaggagtttgagaccagcctggccaaaatctatactaaaaaaaatacaaaaattagctgggcatcccagctatgcagaagctgaagcacaagaattgcttgaaccctggaggtggaggttgcagtgagctgagatcgtcccactgcactccagcccgggcaacagagtaagaccctgcctcaagaa

SEQ ID NO: 2251 - DNA, 1214 bp, Homo sapiens
agtaccccgtctcgctcggttccgcggcggccacgctccgggagacttccggcagggcgggcgcggggtcttggcgaacggtcttcggaagcggcggcggcgcgatgaccacgctacgggcctttacctgcgacgacctgttccgcttcaacaacattaacttggatccacttacagaaacttatgggattcctttctacctacaatacctcgcccactggccagagtatttcattgttgcagaggcacctggtggagaattaatgggttatattatgggtaaagcagaaggctcagtagctagggaagaatggcacgggcacgtcacagctctgtctgttgccccagaatttcgacgccttggtttggctgctaaacttatggagttactagaggagatttcagaaagatatgaggaaagcactttccagggatactgagaagaaatccatcataccattacctcatcctgtgaggcctgaagacattgaataaccctgggcagtggttcttaggcagatactctagatgctttatggacaatattattttcattggatgattctggagctctattaggagaaaagtaatcattttaggtcttaaagacttcaagaaaatacaggttatcaatttattttaaatctcattgtttccagttagcaatatcatacctattaaagctgttcattgtaacaaaattcaatcaaaaaggcagctaggtcagaaggaaacataccactctcatggttcatagtattcactgtatgtatgctagggaaaagacttgctccagtctcctcctcagttctgtgcctgagaaccactgctgcatatatttgtttttaaattttgtattgaactgttaattgaagctttaaaagcatatatgaaatgtataaatctaagatgtataatacattattgactctatgaatgttttctgaagtttgttagtcatttgtaaaactaaatcagattgtaatcccagtactttgggaggccaaggcaggctgattgcttgaggtcaggagtttgagaccagcctggccaaaatctatactaaaaaaaatacaaaaattagctgggcatcccagctatgcagaagctgaagcacaagaattgcttgaaccctggaggtggaggttgcagtgagctgagatcgtcccactgcactccagcccgggcaacagagtaagaccctgcctcaagaa

SEQ ID NO: 2252 - DNA, 2568 bp, Homo sapiens
gggaagatacacggtttttaagaaagaacttctaaccccactccaccgcccaacggtcacgtgacgcgcctgcgtcctcgcctcaaggttttttctggtcgcatattggctgttaactcggctacggggtgtagcgaggtgcattccggaagtaggtcctttgacttttgcttcctctacggaggcaagtaacaacccggcggtcgacgcttagcggaagttcgtcaagtcgcagttgcccccgcacagcggatgtgggtcgcctcttaggtgacgctgggaagtgcctgcaaccttcgccgctgccttctggttgaagcactatggagggagagaggaagaacaacaacaaacggtggtatttcactcgagaacagctggaaaatagcccatcccgtcgttttggcgtggacccagataaagaactttcttatcgccagcaggcggccaatctgcttcaggacatggggcagcgtcttaacgtctcacaattgactatcaacactgctatagtatacatgcatcgattctacatgattcagtccttcacacagttccctggaaattctgtggctccagcagccttgtttctagcagctaaagtggaggagcagcccaaaaaattggaacatgtcatcaaggtagcacatacttgtctccatcctcaggaatcccttcctgatactagaagtgaggcttatttgcaacaagttcaagatctggtcattttagaaagcataattttgcagactttaggctttgaactaacaattgatcacccacatactcatgtagtaaagtgcactcaacttgttcgagcaagcaaggacttagcacagacttcttacttcatggcaaccaacagcctgcatttgaccacatttagcctgcagtacacacctcctgtggtggcctgtgtctgcattcacctggcttgcaagtggtccaattgggagatcccagtctcaactgacgggaagcactggtgggagtatgttgacgccactgtgaccttggaacttttagatgaactgacacatgagtttctacagattttggagaaaactcccaacaggctcaaacgcatttggaattggagggcatgcgaggctgccaagaaaacaaaagcagatgaccgaggaacagatgaaaagacttcagagcagacaatcctcaatatgatttcccagagctcttcagacacaaccattgcaggtttaatgagcatgtcaacttctaccacaagtgcagtgccttccctgccagtctccgaagagtcatccagcaacttaaccagtgtggagatgttgccgggcaagcgttggctgtcctcccaaccttctttcaaactagaacctactcagggtcatcggactagtgagaatttagcacttacaggagttgatcattccttaccacaggatggttcaaatgcatttatttcccagaagcagaatagtaagagtgtgccatcagctaaagtgtcactgaaagaataccgcgcgaagcatgcagaagaattggctgcccagaagaggcaactggagaacatggaagccaatgtgaagtcacaatatgcatatgctgcccagaatctcctttctcatcatgatagccattcttcagtcattctaaaaatgcccatagagggttcagaaaaccccgagcggccttttctggaaaaggctgacaaaacagctctcaaaatgagaatcccagtggcaggtggagataaagctgcgtcttcaaaaccagaggagataaaaatgcgcataaaagtccatgctgcagctgataagcacaattctgtagaggacagtgttacaaagagccgagagcacaaagaaaagcacaagactcacccatctaatcatcatcatcatcataatcaccactcacacaagcactctcattcccaacttccagttggtactgggaacaaacgtcctggtgatccaaaacatagtagccagacaagcaacttagcacataaaacctatagcttgtctagttctttttcctcttccagttctactcgtaaaaggggaccctctgaagagactggaggggctgtgtttgatcatccagccaagattgccaagagtactaaatcctcttccctaaatttctccttcccttcacttcctacaatgggtcagatgcctgggcatagctcagacacaagtggcctttccttttcacagcccagctgtaaaactcgtgtccctcattcgaaactggataaagggcccactggggccaatggtcacaacacgacccagacaatagactatcaagacactgtgaatatgcttcactccctgctcagtgcccagggtgttcagcccactcagcccactgcatttgaatttgttcgtccttatagtgactatctgaatcctcggtctggtggaatctcctcgagatctggcaatacagacaaaccccggccaccacctctgccatcagaacctcctccaccacttccaccccttcctaagtaaaaaaagaaaaagaagaggagaaaaaaacttctttaaaaaaacacataatttttctttttttttt

SEQ ID NO: 2253 - DNA, 2193 bp, Homo sapiens
gggcgagggcggggcgagggcggggcggtgggcggggacggggcccgcacggcggctacggcctaggtgagcggctcggactcggcggccgcacctgcccaacccaacccgcacggtccggaagtcgccgaggggccgggagcgggaggggacgtcgtcctagagggccggagcgggcgggcggccgaggacccggctcccgcgcaggacggagccgtggctcaggtcggcccctccccaacaccaccccgggcctccgccccttcctgggcctctcggtggagcagggacccgaaccggtgcccatccagtccggtgccatctgaagcccccttcccagaaaatgagccacagagcaagctgaccccagcgacacagccccccagccctactgtatttccgttcctatcaaaaaatggatgactcggagacaggtttcaatctgaaagtcgtcctggtcagtttcaagcagtgtctcgatgagaaggaagaggtcttgctggacccctacattgccagctggaagggcctggtcaggtttctgaacagcctgggcaccatcttctcattcatctccaaggacgtggtctccaagctgcggatcatggagcgcctcaggggcggcccgcagagcgagcactaccgcagcctgcaggccatggtggcccacgagctgagcaaccggctggtggacctggagcgccgctcccaccacccggagtctggctgccggacggtgctgcgcctgcaccgcgccctgcactggctgcagctgttcctggagggcctgcgtaccagccccgaggacgcacgcacctccgcgctctgcgccgactcctacaacgcctcgctggccgcctaccacccctgggtcgtgcgccgcgccgtcaccgtggccttctgcacgctgcccacacgcgaggtcttcctggaggccatgaacgtggggcccccggagcaggccgtgcagatgctaggcgaggccctccccttcatccagcgtgtctacaacgtctcccagaagctctacgccgagcactccctgctggacctgccctaggggcgggaagccagggccgcaccggctttcctgctgcagatctgggctgcggtggccagggccgtgagtcccgtggcagagccttctgggcgctgcgggaacaggagatcctctgtcgcccctgtgagctgagctggttaggaaccacagactgtgacagagaaggtggcgaccagcccagaagaggcccaccctctcggtccggaacaagacgcctcggccacggctccccctcggcctattacacgcgtgcgcagccaggcctcgccagggtgcggtgcagagcagagcaggcaggggtgggggccgggcctgcaagagcccgaaaggtcgccaccccctagcctgtggggtgcatctgcgaaccagggtgaagtcacaggtcccggggtgtggaggctccatcctttctcctttctgccagccgatgtgtcctcatctcaggcccgtgcctgggaccccgtgtctgcccaggtgggcagccttgagcccaggggactcagtgccctccatgccctggctggcagaaaccctcaacagcagtctgggcactgtggggctctccccgcctctcctgccttgtttgcccctcagcgtgccaggcagactgggggcaggacagccggaagctgagaccaaggctcctcacagaagggcccaggaagtccccgcccttgggacagcctcctccgtagcccctgcacggcaccagttccccgagggacgcagcaggccgcctcccgcagcggccgtgggtctgcacagcccagcccagcccaaggcccccaggagctgggactctgctacacccagtgaaatgctgtgtcccttctcccccgtgccccttgatgccccctccccacagtgctcaggagacccgtggggcacggaacaggagggtctggaccctgtggcccagccaaaggctaccagacagccacaaccagcccagccaccatccagtgcctggggcctggccactggctcttcacagtggaccccagcacctcggggtggcagagggacggcccccacggcccagcagacatgcgagcttccagagtgcaatctatgtgatgtcttccaacgttaataaatcacacagcctcccaggagggagacgctggggtgca

SEQ ID NO: 2254 - DNA, 3952 bp, Homo sapiens
gggatgactcggcgacgccgccaggcgcgttacccggcgtgctccgcgcggcgccagcgaagggacgtgggggaaggggcagggaggaggaagcggtggctgctgcggatgtcggtgtgagcgagcggcgcctgaacacacggcggctgccgagcgcctgacccgggcctgcgccagagcctgcaccgagctccggggccccacacccgctacggtggccctgcgcccgttgctactgaggcggcgtgctctgcattcttcgctgtccaggcctgccggctctggtgtctgctggctcctccttgctcgcctgctccctcctgcttgcctgagtcaccgccgccgccgccgccacagccatggccgagagtggtgaaagcggcggtcctccgggctcccaggatagcgccgccggagccgaaggtgctggcgcccccgcggccgctgcctccgcggagcccaaaatcatgaaagtcaccgtgaagaccccgaaggaaaaggaggaattcgccgtgcccgagaatagctccgtccagcagtttaaggaagaaatctctaaacgttttaaatcacatactgaccaacttgtgttgatatttgctggaaaaattttgaaagatcaagataccttgagtcagcatggaattcatgatggacttactgttcaccttgtcattaaaacacaaaacaggcctcaggatcattcagctcagcaaacaaatacagctggaagcaatgttactacatcatcaactcctaatagtaactctacatctggttctgctactagcaacccttttggtttaggtggccttgggggacttgcaggtctgagtagcttgggtttgaatactaccaacttctctgaactacagagtcagatgcagcgacaacttttgtctaaccctgaaatgatggtccagatcatggaaaatccctttgttcagagcatgctctcaaatcctgacctgatgagacagttaattatggccaatccacaaatgcagcagttgatacagagaaatccagaaattagtcatatgttgaataatccagatataatgagacaaacgttggaacttgccaggaatccagcaatgatgcaggagatgatgaggaaccaggaccgagctttgagcaacctagaaagcatcccagggggatataatgctttaaggcgcatgtacacagatattcaggaaccaatgctgagtgctgcacaagagcagtttggtggtaatccatttgcttccttggtgagcaatacatcctctggtgaaggtagtcaaccttcccgtacagaaaatagagatccactacccaatccatgggctccacagacttcccagagttcatcagcttccagcggcactgccagcactgtgggtggcactactggtagtactgccagtggcacttctgggcagagtactactgcgccaaatttggtgcctggagtaggagctagtatgttcaacacaccaggaatgcagagcttgttgcaacaaataactgaaaacccacaactgatgcaaaacatgttgtctgccccctacatgagaagcatgatgcagtcactaagccagaatcctgaccttgctgcacagatgatgctgaataatcccctatttgctggaaatcctcagcttcaagaacaaatgagacaacagctcccaactttcctccaacaaatgcagaatcctgatacactatcagcaatgtcaaaccctagagcaatgcaggccttgttacagattcagcagggtttacagacattagcaacggaagccccgggcctcatcccagggtttactcctggcttgggggcattaggaagcactggaggctcttcgggaactaatggatctaacgccacacctagtgaaaacacaagtcccacagcaggaaccactgaacctggacatcagcagtttattcagcagatgctgcaggctcttgctggagtaaatcctcagctacagaatccagaagtcagatttcagcaacaactggaacaactcagtgcaatgggatttttgaaccgtgaagcaaacttgcaagctctaatagcaacaggaggtgatatcaatgcagctattgaaaggttactgggctcccagccatcatagcagcatttctgtatcttgaaaaaatgtaatttatttttgataacggctcttaaactttaaaatacctgctttatttcattttgactcttggaattctgtgctgttataaacaaacccaatatgatgcattttaaggtggagtacagtaagatgtgtgggtttttctgtatttttcttttctggaacagtgggaattaaggctactgcatgcatcacttctgcatttattgtaattttttaaaaacatcaccttttatagttgggtgaccagattttgtcctgcatctgtccagtttatttgctttttaaacattagcctatggtagtaatttatgtagaataaaagcattaaaaagaagcaaatcatttgcactctataatttgtggtacagtattgcttattgtgactttggcatgcatttttgcaaacaatgctgtaagatttatactactgataattttgttttatttgtatacaatatagagtatgcacatttgggactgcatttctggaaacatactgcaataggctctctgagcaaaacacctgtaactaaaaaagtgaagataagaaaatactcttaaagctgagtatttcctaattgtatagaatcttacagcatctttgacaaacatctcccagcaaaagtgccggttagtcaggtttgttgaaaatacagtagaaaagctgattctggttatctctttaaggacaattaattgtacagacacataatgtaacattgtctcaacattcattcacagattgactgtaaattaccttaatctttgtgcagactgaaggaacactgtagtataccccaaagtgcatttgcctaggacttctcagcttctcccataggtagtttaacaggcattaaaatttgtaattgaaatgttgctttcactgaaaaagtgtcttgatgtttcagttatttttaatcgccataaaaaaatagaactatcttttgggtttatctgttttctcatgcacaggcaatacacaaatttaaaatgagttgtgagccaattgtttctgaagtgttttggtagttctattaagaaatagttaaatattgtgcttttcagagcctcagagaaagggggacggggtgggggggtggggcagcggaatctgtcctggatggggccagcttaaataatactggcaaccaagattctgttaggatttctgtgcatatagtgtagtaaagaagtatcattcaggggtgaaaaacaaagagccgttttaatgatgttgagtacatttggctgttttatagcctttttcttccctcccccaaagaattctgtttgcctaactcccaaactgttggggtggtacattcctttaggaccaattaaaacataattgagggtcagtgatacatttggctgactctggttcagtattctcttaggtgattatattctctcatgtacagttacaggaaattaaaatgttaaagtaacctaaaatgaattcagaccaataaaatcaagggaaatacaagttgattgcattacttctgtatgttgcttgctattaaaaaggttaagaggccaggttacccaccagtccttgcactgttctgacactttccccaggaggaaaacaagtacaaaggttacggtggaggcataagtagaagagattgttaagaagggtattcatgtgtctttgctctttctgctttatgcctcagtttggtttaaaaacttctgtactggcaaatggtggtattcagtgtgggatagtgtcataactaatttgacaatttattaatcataaaataacaataaatctctagcttttacacttg

SEQ ID NO: 2255 - DNA, 2354 bp, Homo sapiens
ggaggaagcggtggctgctgcggatgtcggtgtgagcgagcggcgcctgaacacacggcggctgccgagcgcctgacccgggcctgcgccagagcctgcaccgagctccggggccccacacccgctacggtggccctgcgcccgttgctactgaggcggcgtgctctgcattcttcgctgtccaggcctgccggctctggtgtctgctggctcctccttgctcgcctgctccctcctgcttgcctgagtcaccgccgccgccgccgccacagccatggccgagagtggtgaaagcggcggtcctccgggctcccaggatagcgccgccggagccgaaggtgctggcgcccccgcggccgctgcctccgcggagcccaaaatcatgaaagtcaccgtgaagaccccgaaggaaaaggaggaattcgccgtgcccgagaatagctccgtccagcagtttaaggaagaaatctctaaacgttttaaatcacatactgaccaacttgtgttgatatttgctggaaaaattttgaaagatcaagataccttgagtcagcatggaattcatgatggacttactgttcaccttgtcattaaaacacaaaacaggcctcaggatcattcagctcagcaaacaaatacagctggaagcaatgttactacatcatcaactcctaatagtaactctacatctggttctgctactagcaacccttttggtttaggtggccttgggggacttgcaggtctgagtagcttgggtttgaatactaccaacttctctgaactacagagtcagatgcagcgacaacttttgtctaaccctgaaatgatggtccagatcatggaaaatccctttgttcagagcatgctctcaaatcctgacctgatgagacagttaattatggccaatccacaaatgcagcagttgatacagagaaatccagaaattagtcatatgttgaataatccagatataatgagacaaacgttggaacttgccaggaatccagcaatgatgcaggagatgatgaggaaccaggaccgagctttgagcaacctagaaagcatcccagggggatataatgctttaaggcgcatgtacacagatattcaggaaccaatgctgagtgctgcacaagagcagtttggtggtaatccatttgcttccttggtgagcaatacatcctctggtgaaggtagtcaaccttcccgtacagaaaatagagatccactacccaatccatgggctccacagacttcccagagttcatcagcttccagcggcactgccagcactgtgggtggcactactggtagtactgccagtggcacttctgggcagagtactactgcgccaaatttggtgcctggagtaggagctagtatgttcaacacaccaggaatgcagagcttgttgcaacaaataactgaaaacccacaactgatgcaaaacatgttgtctgccccctacatgagaagcatgatgcagtcactaagccagaatcctgaccttgctgcacagatgcagaatcctgatacactatcagcaatgtcaaaccctagagcaatgcaggccttgttacagattcagcagggtttacagacattagcaacggaagccccgggcctcatcccagggtttactcctggcttgggggcattaggaagcactggaggctcttcgggaactaatggatctaacgccacacctagtgaaaacacaagtcccacagcaggaaccactgaacctggacatcagcagtttattcagcagatgctgcaggctcttgctggagtaaatcctcagctacagaatccagaagtcagatttcagcaacaactggaacaactcagtgcaatgggatttttgaaccgtgaagcaaacttgcaagctctaatagcaacaggaggtgatatcaatgcagctattgaaaggttactgggctcccagccatcatagcagcatttctgtatcttgaaaaaatgtaatttatttttgataacggctcttaaactttaaaatacctgctttatttcattttgactcttggaattctgtgctgttataaacaaacccaatatgatgcattttaaggtggagtacagtaagatgtgtgggtttttctgtatttttcttttctggaacagtgggaattaaggctactgcatgcatcacttctgcatttattgtaattttttaaaaacatcaccttttatagttgggtgaccagattttgtcctgcatctgtccagtttatttgctttttaaacattagcctatggtagtaatttatgtagaataaaagcattaaaaaaaaaaaaaaaaaaaaaaaaaaaaaaaaaaaaaaaaaaaa

SEQ ID NO: 2256 - DNA, 2178 bp, Homo sapiens
gctcagtagcgatagcagcggccgtggaggtggcgttggggactgttttctctcggaggccggagcggagccgcgtctgactgaggcgggcagcaagcggccccctcgctccctccctccctcctccgcgccctccccgccgccaccagccgtcaaacgccaaccgccgctcctggggaggagccgcggctcgcggggccggagccaggcctgcgtccggacatcagccggagccggagcgagagccggggcctcggcgtccccgccctctccccgcctcggccagcgtccgccgggcccccgcgcgtcgcgccatggactcggacgagggctacaactacgagttcgacgaggacgaggagtgcagtgaggaggacagcggcgccgaggaggaggaggacgaagacgacgacgagccggacgatgataccctggatctgggcgaggtggagctggtggagcccgggctgggcgtcggcggggagcgggacggactgctgtgcggggagacgggcggtggcggcggcagcgctctggggcccggcggtggcggcggcggcggcggcggcggtggtggtggcgggccggggcatgagcaggaggaggattaccgctacgaggtgctcacggccgagcagattctacaacacatggtggaatgtatccgggaggtcaacgaggtcatccagaatccagcaactatcacaagaatactccttagccacttcaattgggataaagagaagctaatggaaaggtactttgatggaaacctggagaagctctttgctgagtgtcatgtaattaatccaagtaaaaagtctcgaacacgccagatgaatacaaggtcatcagcacaggatatgccttgtcagatctgctacttgaactaccctaactcgtatttcactggccttgaatgtggacataagttttgtatgcagtgctggagtgaatatttaactaccaaaataatggaagaaggcatgggtcacactatttcgtgtcctgctcatggttgtgatatcttagtggatgacaacacagttatgcgcctgatcacagattcaaaagttaaattaaagtatcagcatttaataacaaatagctttgtagagtgcaatcgactgttaaagtggtgtcctgccccagattgccaccatgttgttaaagtccaatatcctgatgctaaacctgttcgctgcaaatgtgggcgccaattttgctttaactgtggagaaaattggcatgatcctgttaaatgtaagtggttaaagaaatggattaaaaagtgtgatgatgacagtgaaacctccaattggattgcagccaacacaaaggaatgtcccaaatgccatgtcacaattgagaaggatggtggttgtaatcacatggtctgtcgtaaccagaattgtaaagcagagttttgctgggtgtgtcttggcccatgggaaccacatggatctgcctggtacaactgtaaccgctataatgaggatgatgcaaaggcagcaagagatgcacaggagcgatctagggcagccctgcagaggtacctgttctactgtaatcgctatatgaaccacatgcagagcctgcgctttgagcacaaactatatgctcaggtgaaacagaaaatggaggagatgcagcagcacaacatgtcctggattgaggtgcagttcctgaagaaggcagttgatgtcctctgccagtgtcgtgccacactcatgtacacttatgtcttcgctttctacctcaaaaagaataaccagtccattatctttgagaataaccaagcagatctagagaatgccacagaggtgctctcgggctaccttgaacgagatatttcccaagattctctgcaggatataaagcagaaagtacaagacaagtacagatactgtgagagtcgacgaagggttttgttacagcatgtgcatgaaggctatgaaaaagatctgtgggagtacattgaggactgagaatggccctgcataaaatgaactctgaaaactttaccatctagagtgctcatgcaattaaaacaaaacaaacacaaacaaggaggcactaagcctattctgacaccactggtctgtagtaccagaattgttttgttaatggaaagtttaagtaaattatattgtaataaaaaggtagataaaccattgt

SEQ ID NO: 2257 - DNA, 1713 bp, Homo sapiens
gagcacgtgcgcgtcctcgctgctcacatttcggcggagggcgcgctccctggaaaattccactcctgtgctagctccaccctatgcggcttttctcctacccgacgctcttcactctcagctcccttcccggcggcctttgcgggaacaagatggcagcccccatacctcaagggttctcttgtttatcgagggttttgggctggtggtctcggcagccagttctggtgactcagtccgcagctatagttccagtaagaactaaaaaacgtttcacacctcctatttatcaacctaaatttaaaacagaaaaggagtttatgcaacatgcccggaaagcaggattggttattcctccagaaaaatcggaccgttccatacatctggcctgtacagctggtatatttgatgcctatgttcctcctgagggtgatgcacgcatatcatctctttcaaaggagggactgatagagagaactgaacgaatgaagaagactatggcatcacaagtgtcaatccggaggataaaagactatgatgccaactttaaaataaaggacttccctgaaaaagctaaggatatctttattgaagctcacctttgtctaaataactcagaccatgaccgacttcataccttggtaactgaacactgttttccagacatgacttgggacatcaaatataagaccgtccgctggagctttgtggaatctttagagccctctcatgttgttcaagttcgctgttcaagtatgatgaaccagggcaacgtgtacggccagatcaccgtacgcatgcacacccggcagactctggccatctatgaccggtttggccggttgatgtatggacaggaagatgtacccaaggatgtcctggagtatgttgtattcgaaaagcagttgacaaacccctatggaagctggagaatgcataccaagatcgttcccccatgggcaccccctaagcagcccatccttaagacggtgatgatccctggccctcagctgaaaccagaagaagaatatgaagaggcacaaggagaggcccagaagcctcagctagcctgatgacaaaaatgacttctagggtgaagcctgggtgatgaggctgctggaagctttgaagtctcccattcccctcatgctataaaaagaactacctttgttctctcccatcctgctcaggtcttttcagcagtctcatcatcagcaaccatgactgatgactgggccctagcaggtggcaggtataacatggccatggacactcttcttttttaaattttatgtctagcttctgagtctagatgaaagacagtatgtttcagagaacattggatatcagtttttcccacagcagggactgtgagagacaaccagcagcatcctctttgtaatcacagggcagggatcagagtttgaaatgaaatgttgtcagggtgttggaaaaattttggtgagttctgcacatttcccctggttcaggctgggcatggaccagccttcagatggcagaagtggaagatgagcctacttgtgagcgatgtgactttaaggaaatgaagactggggaagaataattagtgtttataagacatttaagaggccctttttcatatactgactcactgatgaatcagcatttgcattttatggaaaaatataaatccaaagaaataatttatcccttaaaaaaaaaaaaaaaaaa

SEQ ID NO: 2258 - DNA, 1293 bp, Homo sapiens
caagaccatggcgaaagccggggataagagcggcagcagcgggaagaaaagtctaaaacggaaagccgctgccgaagaacttcaggaggctgcaggcgctggggatggggcgacggaaaacggggtccaacccccgaaagcggctgcctttccgccaggctttagcatttcggagattaaaaacaaacagcggcgacacttaatgttcacgcggtggaaacagcagcagcggaaggaaaagttggcagctaagaaaaaacttaaaaaagaaagagaggctcttggcgataaggctccaccaaagcctgtacccaagaccattgacaaccagcgagtgtatgatgaaaccacagtagaccctaatgatgaagaggtcgcttatgatgaagctacagatgaatttgcttcttacttcaacaaacagacttctcccaagattctcatcacaacatcagatagacctcatgggagaacagtacgactctgtgaacagctctccacagttataccaaactcacatgtttattacagaagaggactggctctgaaaaaaattattccacagtgcatcgcaagagatttcacagacctgattgttattaatgaagatcgtaaaaccccaaatggacttattttgagtcacttgccaaatggcccaactgctcattttaaaatgagcagtgttcgtcttcgtaaagaaattaagagaagaggcaaggaccccacagaacacatacctgaaataattctgaataattttacaacacggctgggtcattcaattggacgtatgtttgcatctctctttcctcataatcctcaatttatcggaaggcaggttgccacattccacaatcaacgggattacatattcttcagatttcacagatacatattcaggagtgaaaagaaagtgggaattcaggaacttggaccacgttttaccttaaaattaaggtctcttcagaaaggaacctttgattctaaatatggagagtatgaatgggtccataagccccgggaaatggatacaagtagaagaaaattccatttataaagtactgagagaatgatattggattttgctgaacaggcctatcttgaactttggtaaattatttttgacagaatactcttttcaaaatggcatttgctgatttcataaacctttcacgtctggacgaattaccaaatgccatgaattgccactgtgtgtttatgtagaaaatacaaataaaagttattttgatggcttaggtttccttaaaaaaaaaaaaaaaaaaaaaaaaaaaa

SEQ ID NO: 2259 - DNA, 4407 bp, Homo sapiens
ttccggcgtgcctacgcctcctcttgcgctgtcctgttaatggcgggcagtagccgctgaggggattgcagataaccgcttcccgcacggggaaagtctaccctgcctgccactttctgctcgccgtcagcgccggagctcgccagcatgtctgtggtaccgcccaatcgctcgcagaccggctggccccggggggtcactcagttcggcaacaagtacatccagcagacgaagcccctcaccctggagcgcaccatcaacctgtaccctcttaccaattatacttttggtacaaaagagcccctctacgagaaggacagctctgttgcagccagatttcagcgcatgagggaagaatttgataaaattggaatgaggaggactgtagaaggggttctgattgtacatgagcaccggctaccccatgtgttactgctgcagctgggaacaactttcttcaaactacctggtggtgaacttaacccaggagaagatgaagttgaaggactaaaacgcttaatgacagagatactgggtcgtcaggatggagttttgcaagactgggtcattgacgattgcattggtaactggtggagaccaaattttgaacctcctcagtatccatatattcctgcacatattacaaagcctaaggaacataagaagttgtttctggttcagcttcaagaaaaagccttgtttgcagtccctaaaaattacaagctggtagctgcaccattgtttgaattgtatgacaatgcaccaggatatggacccatcatttctagtctccctcagctgttgagcaggttcaattttatttacaactgaattcctgcgcagtggagaagtaaaagaagccgcttgtctctgtgagcacagctatatacagtgtagaataaatgtggtagaaaagtttttttggttttatctcttttgcgatccctaaattgccacctttctattgtttgaatagtaaaattaatatgaagaactagatagtggtgtaaacaaatgtgataatgtttatttactttcggttctgctcatacttttttgtacaacattaaagaaaatggactttttttattttaatttctcattaaacttctaaaattcttataggtgaggatcatttttccccccaccttaggatggtgaatgttgcaacacaatgacaggtttaagtcagtcaagtttattggacccttgctttgataccattcttgggcacatactccaagattgtattagatttttgtgatgaagagcttccattacttctgaaaactatatttatctgagtgagtccaaggtgcaactcctaaatgaattgtgttgcagagaactcccagtataattcactgaccagtacattttataaccatccaggccttggtttgcaagcaacagaccttaaacatacaggaaactattaaaattggctcgatcagtagtcataggaattggtataagaagagactcatttagagctcagagttttcttcacataatgggggtattaattatttgtgctgttgcgaaattatgtgtcttattcttaaagccatggtaaaaatagggatctgtgaaggaaatttctaaaattggatgtattaggttttgaactctgagattgcacaaatattcaattaacttgaagttgtgtacatagagaagaaaatttggttttagcaaatgacagagccttcaaaaatatttttggaataatgtgaatcaaccgaaaactgggggcaaggcagaggacaggttttctcaggttaagagaaaaacgaaattttaaaaactttaaaaaatactgataaattcggatcaaatttgggggaataaaaaatattagagcaaaggagtttgctggttgtgtcattatttaatgatcaaagtatagcatgtatgccttattacagacttgttgactataggcttaatgtaaaaaggaatcttgccagatgtagctacttaaggaaaaaagggtttttaatagaaatgaacttttgattagtatggtgccagtcacagggctattttcctgaatattgggtgatgtcaaaggtatatgatacttgaggaaatcaggccaagtgtagctgagcaattaataaacactcaagtttttttagttggggtcatgtcaaaccctcacatggtggttaagtagtgactaactgtgcatgtccttcatggtaggtgagcaccagtctccatgatcaaaaatgccccagtttcctttgaaaaagccactagttctgtgaattgtccttttccctcctgcccctaacagtcctacccctctagcctacattagcatatttctcatgtaatgtattttgctggtaagctcatccattagctgcgtccttcagctattcctttagattggaggaagtggatatgaagatggattgattcagctcaccttccatgattgcttttgagggaaaagctacagtggccacatttcagatgttcacttttgcaatttgtggagggtggagagaggtagacttttgttgtgtgttttataaagtactctcagtaaggagtgtttgagttgaagagtcatctgattcgaggccactcatgttctttgtaacttaaactttgaccaagaaattcttcacttctcacttcttcacttcttcccaatatacagtaagtacgtgagccagtcatccatacactaaggcctagttgagaaaaacctttgattcaggatggctgggttactaaccttgaaatgtaagagatctggttttgaatgtaaaagttgcaacacacaaacggaagtcttaaaaactttttgctctggtcagttacaggtggatccccaataatctgtttttggttttctgatggaaataatagaattaggggaaatcaaatctggttggtaggtgtctacagtattagaagagggtataagggcactgtttaacactaagttctaatacttccagaaactgtgcattccagatctacatactaaatgctcttatcattttgaaatgggctcttgattaatagacccatattttttagtggcttctatgttgtatatttgtctaaaatgaaagctcttttgcgttctaaaactacaatatatgtcatcttattttccctgagtatccaagtatagtgcagattctatgtaaaactactaaatgacactggaatatgtttagtagattagggggaaaaactataaaggtttatacaattgtttgtagttacatttaggatggacttatccctttggagaagagtgaagtttgttttttcgccatgtgatgaagaccactgtgattttttaaaaaagtagataatacttaaaatggcgtaataattctgcacttgaatttgtactgttaacagcacatttggaagattttaaaactttttattgtcttataaatagcattcacttattattttggatatttaagggttccattaagttaacactgtatttggacaaagtgtgaccaaattagccagtctgttttcttccatgtttaattagaagtgagaggtagaagtacttcaaattcaacaggccagcaagcaatcggcttaaaattccctttcttaaatgttgtgctcttatgttctcggctttttaatgactttatttttacagtacttgttcagtcacttgagatgaaatgcttggggtagcttttccatcctcaaacttaatgtttttactagttcatagtgtttggaacagtatatgccaatcactgagactgcatcagagtttgcaattttgtatgtttcattgccaaagaaggcttagtggttgttgactgtagtataagtcagctttctgtagcataagatttgattttcccatacttacttcacttgttatacatcactgattatttgggttaaactggactcatttcaagcagtttgcttttgttcaaatcgtgatgagaaacctaatactgtaatttgatttgagccataaaacacattttaatattagcttgtattatagttattaagcttgtttttgtggaaaaaaacttactaaaacctaggtaactctagattaggccagttcaggtgtattttgtatcttagtaatggatcatatcgtaaaaatagagataagttgggaagatatattgattatgctgttctgttgagggaaaggtcatgtatttagaaatttaaacttttggttattgtgttcacatcatagtattcaagcatcatttatagtttggttttgagaacttttctggtattacgtttatggcaaatgtataaaagaaacaagttttggttatatttttatatttgtaaagtaagtttggttaaagtgatcactgttctttttttattttattgtcatttcaataaaaaatatttgaaaga

SEQ ID NO: 2260 - DNA, 2891 bp, Homo sapiens
gcttcccttccacgtctcccggaagcggtagcagggccccggcgggtcggggaggaggtttactcagcttgggccccctccgggccagccgccgagggggcgcggcccaggacggcggctaggccgtagtgcagcctctccggagtcctcaggtttgccaataggattatcctgctgccatcatgtcttggtttgttgatcttgctggaaaggcagaagatcttttaaaccgagttgatcaaggggctgcaacagctctcagtaggaaagacaatgccagcaacatatatagcaaaaatactgactatactgaacttcaccagcaaaatacagatttgatatatcagactggacctaaatctacgtatatttcatcagcagctgataacattcgaaatcaaaaagccaccatcttagctggcactgcaaatgtgaaagtaggatctcggacaccagtagaggcctctcatcctgttgaaaatgcatctgttcctaggccttcatcccattttgtgcgaagaaaaaagtcagaacctgatgatgagctgctgtttgattttcttaatagttcacagaaggagcctaccgggagggtggaaatcagaaaggaaaaaggcaagacacctgtctttcagagctctcagacatcaagtgtcagttctgtgaaccccagtgtaaccaccatcaaaaccattgaagaaaattcttttgggagccaaacccacgaagctgccagtaactcagattctagccatgaaggtcaagaggaatcttcaaaggaaaatgtgtcatcaaatgctgcctgccctgaccacaccccaacacctaatgatgatggcaaatcacatgaactgtctaaccttcgactggagaatcagctgctgaggaatgaagttcagtctttaaatcaagaaatggcctcgttactccaaagatccaaagagactcaagaagaattaaacaaagcaagagcaagagttgaaaagtggaatgctgaccattcaaagagtgatcgaatgactcgaggactccgagcccaagtagatgacctgactgaagctgtggctgcaaaggattcccagctggctgtactgaaagtgagactccaggaagctgaccagctactgagtactcgcacagaagcattagaagccttacagagtgaaaaatcacgaataatgcaggatcaaagtgaaggtaacagcctgcagaatcaagctctgcagacttttcaggagagactgcatgaagcggatgccactctgaagagagagcaggagagctataaacagatgcagagcgagtttgctgcacgccttaataaagtggaaatggaacgtcagaatttagcagaagcaattacactggccgaaagaaaatactcagatgagaagaagagggttgatgaactgcagcagcaagtcaagctgtataagttgaacttggagtcctctaagcaggaattaattgactacaagcaaaaagctactagaatactgcaatctaaggaaaaattgattaacagcttgaaagaaggctctggttttgaaggcctagatagcagcactgccagtagcatggagctggaagaacttcggcatgagaaagagatgcagagggaggaaatacagaagctgatgggccagatacatcagctcagatccgaattacaggatatggaggcacagcaagttaatgaagcagaatcagcaagagaacagttacaggatctgcatgaccaaatagctgggcagaaagcatccaaacaagaactagagacagaactggagcgactgaagcaggagttccactatatagaagaagatctttatcgaacaaagaacacattgcaaagcagaattaaagatcgagacgaagaaattcaaaaactcaggaatcagcttaccaataaaactttaagcaatagcagtcagtctgagttagaaaatcgactccatcagctaacagagactctcatccagaaacagaccatgctggagagtctcagcacagaaaagaactccctggtctttcaactggagcgcctcgaacagcagatgaactccgcctctggaagtagtagtaatgggtcttcgattaatatgtctggaattgacaatggtgaaggcactcgtctgcgaaatgttcctgttctttttaatgacacagaaactaatctggcaggaatgtacggaaaagttcgcaaagctgctagttcaattgatcagtttagtattcgcctgggaatttttctccgaagataccccatagcgcgagtttttgtaattatatatatggctttgcttcacctctgggtcatgattgttctgttgacttacacaccagaaatgcaccacgaccaaccatatggcaaatgaaccaagcccagttgttgcagtgattggttgtctttttctagacttgggatctgcaagaaggccaattgcctaaaatttctgagaacagtgcacaagattattttatcactacaagcttttaactttttaagttattgtacaagtattctacctaaatcttccaatttcctttaaatggtaagagtttctaaaacagacaataatttaacaagctcagctctgctttatctgagtttagtggtcctaatatatatgtagagaaagatggtggggttgttcacctctgtacagaccatctgtatgttaggtgacattgattatgggttataatcagggaaactaattgtatttagtgacaaaaataaaaagtttttttttataattcagtctgcttttggattttcatatatttaactttgcaaaaagatttactttgtacatgttacaggcttgattggtgtaaatctttttataaatacataaataaaagaaaaatatgcatttttcttttct

SEQ ID NO: 2261 - DNA, 970 bp, Homo sapiens
agcagcgctccctccgcttccggccgagcccgcgccccccagaccccgagagctcgcagctccggcccggcggcgatggcgcggagcgtgcgcgtgctggtggacatggacggcgtcctggccgacttcgaggccggcctcctgcggggcttccgccgccgcttccctgaggagccgcacgtgccgctggagcaacgccgcggcttcctggcccgcgagcagtaccgcgccctgcggcccgacctggcggataaagtggccagtgtgtacgaagccccgggctttttcctggacctggagcccatcccgggagccttggacgctgtgcgggagatgaacgacctaccggacacgcaggtcttcatctgcaccagccccctgctgaagtaccaccactgtgtgggtgagaagtaccgctgggtggagcagcacctggggccccagttcgtagaacgaattatcctgacaagggacaagacggtggtcttgggggacctgctcattgatgacaaggacacagttcgaggccaggaggagaccccaagctgggagcacatcttgttcacctgctgccacaatcggcacctggtcctgcccccgacaaggagacggctgctctcctggagtgacaactggagggagatcttagatagcaagcgcggagctgcgcagcgggaatgagcggggatgccgcgggcagcagctggagctaaaggaagggcaggcccacaggggccaccgcagagccgagtcggggcggcatcgtgctggtgcctctggccccgtggagtggagcaggcagacaccgttaagcgctgtgctaccgggccccaggcccagccacccggtacctcccgagaggctgtccctggaccctggctggcatggaaatacagtgggaaaaccagtcgggacctttaataaaagaccttggctttctaaaaaaaaaaaaaaaaaaaaaaaaaaaaaa

SEQ ID NO: 2262 - DNA, 1909 bp, Homo sapiens
agcggcgcggccgcggaacctgaggcggtctggggcggcggcgctccggctctgaagggctccagccaaacggagcccgcggccaaacggtgcctgcggtgcctgagctgagtgaggccgaggccgggaggccgtgcccggagtaaggcgaaagagaatgaaagacgtagataacctcaaaagtataaaagaagaatgggtttgtgaaacaggatctgataatcaacctcttggtaataatcaacaatcaaattgtgaatattttgttgatagcctttttgaggaagctcagaaggttagttccaaatgtgtgtctcccgctgaacagaagaaacaggtagatgtaaatataaaattatggaaaaacggattcaccgtcaacgacgatttcagaagttattccgatggtgccagtcagcagtttttgaactccatcaaaaagggggaattaccttcagaattacagggaatttttgataaagaagaggtggacgttaaagttgaagacaagaaaaatgaaatatgtttgtctacgaagcctgtgttccagcccttttcaggacagggtcacagactaggaagtgccacaccaaaaattgtttctaaagcaaagaatattgaagttgaaaataaaaataatttgtctgctgttccactgaacaacttggaacccattactaatatacagatctggttggccaatggaaaaaggattgtccagaaatttaacattactcatagagtaagccatatcaaagacttcattgaaaaataccaaggatctcaaagaagtcctccgttttccctggcaacagctcttcctgtcctcaggttgctagatgagacactcacactggaagaagcagatttacagaatgctgtcatcattcagagactccaaaaaactgcatcttttagagaactttcagagcactgatttttgatagactaagtggaaaatttgcagagaaatgatggttgtaagtggacatgcaaaccaaaattggggattggagaagtcagactcactagacttttggttcgagtactattgaactctctcctgatgagaagatgtttagataagtacaagttaagaaagtagcatatgactggaaactatattcagtgcactttctccaaaagactacccagaaaaatagacttattttcaaataccagttatcaagatatattaaatagctgtattgtttagaatcttaatatggtataaattagcatatgtattcacaatattcattcagacatcattcccagacagcagggatttatttaaatgttagctgtctgagtttttaaatagctaatacgaccgggtacagtggttcatgcctgtaatcccagaacttcgggaggccgagacaggcagatcacgaggtcaacagattgagaccatcctggcaaacatggtgaaaccccatctctagtaaaaatacaaaaattagctgggcgtggcggtgcgcaactgtagtcccagctactcgggaggctgaggcaggagaatctcttgaacctggcaagtgtaggttgcagtgagctgagattgagcaactgtactccagcttggcgacagagcaagaccccctctcaaaaataaataaaataaagtaaaataaatataaataattgtggccgggtgcaatggctcatgcctgtaatcccagcactttgggaggctgagatgggaggatcacttgaagccaggagtttaaaaccagaatgatcaacagagtgagacccctgtctatatatttttttaatttaaaaaataaaagaataaaattgtgtagctcagtatagtatcaagattaatctgcctactcacatttctacactttataaaaatgtaataaaagaaaattatctttctaaaaaaaaaaaaaaaaaa

SEQ ID NO: 2263 - DNA, 5755 bp, Homo sapiens
ggcgctcagcgcaggcaggtccccctgctgccgggtcccatttgttgccggctctgactcggggcggccgcggcgcgcggagctccggggagtcaggcggagcagccgcgcagccacgacggagcagcagcgggactggccgccccgcgcccccttcgccgccgtgcccttccccggcgcgctcaccccgttctcgggatgggattgtagcggcggcgcggactcggcggggatcgcggcggaggcggcggcgtcggcggcggcgtcggcggccgagcggggctccatgttttcccctggccaggaggaacactgcgcccccaataaggagccagtgaaatacggggagctggtggtgctcgggtacaatggtgctttacccaatggagatagaggacggaggaaaagtagatttgccctctacaagcggcccaaggcaaatggtgtcaaacccagcaccgtccatgtgatatccacgccccaggcatccaaggctatcagctgcaaaggtcaacacagtatatcctacactttgtcaaggaatcagactgtggtggtggagtacacacatgataaggatacggatatgtttcaggtgggcagatcaacagaaagccctatcgacttcgttgtcacagacacgatttctggcagccagaacacggacgaagcccagatcacacagagcaccatatccaggttcgcctgcaggatcgtgtgcgacaggaatgaaccttacacagcacggatattcgccgccggatttgactcttccaaaaacatatttcttggagaaaaggcagcaaagtggaaaaaccccgacggccacatggatgggctcactactaatggcgtcctggtgatgcatccacgagggggcttcaccgaggagtcccagcccggggtctggcgcgagatctctgtctgtggagatgtgtacaccttgcgagaaaccaggtcggcccagcaacgaggaaagctggtggaaagtgagaccaacgtcctgcaggacggctccctcattgacctgtgtggggccactctcctctggagaacagcagatgggctttttcatactccaactcagaagcacatagaagccctccggcaggagattaacgccgcccggcctcagtgtcctgtggggctcaacaccctggccttccccagcatcaacaggaaagaggtggtggaggagaagcagccctgggcatatctcagttgtggccacgtgcacgggtaccacaactggggccatcggagtgacacggaggccaacgagagggagtgtcccatgtgcaggactgtgggcccctatgtgcctctctggcttggctgtgaggcaggattttatgtagacgcaggaccgccaactcatgctttcactccctgtggacacgtgtgctcggagaagtctgcaaaatactggtctcagatcccgttgcctcatggaactcatgcatttcacgctgcttgccctttctgtgctacacagctggttggggagcaaaactgcatcaaattaattttccaaggtccaattgactgacgcccttgacagccatctacgactttattaacaggttactgtgaagattttgccactaactctagattttacctttttgtaatgctgtttatcagaggagggtgacaggggctggaaataaagagaggggacatggtgatgaaacatggcaggagtgtaacagataccagtggtgtgttgcatgctcaaaacagcagcgtcgtcattgaagtctgcttgattaaaccataatatctttgtaataattggatttaaaatgctatgcttctatttttaaccttgggtttttaaccaagtttttttttttttgtaatcttggacaagactttaaatcatattttacagatgtagaagaaatttattcaaaagtgtgggctcatgaagttcacttcagtgcagtgtggtgtaggtgttacgcgaagggcgcacagtgtctagaaatacttgatcgtggctcaaacctgaccagacagcagaggggcggctctgtacagtgtgactggtggacagatggccttaggcacaggtggttttgaaatctggggctttttctgatttatttttctgacttgttgggggagagaatattcataacttgtgggctttttttttttttaacttcagtggaatttactttagatattcattcatcaaatacatgggacttcacaaacaattttccataactttttagcctgtcttttgttatttctgcctaatatgatttgccccgatactcatcttgcacggccagaactgtttggttgattaaaatacatcagctcttaaaaactcattaactgagggtaattacagtagtagacatggtctgggtactatactaccatgtttatttgctgactgaattaagatttaagaatgattaaaaataagcttttactttttaaaaccacttgaggtttcataaagcttggggtttttttttttcctttgttaagaaagccaaccaatcacaatgatatagtcattgttgtgcactcccttttcaccatctgtcaccttcccttgcagcttaaggagcccagtaagttttgaaaatgtttgcgaatcaaactaaatttaagtgggatgattagatatacacaacaccaagtggtacatctgcagagataattcaaaattcctgcttttgagagagcaaatgagtgttgctgaggaataattaaatgagaatttcataggagctccaccattcctgttactttcatttcattttgattaataattcttggatgcttggcatcgatcgtatcactgctcctagaaggtaaagatcctttaggacatgagactggtagaagctggctgagataaaataagtatttatttaaactaatgttctcttaatttgaccattgcagatttgggtgacttttttttaacctttgtacatatacgtaatttatatgattctaatgtactatatccatacttgaattggttttttcgtattttgcctactggcaaatattttgcctattttcagtcgttctaacctatttgaatacgcttttccttaaagtgatacgataatattactcttgattgctgctgcttaatttgatgtaatatgtttaaagttcagcctctcagttttaatatagctttatttttcagtggagatcattgtttaggatgagacatttttggttttggttttgtttgggtaaattttaaatggtgtgaaaatcgatgacaacagtcctcttacagatagcttgctgtattctgtatagcttactctacctgcagacagaaaatgaaagaaaaaaatggacttgcctagaataatatattgaatgccttttgatttagccagagtctctgatgattagctttcactgatagagtatgtcttttcagcctgtaattctttgggccccaaagaatgacaaaggaggcactcgttctcttttcttgctgtatgcctagaaagtggttgaaggattcttgatgccctaaaaccatcttgtaagctaaatggtcttgcatccagaaaggccagattttacctaccaagaaaaaaagatatttttccagagagttaggtatatcataattttccatttcaagtcctgtttataagtctagtcattctgcaacgtgacatatcccccaaaatgaagttaccttccaagttggacacgtcccgtagttgggcatatgtctaactaaaagtttctgacttttagtaaattcagcttaaatataagttgaaatttgggaaataatttccaagctcttggaaggggtaacagtgaaccgccctccatgggctccacatcttttcctttggcttccaaagtcaggtcccgcccaccctgcctaaggaactgcagagaggtggcaaatcagcaaaaaggacaccaggctcttcttggccacttgtaggaagatccctttacaattttgactaaggagattttttttttcacagttgagttagtttgtgaaaataaagaactctgtagctcaccaaggtggagaaacgcaattcagaaaagtaatttctccaaggtcacttctttttttatgtcttgccatcactttaaaggactagccccactcccccatgtgtatacacaaggaaattgcagaccaattagttgtcttggcctgactctaatgccttttgcaagtagctttccagaagtaaaagtcccagtgatgtattcccatagaaatatttttcagttgtttatgtcgtttactacaaaaaaaaagattcagagtggatggagtacaactctgagtatttttctagtccggaattttttattaataatcggtgctgccgggtcatgcatgctgcaactctcaacatttcccttatttggttcagcttttagcaaaaagggctacagttcaccctgcagagtattaaggtttctggatttttttctcccaactgtggcccaaaagaattaaaatctgttaatataaatagagaacatatttatcattcctcgatagttaattatagactttggtacctttgtgcctcagggaagccacgtgatataactggttatagaatttcagggttagggtttaaagaaaggagaaagccattggaaaaatgatgggctccattaaggagactaatgaatctggatgcagaaatatgtcagaaactggcataaacatgattgtagtagaatttattttccagtaccaatagggaaattattttaagttattacatttactgtattgggaaacttgaggagaactctttagttcataaagcttcaatgtcttttttttttttttcatggaaaaactcaaacctctgttatttgggagctcagtattgtgtggacacttacgagagttttctgcttaattgaagtgtaatataggttgtagaattgttacctgcagttctatggttttgtttcacttcttttcttttttaaagccattctgttctttggatgtgcttgaaagggtgtgtgattacaccattgttaatgctgggtaaaaactatcttcttgcagccttgcctcataacagtggaatttctgatagacaaaccacaggactttgattttaagccaaatccatctccatccctttactgtcaatcttctgtcccagtagtttagcctttgtggcttaggttatgatgcgcctccttctgtgcgaccaatgagacgacttcagcatctttttaaaataatctaagcatcattgaagcagtaacacaaaaaaaaggttcagtattttctttttagtataacttacatcctttcaaataagtctttgccctcatgaagaatccctagaggaagataaggaaaataagtattttccagttttgcttgacagtttctaaacaaacaaaaataaactcaatgaaaggaaagatgtttctttttagctgagatgacagattgcttctctgtattaaatagtctagaagttaaggggatggtcacatttaccatgtattgtgttattagcagttaaattttatgaatatgtttgtaaaattgttgttttatatttcatgtcaaattgaaaagtttatttcttcactattgtacctgtggaaatacaagccattttacaggaaaaaatcttcaaaaactattaaatggatatcagcctgtttgtgagccaaaaaaaaaaaaaaaaaaaaaaaaaaaaaaaaaaaaaaaaaaaaaaaaaaaaaaaaaaaa

SEQ ID NO: 2264 - DNA, 5093 bp, Homo sapiens
gcgcagactcagttcctggagaaagatggcgacagccgagaagcagaaacacgacgggcgggtgaagatcggccactacattctgggtgacacgctgggggtcggcaccttcggcaaagtgaaggttggcaaacatgaattgactgggcataaagtagctgtgaagatactcaatcgacagaagattcggagccttgatgtggtaggaaaaatccgcagagaaattcagaacctcaagcttttcaggcatcctcatataattaaactgtaccaggtcatcagtacaccatctgatattttcatggtgatggaatatgtctcaggaggagagctatttgattatatctgtaagaatggaaggctggatgaaaaagaaagtcggcgtctgttccaacagatcctttctggtgtggattattgtcacaggcatatggtggtccatagagatttgaaacctgaaaatgtcctgcttgatgcacacatgaatgcaaagatagctgattttggtctttcaaacatgatgtcagatggtgaatttttaagaacaagttgtggctcacccaactatgctgcaccagaagtaatttcaggaagattgtatgcaggcccagaggtagatatatggagcagtggggttattctctatgctttattatgtggaacccttccatttgatgatgaccatgtgccaactctttttaagaagatatgtgatgggatcttctatacccctcaatatttaaatccttctgtgattagccttttgaaacatatgctgcaggtggatcccatgaagagggccacaatcaaagatatcagggaacatgaatggtttaaacaggaccttccaaaatatctctttcctgaggatccatcatatagttcaaccatgattgatgatgaagccttaaaagaagtatgtgaaaagtttgagtgctcagaagaggaagttctcagctgtctttacaacagaaatcaccaggatcctttggcagttgcctaccatctcataatagataacaggagaataatgaatgaagccaaagatttctatttggcgacaagcccacctgattcttttcttgatgatcatcacctgactcggccccatcctgaaagagtaccattcttggttgctgaaacaccaagggcacgccatacccttgatgaattaaatccacagaaatccaaacaccaaggtgtaaggaaagcaaaatggcatttaggaattagaagtcaaagtcgaccaaatgatattatggcagaagtatgtagagcaatcaaacaattggattatgaatggaaggttgtaaacccatattatttgcgtgtacgaaggaagaatcctgtgacaagcacttactccaaaatgagtctacagttataccaagtggatagtagaacttatctactggatttccgtagtattgatgatgaaattacagaagccaaatcagggactgctactccacagagatcgggatcagttagcaactatcgatcttgccaaaggagtgattcagatgctgaggctcaaggaaaatcctcagaagtttctcttacctcatctgtgacctcacttgactcttctcctgttgacctaactccaagacctggaagtcacacaatagaattttttgagatgtgtgcaaatctaattaaaattcttgcacaataaacagaaaactttgcttatttcttttgcagcaataagcatgcataataagtcacagccaaatgcttccatttgtaatcaagttatacataattataaccgagggctggcgttttggaatgcaatttgcacagggattggaacatgatttatagttaaaagcctaatatgcagaaatgaattaagatcattttgttgttcattgtgcagtatgtatatagcataatatacacagtgaattataggtctcaggcttacttgatttttggctattttatatttagtgtacacagggctttgaaatattaatttacataaaggccttcatatattattacgtgttatatattacgtgttataaatttattcaataaatatttgcctagaattcccaagacctttataggtgattttgttttctgggctccttaacttcataaatagctagtatcttccagcagtagtaacagtctggataacttcttccatatccctccctctttgtttttttgagacagtgtcactttgtcacccaggctggagtgcaatggtgtggtctcggctcactgcaacctccacctcccgggttcaagtgattctcccgcctcagcttcctgagtagctggaactacaggcgtgtgccaccacacccggctaatttttcgtatttttagtgtagacggggtttcactatgttgcccaggctggtctcgaactcctgaccgcgtgatccaccacctcagcttcccaaagtggtgggattacaggcgtgagccaccgcacccggcctccatatcccccttttaaaattctgtagtgtatggtaagtcatatcagatatcagacctaatttaaatttcattttagctttacaagtccaaaaacacagaatttatatattcagatactctagcactaattttagtcttaaaatattcccacgatattctgtacacaaaatgttctttttgttacaagagctgagttgcatatactgtagataaatcatattatttttgccaatttcacaaattcctctggcccatcatgtcagtcattattgagtatatgcacacattgctacttatttgattatgtatcttttaaattgattcagtgcatagaaaactatctcttacaaactttaagtgctctgatatgacttcccccccaaattttattatgaacatttttaaaaacagaaaaattgaaaaactgtttggtaagcacatgtatatctaccatttagattcagcagttgttaatgttttgtcatttgttttctctatacctatatatgtatagatacagctagttatgcatatatatgcatatatgtgtttgtttgtgtatgtatatatgcttttttccccctgaaccatttggatgttacagacatacttatcaccgtgaaaatacttcaagtatctcctacagataatgacattctcctaaaaatccgtaataccattgtaaaagtaataattccccaatatcatctaatcaagccatatttaaatttctgaagttaactccaaatttctttatagctgattatttcaaactaggatccaattaaagtttacatatgacacttggttataactctttagttggatataacattattattattttgataaaatatggaacaaatcaattctattaataagtggtcacatttgttttgggcttaaattactttttaaagatactggattttcctaagatttctgatttacactgatatttttttttgtcattcttaattgcatcacacaatagatgtaaatgaagatgtagtcacctcagataaaattggtatcgtgtatgataatattgtatcatttatatttgccttatgttaactttaagaaattgatttttttgtattaatcattttcccattgcaacagagctatattttttctattttaagaatcatattttaggattatttttggcaaatacagtgagcacttatgtaaccagatgataatgaactcaaatgtcatgatagcttgcataaatggtgactctagtagatttgactcaagcacttctagaatcatgcactgaattcaaaagaaaaatcttgctgctttttgtccagggcttgttctattcaacttctaatttgaaagctgtacaaagtaatagaagttccatttaaatatgagttcaaaactgtatttactttttatgtggccctctctttaggggattctaattttacttagggtctctaagtgcagcataatgttcctgatgttaacagaagactgtatttttaaagttacaaatttgtatatggaattaagtaatggcgctatatacgctgttgtggggaggggggaagaaaaggaggaaccaattaaataggaccttttaaaaattgttaattttgtaaactttgcttctcttataagttattgtgattcattttagttactgtgttttattttgaaaatatttaaatattgcacttctataaatagtatgataaatgcacagacaattgcagtaaattcttttttaagctaggatatttgaaatgacaacctttggttaagtgtgtcaaggttgcaacagaattttcacaatttttttgttgtttgcaaattgttactaatattgaagaggtaagggaggcaatgcaaatgatttttaatctttttttattatcttttcagcagtttatattttttgtgactttatgcaaccatatttttactttgtcttgacaactgaaagatgtataaggttttttgccagaaatgtactgtatacatagttttaagtataacagattttactgatatgtaaaaattttgccattaaaataaatgatttctcactgagaggaacttttctaccaggttggggcatatgggagcttaatatatcatatctaatttaaaataatttcactgaaataaactccattgcttttacctaatttttttcttgagatgcttttgtagtttttcagagttttagatgattttatacaaaatcctctgcctagcactgctctttttgatgttgtagtgacaccatttacattgaattaatgcttggtagcctggggctagatgtggaactccatggatctgtgttctgactggcacctttggaatgaaagaaaagtgtgtgctgtccaaattttttccccttaattctttccctcatcttctcacccataatagaaattttatttccattgtgagttctgacaagaatgaaattccacatacaacataactgtaaattgttggtaggtagaagttaatatttgtggttcatgtatattttgaccagagtatatttaagtatataatttcagcttccttgatttagaaatatgatataataaagaaaaactccatttatcatctgttaaaaaaaaaaaaaaaaa

SEQ ID NO: 2265 - DNA, 5138 bp, Homo sapiens
gcgcagactcagttcctggagaaagatggcgacagccgagaagcagaaacacgacgggcgggtgaagatcggccactacattctgggtgacacgctgggggtcggcaccttcggcaaagtgaaggttggcaaacatgaattgactgggcataaagtagctgtgaagatactcaatcgacagaagattcggagccttgatgtggtaggaaaaatccgcagagaaattcagaacctcaagcttttcaggcatcctcatataattaaactgtaccaggtcatcagtacaccatctgatattttcatggtgatggaatatgtctcaggaggagagctatttgattatatctgtaagaatggaaggaaatctgatgtacctggagtagtaaaaacaggctccacgaaggagctggatgaaaaagaaagtcggcgtctgttccaacagatcctttctggtgtggattattgtcacaggcatatggtggtccatagagatttgaaacctgaaaatgtcctgcttgatgcacacatgaatgcaaagatagctgattttggtctttcaaacatgatgtcagatggtgaatttttaagaacaagttgtggctcacccaactatgctgcaccagaagtaatttcaggaagattgtatgcaggcccagaggtagatatatggagcagtggggttattctctatgctttattatgtggaacccttccatttgatgatgaccatgtgccaactctttttaagaagatatgtgatgggatcttctatacccctcaatatttaaatccttctgtgattagccttttgaaacatatgctgcaggtggatcccatgaagagggccacaatcaaagatatcagggaacatgaatggtttaaacaggaccttccaaaatatctctttcctgaggatccatcatatagttcaaccatgattgatgatgaagccttaaaagaagtatgtgaaaagtttgagtgctcagaagaggaagttctcagctgtctttacaacagaaatcaccaggatcctttggcagttgcctaccatctcataatagataacaggagaataatgaatgaagccaaagatttctatttggcgacaagcccacctgattcttttcttgatgatcatcacctgactcggccccatcctgaaagagtaccattcttggttgctgaaacaccaagggcacgccatacccttgatgaattaaatccacagaaatccaaacaccaaggtgtaaggaaagcaaaatggcatttaggaattagaagtcaaagtcgaccaaatgatattatggcagaagtatgtagagcaatcaaacaattggattatgaatggaaggttgtaaacccatattatttgcgtgtacgaaggaagaatcctgtgacaagcacttactccaaaatgagtctacagttataccaagtggatagtagaacttatctactggatttccgtagtattgatgatgaaattacagaagccaaatcagggactgctactccacagagatcgggatcagttagcaactatcgatcttgccaaaggagtgattcagatgctgaggctcaaggaaaatcctcagaagtttctcttacctcatctgtgacctcacttgactcttctcctgttgacctaactccaagacctggaagtcacacaatagaattttttgagatgtgtgcaaatctaattaaaattcttgcacaataaacagaaaactttgcttatttcttttgcagcaataagcatgcataataagtcacagccaaatgcttccatttgtaatcaagttatacataattataaccgagggctggcgttttggaatgcaatttgcacagggattggaacatgatttatagttaaaagcctaatatgcagaaatgaattaagatcattttgttgttcattgtgcagtatgtatatagcataatatacacagtgaattataggtctcaggcttacttgatttttggctattttatatttagtgtacacagggctttgaaatattaatttacataaaggccttcatatattattacgtgttatatattacgtgttataaatttattcaataaatatttgcctagaattcccaagacctttataggtgattttgttttctgggctccttaacttcataaatagctagtatcttccagcagtagtaacagtctggataacttcttccatatccctccctctttgtttttttgagacagtgtcactttgtcacccaggctggagtgcaatggtgtggtctcggctcactgcaacctccacctcccgggttcaagtgattctcccgcctcagcttcctgagtagctggaactacaggcgtgtgccaccacacccggctaatttttcgtatttttagtgtagacggggtttcactatgttgcccaggctggtctcgaactcctgaccgcgtgatccaccacctcagcttcccaaagtggtgggattacaggcgtgagccaccgcacccggcctccatatcccccttttaaaattctgtagtgtatggtaagtcatatcagatatcagacctaatttaaatttcattttagctttacaagtccaaaaacacagaatttatatattcagatactctagcactaattttagtcttaaaatattcccacgatattctgtacacaaaatgttctttttgttacaagagctgagttgcatatactgtagataaatcatattatttttgccaatttcacaaattcctctggcccatcatgtcagtcattattgagtatatgcacacattgctacttatttgattatgtatcttttaaattgattcagtgcatagaaaactatctcttacaaactttaagtgctctgatatgacttcccccccaaattttattatgaacatttttaaaaacagaaaaattgaaaaactgtttggtaagcacatgtatatctaccatttagattcagcagttgttaatgttttgtcatttgttttctctatacctatatatgtatagatacagctagttatgcatatatatgcatatatgtgtttgtttgtgtatgtatatatgcttttttccccctgaaccatttggatgttacagacatacttatcaccgtgaaaatacttcaagtatctcctacagataatgacattctcctaaaaatccgtaataccattgtaaaagtaataattccccaatatcatctaatcaagccatatttaaatttctgaagttaactccaaatttctttatagctgattatttcaaactaggatccaattaaagtttacatatgacacttggttataactctttagttggatataacattattattattttgataaaatatggaacaaatcaattctattaataagtggtcacatttgttttgggcttaaattactttttaaagatactggattttcctaagatttctgatttacactgatatttttttttgtcattcttaattgcatcacacaatagatgtaaatgaagatgtagtcacctcagataaaattggtatcgtgtatgataatattgtatcatttatatttgccttatgttaactttaagaaattgatttttttgtattaatcattttcccattgcaacagagctatattttttctattttaagaatcatattttaggattatttttggcaaatacagtgagcacttatgtaaccagatgataatgaactcaaatgtcatgatagcttgcataaatggtgactctagtagatttgactcaagcacttctagaatcatgcactgaattcaaaagaaaaatcttgctgctttttgtccagggcttgttctattcaacttctaatttgaaagctgtacaaagtaatagaagttccatttaaatatgagttcaaaactgtatttactttttatgtggccctctctttaggggattctaattttacttagggtctctaagtgcagcataatgttcctgatgttaacagaagactgtatttttaaagttacaaatttgtatatggaattaagtaatggcgctatatacgctgttgtggggaggggggaagaaaaggaggaaccaattaaataggaccttttaaaaattgttaattttgtaaactttgcttctcttataagttattgtgattcattttagttactgtgttttattttgaaaatatttaaatattgcacttctataaatagtatgataaatgcacagacaattgcagtaaattcttttttaagctaggatatttgaaatgacaacctttggttaagtgtgtcaaggttgcaacagaattttcacaatttttttgttgtttgcaaattgttactaatattgaagaggtaagggaggcaatgcaaatgatttttaatctttttttattatcttttcagcagtttatattttttgtgactttatgcaaccatatttttactttgtcttgacaactgaaagatgtataaggttttttgccagaaatgtactgtatacatagttttaagtataacagattttactgatatgtaaaaattttgccattaaaataaatgatttctcactgagaggaacttttctaccaggttggggcatatgggagcttaatatatcatatctaatttaaaataatttcactgaaataaactccattgcttttacctaatttttttcttgagatgcttttgtagtttttcagagttttagatgattttatacaaaatcctctgcctagcactgctctttttgatgttgtagtgacaccatttacattgaattaatgcttggtagcctggggctagatgtggaactccatggatctgtgttctgactggcacctttggaatgaaagaaaagtgtgtgctgtccaaattttttccccttaattctttccctcatcttctcacccataatagaaattttatttccattgtgagttctgacaagaatgaaattccacatacaacataactgtaaattgttggtaggtagaagttaatatttgtggttcatgtatattttgaccagagtatatttaagtatataatttcagcttccttgatttagaaatatgatataataaagaaaaactccatttatcatctgttaaaaaaaaaaaaaaaaa

SEQ ID NO: 2266 - DNA, 6311 bp, Homo sapiens
gtggggacgttgacaagtggatccaagatggcgtagaaagtaatgacaggatttggatgaagtaatggatcactaatgaactacagtgctggtgagatgtgtaagaaattataaagagctctgatgggctatttgggtgatacccagtgcagtgaactgcaggatttttgtccctgagtcatggaagacagaagagctgaaaagtcatgtgaacaagcatgtgaatcacttaagaggcaggactatgaaatggccctcaagcactgcacagaggcccttctttctcttggccagtactccatggcagacttcacagggccttgtccattggaaatagaacgcatcaaaatcgagagtcttctctacagaattgcctcatttttgcaactgaaaaattatgtgcaagctgatgaagattgtagacatgtgctgggagaaggactggccaagggagaagatgcctttcgggcagtgctttgctgcatgcagctgaaagggaagctccaacctgtatccaccattcttgccaagtcactcacaggagagtccctgaatgggatggtaacaaaggatttgacaagactaaaaacacttctctcagaaacagagacagcaactagtaacgccctctctggatatcacgtggaagacttagatgaggggtcttgtaatggttggcatttccgcccaccacctaggggaatcacaagcagcgaggaatatactttgtgtaaaagatttttagaacaaggaatctgtaggtatggtgcccagtgtacttcagcacattcccaggaagaactagcagaatggcagaaaagatatgcttcacggctgataaaattgaaacagcaaaatgagaataaacagctctcaggcagttacatggaaaccttgatagaaaagtggatgaattcattgtctcctgagaaagtgcttagtgaatgtatagaaggagtaaaggtagagcacaatcctgacctgtcagttactgtcagcaccaaaaaatcccaccagacatggacctttgctctcacttgtaagcctgcaagaatgctgtatcgtgtagcattgctttatgatgctcatcgtcctcattttagtatcattgcaatatctgccggagatagtactacccaggtatcacaagaagtcccagaaaactgtcaagaatggataggaggaaagatggcccaaaatggattagatcattacgtgtataaagtcgggatagcatttaacacagaaatatttggaacttttcgccaaaccatagttttcgactttggattggaaccagtactcatgcaaagagtaatgattgatgcagcttctacagaagatctcgaatacctgatgcatgcaaaacagcagctagtaaccacagctaaacgttgggattcttcctctaagactattatagattttgaacctaatgaaactactgatttggagaagagccttcttatcagataccaaattcccctctctgctgaccagctatttactcagtccgttttagacaaatcattgaccaagagcaactatcagtcacggttacatgaccttctttatattgaggagatagcccagtataaagaaatcagcaagttcaaccttaaagtgcaattgcagattctggcaagcttcatgctcactggtgtttctggaggtgcaaagtatgctcagaatggacaactttttggtcgctttaagcttactgaaacactttctgaagatactttggctggacgactggtgatgaccaaagtcaatgctgtttatttattaccagtccctaaacagaagttagtacagacccagggaaccaaagagaaggtttatgaagctactattgaagaaaaaacaaaggaatatatatttttaaggctatctagggaatgctgtgaagaacttaatcttcggcctgactgtgacacacaggttgaacttcagtttcaattaaatcgattacccctctgtgaaatgcactatgcactagacaggatcaaggacaatggggttttgtttccagacatcagtatgactcccaccataccatggagtcctaacagacaatgggatgaacagttggatcctcgactaaatgcaaaacagaaagaggctgttctggccattaccactccacttgcaatccagctgccgcctgtgcttatcatcggaccctatgggacaggcaaaacgttcactctagctcaggctgtcaaacatattctgcagcaacaggagactaggattctcatttgcacccattctaatagtgctgctgatctctacataaaggattatttacatccatatgtagaagcaggcaatccccaggcaagacctctcagggtatatttcagaaatcgctgggtaaagactgtccacccagttgtgcatcagtactgtttgatctcaagcgcacattccacctttcagatgccccagaaagaagatattcttaaacatcgagtggtggttgttaccttgaatacttcccagtacctctgtcagttggaccttgaacctgggttttttacacacattctattagatgaagctgcccaggccatggagtgtgaaaccattatgcctctagcattagcaactcaaaacactcggattgtcttggctggtgatcacatgcagctcagtccttttgtttacagcgagtttgccagggagagaaaccttcacgtttcattacttgaccgactctatgagcattaccctgctgagttcccatgtaggattctcctgtgtgagaactaccgctcccatgaagctatcatcaattatacctctgagcttttctatgagggcaaactgatggccagtgggaagcagccagcacacaaagatttctacccactaactttctttacagcacgaggagaagatgtacaagaaaaaaatagcacagctttttataataatgcagaggtgtttgaagtggtggaacgtgtagaagagttaagaaggaagtggccagtagcgtgggggaagttagatgatggcagtattggtgtggtgactccatatgctgatcaagtgtttagaatacgtgctgaacttcgaaaaaagagattatctgatgttaatgtagaaagggtgctaaatgttcaaggaaagcaattcagagttttgtttcttagcacagtacgtacaagacatacttgtaaacataaacagacaccaattaaaaagaaagagcaacttctggaagattccacagaggacttagattatggttttttatctaactacaagcttctcaatactgccatcacaagagcacaatccctggttgctgtggtgggtgatcccattgctctgtgctctattggaagatgcaggaaattttgggaacggtttattgccctgtgtcatgaaaacagtagcctacatggaatcacttttgaacagatcaaagcccagttagaggctttagaactaaagaagacatatgtgttgaatccgctggcacctgaatttatcccccgggctctaagactgcagcattcaggaagtaccaacaaacagcagcaatcaccacccaaggggaaaagtcttcatcatacccagaatgatcacttccagaatgatggaattgttcagcccaatccttctgtacttattggcaatcctattagagcatatactcctccaccccctcttggacctcacccaaatttgggaaaatctccaagccctgttcaaagaatagatcctcacactgggacaagtattctttatgtacctgctgtctatggagggaatgtagttatgtcggtgcctttacctgtaccatggacaggataccagggtaggtttgcagttgatcctcgaattattacacatcaggcagcaatggcctataacatgaacctattacagacacatggacgaggatctcctattccttatggccttggacatcacccacctgtcaccataggccagccacaaaatcagcatcaggagaaggatcaacatgagcaaaatcgaaatggtaaaagtgatacaaataattccggacctgaaattaataagattcgaacaccagagaaaaagccaacagaaccaaaacaggttgatttggaatcaaatccacagaacagaagtcctgaatcacgtcctagtgttgtttatcccagtaccaaatttcctcgcaaagataatctcaacccaagacacataaatcttccccttcctgctccccacgcacagtatgcaatccctaatcgccactttcatccccttccccagctaccaagaccaccctttccaattccacagcagcacaccttgttaaatcagcagcagaataatttgcctgaacaaccaaatcagataccacctcagccaaatcaggtagtccagcagcaaagtcagttgaatcagcagcctcagcagccacctcctcagctttctcctgcatatcaggcgggacccaacaatgctttttttaatagtgcagttgctcatcggccacagtctcctcctgcagaagctgtaattccggagcagcagccccctcccatgctgcaagaaggccacagtcctctgagagccattgcacaacccggccccattcttccttcacatctgaatagcttcattgatgagaacccctcgggattacctataggggaggctttagatcgtatacatgggagtgtcgctctggaaacattaaggcagcagcaggcacggttccagcagtggagcgagcatcatgcctttctcagtcagggcagcgttccatacccacaccatcaccatcctcacctccagcatcttcctcagccgcccctgggattacatcagccgccagtgagggcagactggaagctcaccagcagtgccgaagatgaagtggagaccacatactcaaggtttcaagacttaatcagagaactgtctcatcgtgatcaaagtgaaacacgggaactagctgaaatgccaccacctcaatcaagacttttgcaatatagacaagtacagagtagaagcccaccagcagtcccatctcccccatccagtacagaccacagtagccacttttctaactttaatgataacagcagagacattgaagtagccagcaacccagcatttccacagcgcctcccaccccagatattcaactcacctttctcgttgccatctgaacaccttgcccctcctcccttgaaatacctggcacctgatggagcatggacttttgctaacttgcaacagaatcacctaatggggccaggttttccctatggcctacctccattgcctcacaggccaccgcagaacccttttgtacaaatacagaatcatcaacatgctattggtcaagagccatttcacccattgtcatctcgaacagtatcttcttcttcgctccctagcttagaagagtatgagcccagaggacctggtcggcccttgtaccaaagaagaatctcatctagctcagttcaaccttgttctgaagaagtaagcactcctcaagacagtctggctcagtgtaaagagcttcaggaccacagtaaccaatcttctttcaacttttcatccccggagtcctgggtaaacaccacctcatctactccttatcagaacattccgtgcaatggatccagcaggacagctcagcccagagagttgatagcgccacccaagactgtcaaaccccctgaggatcaactgaagtcggagaacctcgaggtgtccagttccttcaactacagtgtgctgcagcatcttggccagtttccaccccttatgcctaacaagcagatcgcggagtcggccaatagcagtagcccccagagctctgcggggggcaagcccgccatgtcctatgccagcgctctgcgggcccctccaaagcccaggccccctcctgagcaggccaagaagagtagcgaccctctgtctctcttccaggaactgagcctagggagctcatctggcagcaatggcttttactcatattttaaataatcactttttttttccctcaagggagaatgttttaatttctgtttgtatcagtagaattaaggtagttggacttcatctatagatgcacagttccctttgttttaatattaaatatgttctcacttaattgctttgctgctagacttgcaactaatttttttaaagtatattccattattttgcatttttgatgtgtcaaaactttgacagcttttatgtagaataaaaaaatttttaaatttgtgtattgttacatatgtttgcatcaagctagcagccaagaggttaattgtgcaactata

SEQ ID NO: 2267 - DNA, 3127 bp, Homo sapiens
atctgggtctggggatgtggtaccggctgctggcggcggccggcagtagagcggtggccaggccgctggccttgctgtggcgatgtggtggcccaggaggcggcaggacggccaagaccagcgcgagggccctgggcaaggcccgacaggcgataagctcacacctcaccctgcttgctccagtggttatggccagtgagaatgtgcggtgttgcattgcagaagaagctaggaaagctcatctggcctcctgttccagtgcttccaggggatccacgttcagaagctgactctgcaggcaagaccgacgttattttcctggtggctgtgttcaaaaccacccaaagggtttgagaaatactttaagaggagtggaaggaacacaaactgagaaacatcaacagcaccaaaaaaagagactggtgaactagagaatgctgagtctggaggagacggaggcaggagaggagggaagcaggataacgttgcctggtggaggcggatgcagaaggggggacttcccctgggatgacgaggatttccgcagtctggcccttttgggggcaggcgttgccatgggatttttctacctctattttcgagatcctggaagagaaatcacgtggaagcactttgtacagtattacctggccagaggtctggtggaccggctggaagtcgtgaacaaacaatctgtgcgtgttattcctgcccctgggacctcttctgaaacgtagctgggtgcgaagaatcaaattggaaattatggaatttgtgaatttcctgaagaatcccaagcagtatcaggacttaggagcaaaaattccaaagggagccatgctcactggtcctcctggtaccggcaagacccttcttgccaaagcaactgcaggggaggccactgtgcccttcatcactgtgaacgggtctgagttcctggaaatgtttattggcgttgggccagcaaggggttcaactctgccaccaacgtcgtggtgttggctggcaccaaccgccctgacgtcctggacccggccctcatgcggcctggccggtttcatcgccagatttacactggtcccccttacattaaaggcaggtcctccatctttaaggtccacctgcgcccactgaagctggacaagagcctcaataaggacaccctggcgaggaagctggcagtgctcaccccaggcttccctgatgtctgtttacataccaaagttaaaaagctggaatgttaccaagactgctttcttctgcccatagacggggatgactcagcactacccctcaacagagatgactttgatgactctgcccctcagcagggcttactaagcactaccccttaacagggatgactccgcactgcccctcaacagggatgactcagcagagatgactcagcactgtcccttagcagggatgacacagcaaggatgactcagcactgcccctcagcaaggatgactcagcactgccgctcaacagacatgactcagggatggcttagtactgcccctcagcagggatgactcagcaccgcctctcaacagggatgactcagcagggatgactcagcaccgcccctcaacaggcatgactctgcagagatgactcagcactgtcccttagcagggatgacacagcaaggatgactcagcactgcccctcagcaaggatgactcagcactgccgctcaacagggatgactcagggatggcttagtactgcccctcaacagggatgactcagcagggatgactcagcaccgcccctcaacaggcatgactctgcagagatgacttagtactgcccctcagcagggatgactcagtactgcccctcagcagggatgactcagcactgcccctcaacagggatgactcagcagggatgactcagcactgtcccttagcagtgatgacacagcaaggatgactcagcactgcccctcagcaaggatgactcagcactgccgctcaacagacatgactcagggatggcttagtactgcccctcagcagggatgactcagcaccgcccctcaacagggatgactcagcactgcccctcaacagggatgactcagcagggatgactcagcagtgtcccttagcagcgatgacacagcaaggatgactcagcactgcccctcaccaaggatgactcagcactgccgctcaacagacatgactcagggatggcttagtactgcccctcagcagggatgactcagcagggatgactcagcaccacccctcaacagggatgactcagcagggatgactcagcactgcccctcaacagggatgactgcagggatgactcagcactgcccctcagcagggatgactcagcactgcccctcagcagggatgactcagcagggatgactcagcaccgcccctcaacaggcatgactctgcagagatgactcagcactgcccctcagcagggatggctcagcagggatgactcagcattgcccctcaacagggatgactcagcagactcagcagggatgactcagcactgcccctcaacagacatgactcagcagggatgactcagcaccgcccctcagcaaggatgactcagcagggatgattcagcagagataactcggggatgactctgattgtccttcagcagggatgagtctgttttgctccgatggaagcatctgtagtgtccatcagcaggtgaatggccaaagtggtatatactgtagtcacattcagctataaaaaggaataaagtatcgatgcatgccacaacatgggtgaacctagaaaatactgatctaaatgcaagaagccaggcacaaaaggccacatagtatatgttcccatttatgtgaaatgtgcagaataataataaaaatgtatagaatagcaaatctgtagggacagacatgaggtgagtggttgccagaagtggaaatgggagttaactataaattgcacagggtaccttacagagatgatggaaatgtcctaaaactagattatggcaatagttgcactacgtgatcagtttattaaaaatcgttgatgtgtgtgtgtaaaatgggtggattttatggtttataaattataccttaataaaggttaacaaaaaa

SEQ ID NO: 2268 - DNA, 2947 bp, Homo sapiens
atgcgcgcgcccgggcggcgcgggatctgggtctggggatgtggtaccggctgctggcggcggccggcagtagagcggtggccaggccgctggccttgctgtggcgatgtggtggcccaggaggcggcaggacggccaagaccagcgcgagggccctgggcaaggcccgacagaagaagctaggaaagctcatctggcctcctgttccagtgcttccaggggatccacgttcagaagctgactctgcaggcaagaccgacgttattttcctggtggctgtgttcaaaaccacccaaagggtttgagaaatactttaagaggagtggaaggaacacaaactgagaaacatcaacagcaccaaaaaaagagactggtgaactagagaatgctgagtctggaggagacggaggcaggagaggagggaagcaggataacgttgcctggtggaggcggatgcagaaggggggacttcccctgggatgacgaggatttccgcagtctggcccttttgggggcaggcgttgccatgggatttttctacctctattttcgagatcctggaagagaaatcacgtggaagcactttgtacagtattacctggccagaggtctggtggaccggctggaagtcgtgaacaaacaatctgtgcgtgttattcctgcccctgggacctcttctgaaggagccatgctcactggtcctcctggtaccggcaagacccttcttgccaaagcaactgcaggggaggccactgtgcccttcatcactgtgaacgggtctgagttcctggaaatgtttattggcgttgggccagcaaggggttcaactctgccaccaacgtcgtggtgttggctggcaccaaccgccctgacgtcctggacccggccctcatgcggcctggccggtttcatcgccagatttacactggtcccccttacattaaaggcaggtcctccatctttaaggtccacctgcgcccactgaagctggacaagagcctcaataaggacaccctggcgaggaagctggcagtgctcaccccaggcttccctgacggggatgactcagcactacccctcaacagagatgactttgatgactctgcccctcagcagggcttactaagcactaccccttaacagggatgactccgcactgcccctcaacagggatgactcagcagagatgactcagcactgtcccttagcagggatgacacagcaaggatgactcagcactgcccctcagcaaggatgactcagcactgccgctcaacagacatgactcagggatggcttagtactgcccctcagcagggatgactcagcaccgcctctcaacagggatgactcagcagggatgactcagcaccgcccctcaacaggcatgactctgcagagatgactcagcactgtcccttagcagggatgacacagcaaggatgactcagcactgcccctcagcaaggatgactcagcactgccgctcaacagggatgactcagggatggcttagtactgcccctcaacagggatgactcagcagggatgactcagcaccgcccctcaacaggcatgactctgcagagatgacttagtactgcccctcagcagggatgactcagtactgcccctcagcagggatgactcagcactgcccctcaacagggatgactcagcagggatgactcagcactgtcccttagcagtgatgacacagcaaggatgactcagcactgcccctcagcaaggatgactcagcactgccgctcaacagacatgactcagggatggcttagtactgcccctcagcagggatgactcagcaccgcccctcaacagggatgactcagcactgcccctcaacagggatgactcagcagggatgactcagcagtgtcccttagcagcgatgacacagcaaggatgactcagcactgcccctcaccaaggatgactcagcactgccgctcaacagacatgactcagggatggcttagtactgcccctcagcagggatgactcagcagggatgactcagcaccacccctcaacagggatgactcagcagggatgactcagcactgcccctcaacagggatgactgcagggatgactcagcactgcccctcagcagggatgactcagcactgcccctcagcagggatgactcagcagggatgactcagcaccgcccctcaacaggcatgactctgcagagatgactcagcactgcccctcagcagggatggctcagcagggatgactcagcattgcccctcaacagggatgactcagcagactcagcagggatgactcagcactgcccctcaacagacatgactcagcagggatgactcagcaccgcccctcagcaaggatgactcagcagggatgattcagcagagataactcggggatgactctgattgtccttcagcagggatgagtctgttttgctccgatggaagcatctgtagtgtccatcagcaggtgaatggccaaagtggtatatactgtagtcacattcagctataaaaaggaataaagtatcgatgcatgccacaacatgggtgaacctagaaaatactgatctaaatgcaagaagccaggcacaaaaggccacatagtatatgttcccatttatgtgaaatgtgcagaataataataaaaatgtatagaatagcaaatctgtagggacagacatgaggtgagtggttgccagaagtggaaatgggagttaactataaattgcacagggtaccttacagagatgatggaaatgtcctaaaactagattatggcaatagttgcactacgtgatcagtttattaaaaatcgttgatgtgtgtgtgtaaaatgggtggattttatggtttataaattataccttaataaaggttaacaaaaaatgtggctaaaaaaaaaaaaaaaaaaaaaaaaaaaa

SEQ ID NO: 2269 - DNA, 1038 bp, Homo sapiens
aggagacttggcctccgcagctgccctccggccccccacggctgccgggttccggggtgcaagtgaagcagcctccccgcggaggccgcagcgccccgaccaggcctctttaagcgcaggccccgccccgggcgccaccgccccgccccgcggatcccgctcccgcaccgccatcatgatctgcctggtgctgaccatcttcgctaacctcttccccgcggcctgcaccggcgcacacgaacgcaccttcctggccgtgaagccggacggcgtgcagcggcggctggtgggcgagattgtgcggcgcttcgagaggaagggcttcaagttggtggcgctgaagctggtgcaggcctccgaggagctgctgcgtgagcactacgccgagctgcgtgaacgcccgttctacggccgccttgtcaagtatatggcctccgggccggtggtggccatggtatggcaggggctggacgtggtgcgcacctcgcgggcgctcatcggagccacgaacccggccgacgccccgcccggcaccatccgcggggatttctgcatcgaggttggcaagaacctgattcacggcagcgactcggtggagagtgcccgccgcgagatcgctctctggttccgcgcagacgagctcctctgctgggaggacagcgctgggcactggctgtatgagtagcccggcagatgcgcgtcacagaggctctcacactccagcctcctccagggcccaggtgggcgggcttctggccccaccccacagcgcttggagcatccctttggacgggctgctgaacatccacctgtctggacgttgcatggagggtggcgcaggcctctccaatccctggcgtacagggtttcctgcccgaggagctgctccaggagcctgcgcggctcgcctggaaacgtgccaggacactgtcctggtgcccagcccaacgtggtccaacgtttttttataataaagtcctcgttttcgtttcggtttgggcccaggaacaggcaaaaaaaaaaaaaaaaaaaaaaaaa

SEQ ID NO: 2270 - DNA, 2344 bp, Homo sapiens
ggcccgcccccgcgcggccgcccctcggaccaccggactggcctggggcgggacgtgggcgcgggggcgcggcgtgcggcacgctgcagggctgaagcggcggcggcggtggggactgcacgtagcccggcgctcggcatggctctcctggtgctcggtctggtgagctgtaccttctttctggcagtgaatggtctgtattcctctagtgatgatgtgatcgaattaactccatcgaatttcaaccgagaagttattcagagtgatagtttgtggcttgtagaattctatgctccatggtgtggtcactgtcaaagattaacaccagaatggaagaaagcagcaactgcattaaaagatgttgtcaaagttggtgcagttgatgcagataagcatcattccctaggaggtcagtatggtgttcagggatttcctaccattaagatttttggatccaacaaaaacagaccagaagattaccaaggtggcagaactggtgaagccattgtagatgctgcgctgagtgctctgcgccagctcgtgaaggatcgcctcgggggacggagcggaggatacagttctggaaaacaaggcagaagtgatagttcaagtaagaaggatgtgattgagctgacagacgacagctttgataagaatgttctggacagtgaagatgtttggatggttgagttctatgctccttggtgtggacactgcaaaaacctagagccagagtgggctgccgcagcttcagaagtaaaagagcagacgaaaggaaaagtgaaactggcagctgtggatgctacagtcaatcaggttctggcctcccgatacgggattagaggatttcctacaatcaagatatttcagaaaggcgagtctcctgtggattatgacggtgggcggacaagatccgacatcgtgtcccgggcccttgatttgttttctgataacgccccacctcctgagctgcttgagattatcaacgaggacattgccaagaggacgtgtgaggagcaccagctctgtgttgtggctgtgctgccccatatccttgatactggagctgcaggcagaaattcttatctggaagttcttctgaagttggcagacaaatacaaaaagaaaatgtgggggtggctgtggacagaagctggagcccagtctgaacttgagaccgcgttggggattggagggtttgggtaccccgccatggccgccatcaatgcacgcaagatgaaatttgctctgctaaaaggctccttcagtgagcaaggcatcaacgagtttctcagggagctctcttttgggcgtggctccacggcacctgtaggaggcggggctttccctaccatcgttgagagagagccttgggacggcagggatggcgagcttcccgtggaggatgacattgacctcagtgatgtggagcttgatgacttagggaaagatgagttgtgagagccacaacagaggcttcagaccattttcttttcttgggagccagtggatttttccagcagtgaagggacattctctacactcagatgactctaccagtggccttttaaccaagaagtagtacttgattggtcatttgaaaacactgcaacagtgaacttttgcatctcaagaaaacattgaaaaattctatgaattgttgtagccggtgaattgagtcgtattctgtcacataatattttgaagaaaacttggctgtcgaaacatttttctctctgactgctgcttgaatgttcttggaggctgtttcttatgtatgggttttttttaatgtgatcccttcatttgaatattaatggctttttccattaaagaataaaatattttggacaatgccgataaatgtatgaagttagtatccacatcataaattcagagtgatgtttagcagtaaatcaatattttgaagtgatacacagatgtctttcctccccacaaacttttttaaacaaaaaacaagacctcttttctttagatggtgccacctatgcccaccacaacagagattttacatggaaaccgggctcagtgagaactgatttcctgcccaatatttgtctttgggctgtctctagtgactaattattaaggaatctagctggttatacagttcaaggctttctatgttgttaatgaacctcaaaatagccgttaagacatgaaatacagcagcaggttaccaatgcgaacaggtagttcgcatttatgtaaaacattcagaaaatgaagttttgaatttgttggaacattcaaaggacttgagagcattttattgtaacttaaaaaaataaatacaactgtcactaaaaaaaaaaaaaaaaaa

SEQ ID NO: 2271 - DNA, 7595 bp, Homo sapiens
gtggtgagggtgaggaggccggagggcgcctcatcccactctggaagctgagccggcggcgggaggagctagggctggagcctctccagcctcccgcgaaggtttgagcacaaaatgaacataattagggaaaataaggatctggcatgtttctacacaacaaaacattcatggagggggaagtataagcgtgtcttttcagttggaactcatgcgattactacatataatcccaataccttagaagtaacaaatcagtggccttatggagacatttgcagcatcagccctgttggaaaaggacaaggaacggagttcaacctcacatttcgtaaaggcagtggaaaaaagtcagaaactttaaaattttctacagagcacagaacagaacttcttacagaagcattgagatttagaactgatttttcagagggaaaaatcacaggaaggagatacaactgctataagcatcactggagtgactcaagaaaacctgtaattttggaagtaactccaggaggctttgaccaaattaatcctgcaaccaacagagtactctgttcctatgactatagaaatattgaaggatttgtagatctctcagattatcaaggaggattttgtatactttatggaggatttagtagattgcatttatttgcgtcagagcaaagagaagagattattaaaagtgcaatagaccatgctggtaactacataggtatttcattgcggatcaggaaagagcctttagaattcgagcaatatttgaatcttcgctttggaaaatacagcactgatgaatccatcacatctttagcagagtttgtagtccaaaaaatatcacctagacattcggagcctgttaaaagagttctagcacttacagaaacatgtttagtagaacgtgatccggcaacctataatattgcaacattgaagcctttaggagaagtatttgcgttggtctgtgactcagaaaatccacaactttttaccattgaatttataaaagggcaagtacggaaatattcttcaacagagagagattccttattagcaagtttgctggatggagtaagagcctctggtaatagagatgtttgtgtaaaaatgacaccaacccataaaggtcagcgatgggggttactcagcatgcctgttgatgaggaagtagagagccttcacctcaggttcttagctacgcctccaaatggcaactttgcagatgctgtattcaggttcaatgctaatatttcatacagtggagtcctacatgcagtaacacaagatggtctcttctcagaaaacaaagaaaaactgatcaataatgccataacagcattactgtcccaagaaggggatgtcgttgcttcaaatgcggaacttgagagtcagttccaggctgtgaggaggcttgtggcatccaaagctggtttcctggctttcactcagcttccaaagtttcgcgagcgtctaggggtgaaggtagtaaaagcactcaaaagaagcaacaacggaataatccatgcagcagttgatatgctttgtgcccttatgtgtcccatgcatgatgactatgacttaagacaagaacagttgaacaaagcttctcttctctcgtcaaagaagtttctggaaaacttactggagaaatttaattcccatgtggatcatgggactggtgccctagttattagttcgctcttggacttccttacctttgccctctgtgctccatatagtgagacaactgaagggcagcagtttgatatgctcttggagatggtagcatccaatggaagaaccctttttaaactttttcagcatccttccatggcaataataaaaggagctgggttggttatgaaggcaataatagaggaaggtgataaagaaattgctacaaaaatgcaggagcttgccctaagtgaaggtgccttacctcgacacttgcatactgcgatgtttacaataagctcagatcaaaggatgcttacaaatagacagctaagtagacatttagtgggactctggacagctgataatgcaactgcaacaaacttgttgaaacgcattttgccgccaggcttgctggcatacttggaaagctcagatctcgtacctgagaaggatgctgatcggatgcatgttagagacaatgtgaaaatagcaatggatcagtatggaaaatttaataaagttccagagtggcaaagactagctggaaaagctgctaaagaagttgaaaaatttgccaaagaaaaagtggatcttgtattgatgcactggagggataggatgggcattgctcaaaaagagaatataaatcagaagccagtggttcttcgaaagagaagacaaagaataaaaatagaagcaaattgggatctcttctattataggtttggtcaagaccatgccaggtcaaaccttatttggaatttcaaaacacgagaagaactgaaagatactcttgaatctgaaatgagagcatttaatattgacagagaacttggaagtgcaaatgtgatctcctggaaccaccatgagtttgaggttaaatatgagtgcctggcagaggaaattaaaataggagactattacctgagattactattggaggaagatgagaatgaagaaagtggatcaattaagagatcgtatgaatttttcaatgagctttatcatcgcttcttgctcaccccaaaagtaaacatgaagtgtttatgtttacaagcccttgctattgtttatggcagatgtcacgaagaaataggaccttttacagataccagatatatcattggaatgttagagaggtgcacagataaacttgaacgagataggttgattctcttccttaacaagttgatccttaataagaaaaatgttaaggatctcatggattcaaatggaataagaatccttgtggacttgcttacccttgcacatctccatgtaagccgagctacagtaccactgcaaagcaatgtaattgaagctgctccagatatgaaaagagagagtgaaaaggaatggtattttggcaacgcagacaaagaaaggagtggcccgtatggatttcatgagatgcaagaattgtggaccaaaggaatgttaaatgcaaaaaccagatgctgggctcaaggcatggatggatggcgaccacttcagtccataccccagcttaagtggtgtctcttagccagtggacaggctgtcctgaatgaaactgaccttgctacccttatattgaacatgttgatcacaatgtgtggatattttccaagcagggatcaagacaatgccatcattcggcctctacccaaagtgaaaagactgctgtcagatagcacttgccttccccatattattcagctactgctgacctttgaccctatccttgttgagaaggttgctattttgttataccatatcatgcaagataacccacagttaccccgcctttatctgagtggagtatttttctttatcatgatgtacacaggttccaatgtgcttcctgttgctcgatttttgaaatacacacataccaaacaggctttcaagtcagaagagacaaaaggacaagatatttttcagagaagtatacttgggcacattctacctgaagcaatggtttgttacttagaaaattatgaacctgaaaagttttctgagatttttctaggagaatttgatactccagaagcaatctggagcagtgaaatgaggcgcctgatgatagagaagattgctgcccatctcgcggatttcacacctcgtcttcagagtaacacaagagcactttatcagtattgccccattcctataatcaactatccacaactcgaaaatgaactattttgtaatatttattacctcaaacaactgtgtgatacactccggtttccagattggccaattaaagacccggttaagcttctaaaagatacccttgatgcctggaagaaagaagtagaaaagaagccacctatgatgtcaatagatgatgcttatgaagtgcttaatctgcctcaaggacagggaccgcatgatgagagcaagattaggaaagcttacttcagacttgcacaaaagtaccaccctgataagaatccagaagggagggacatgtttgaaaaagtaaataaagcatatgaatttttatgtaccaaatcagcaaaaatagtggatgggccagatccagagaatataattttaattctaaaaacacagagcatcctcttcaaccgtcataaagaagatttacagccttataaatatgcaggataccccatgcttattcggactataacaatggaaacttcagatgacctccttttctcaaaagaatcaccattgttgcctgcggctacagagctagctttccatactgtcaactgttcagccctcaatgctgaagagctcagaagagagaatggactagaggtgttacaagaggcatttagtcgctgtgtggctgtcttgactcgttctagtaaaccaagtgacatgtcagtacaggtgtgtggatacataagtaaatgctacagtgtggctgctcagtttgaggaatgccgagagaagatcacggaaatgcctagcatcatcaaggatctctgtcgggtactatattttggcaagagtattccccgcgtagctgctcttggggtagaatgtgtcagttcttttgctgtggatttctggctacagacacacctatttcaggctggaattttgtggtatctccttggttttctgtttaattatgactacacactagaagagagtggcattcagaaaagtgaagaaacaaaccagcaggaggtagcaaacagccttgccaaactgagtgtccatgctctgagtcgccttggagggtatttggctgaagaacaagcaactccagaaaatccaaccataaggaaaagcttagctggcatgctgacaccctatgttgctagaaaacttgctgtggctagtgtgactgagattttgaagatgcttaacagcaacacagaaagtccatatttgatatggaacaattctacaagagcagaattacttgaatttcttgaatcccaacaagaaaacatgattaaaaaaggtgattgtgacaaaacttatggatcagaatttgtctacagtgatcatgccaaagaacttattgtaggggagatttttgttagggtgtataatgaagttcctactttccaactggaggttccaaaagcatttgctgcaagtctcttggattatataggctcgcaggcccaatacttgcacacattcatggccatcacacacgcggcaaaagtggagtcagagcaacatggagatcgcttaccgagagtagaaatggctttggaggctctgagaaatgtcataaaatacaatccaggttctgagagtgaatgcattgggcactttaagttgatattttctcttctccgagttcatggagctggtcaagtgcagcagttggctttagaggttgtgaatatagtgacatctaaccaagactgtgtcaacaatattgctgaatcaatggttttgtccagtttattggctcttctacattcattgccatcaagtcgtcagcttgttctggaaactctttatgctttgacatcgagtacaaaaataatcaaagaagcaatggcaaagggtgctttgatctatttactggatatgttctgcaattcaacacatccacaggttcgagcccaaacagcagaactttttgccaaaatgacagcagataaactgataggtccaaaggttcgaattacgttaatgaaatttctaccaagcgttttcatggatgctatgagagacaatcctgaagctgctgtacatatttttgaaggaactcatgaaaatcctgagttaatttggaatgataattccagagataaagtgtccacaacagttagggaaatgatgctagagcactttaaaaatcagcaggacaaccctgaggcaaactggaagttgcctgaagattttgctgtggtgtttggagaagcagagggtgaacttgctgttggaggagtcttcttgaggatctttattgcacaaccagcctgggttctaagaaagcctagagaatttcttattgccctgttagaaaaattaactgagctcctagagaagaacaatcctcatggagaaactctggaaaccttgacaatggcaacagtgtgtctcttcagcgcacaacctcagctggcagatcaggtcccgccattgggccatcttcccaaagttatccaggcaatgaatcataggaacaatgccattcctaagagtgccattcgggttatccatgccttgtctgaaaatgagctgtgtgttcgagccatggcatctttagagaccattggcccactgatgaatggaatgaaaaagcgagcagatactgttggtctagcctgtgaagcaattaatcgaatgtttcagaaggagcagagtgaattagtagcacaagccctgaaagcagatttggttccatacctcttaaaattactcgaaggcattggccttgaaaacctggacagcccagcagccactaaggctcagattgttaaagctctcaaggcaatgactcgaagtttgcagtatggagaacaggtgaatgaaatcctgtgccgttcttcagtctggagtgccttcaaagatcagaaacatgatttgttcatttctgagtcacaaacagcaggatacctcacaggacctggagttgctggctaccttaccgcaggtacatctacatcagtcatgtctaacctgccacctcctgtagaccatgaggcaggcgaccttggctatcagacttgaaatattcacgagagacaataaacgctgaaaggccagtgccaagtccacattcctccagctgatacgttgaagcaaactcttactgcctttctcctggtttcatgacagtgttattcctttttctataaatatatttttaggaaaaaaagtcagtgatcctaattgtatcacattataagaaagcactctgtggatcaacataagtgggtacacaagaattttttttttcttggtgtatgtaagcacatttgttcctttatatctgtttacaaaactgtgaatcaaaaagacaaaactttcttcctagtttttgtaattttttttttgaactagcatgactgtagggttgagctacagtcaacaaaaattgggctaagtcacttttccccaggaaagaatatttccctctcctgcatcaagtctgcgtggccatcctccccccaccatccaagactattaggttttgtccctgcacccttcactggcatcctcaatcattaaccttctgaaagctcacagtacacattagtatgtataactggctttaccaaattgaatgaaaaggagcttgtgcaaaaaaatttaaaaatggatgtcaagatgttatgtaaaagatgagtgtaattgtgaaatgttctatacactatcaaatatataaagctttctatattgaatgtacattatacagatcattcatatgtgtacataaaattttaaaaataaagggaattgactgctttgttaatgag

SEQ ID NO: 2272 - DNA, 2559 bp, Homo sapiens
gcgggccgaggagccgggcgcaatggagcggaagaggtgggagtgcccggcgctcccgcagggctgggagagggaagaagtgcccagaaggtcggggctgtcggccggccacagggatgtcttttactatagcccgagcgggaagaagttccgcagcaagccgcagctggcgcgctacctgggcggctccatggacctgagcaccttcgacttccgcacgggcaagatgctgatgagcaagatgaacaagagccgccagcgcgtgcgctacgactcctccaaccaggtcaagggcaagcccgacctgaacacggcgctgcccgtgcgccagacggcgtccatcttcaagcagccggtgaccaagattaccaaccaccccagcaacaaggtcaagagcgacccgcagaaggcggtggaccagccgcgccagctcttctgggagaagaagctgagcggcctgaacgccttcgacattgctgaggagctggtcaagaccatggacctccccaagggcctgcagggggtgggacctggctgcacggatgagacgctgctgtcggccatcgccagcgccctgcacactagcaccatgcccatcacgggacagctctcggccgccgtggagaagaaccccggcgtatggctcaacaccacgcagcccctgtgcaaagccttcatggtgaccgacgaggacatcaggaagcaggaagagctggtgcagcaggtgcggaagcggctggaggaggcgctgatggccgacatgctggcgcacgtggaggagctggcccgtgacggggaggcgccgctggacaaggcctgcgctgaggacgacgacgaggaagacgaggaggaggaggaggaggagcccgacccggacccggagatggagcacgtctagggcaggtgctgcggggccacgggggctccctggagtcgggtcctggcagtggggactgcctggtgaacacagatgtgcttgggatgacgggtgcctcccaagagcttcccatctccctagaagagcccaagcgtccccgtcccgtggagtcgctaaagccagccctccctgtcctttccagaggccctgccgagagcccgtgctgcctgctggagccgcctgcagacgcggtcctcggccccacgtgaaccaggctcggcggcgaagcccagccttggagacacccaggaggaaggccgtgctcctggctccctcctcggcccgtccccacttcccggggcctcggggcacacagctggggctgcccccacccgaaagaccctccacgctcgtcctctacagagtccggcttcgggaagtgccgggtgctcctgggccctgcctggctccctacgacctttgggctcgaggccagctcctccccatgcccgctgtcccagctccttgagactggagagcagccagcaggtgcccggcagctcggcgccacggcttgctgacagctgggagggtttctcggtctggaggcgtagttttgaaactcacatcacccactgtgcagcgtgaggacgggactctggtctgctgtggggggcatgcaggacggcgccactctctgccctgccatgcggctggtggtgccacagagcctcaccgtgcctgagtggcatgcccaggaggccgctctccttcagtaaatgtaacacagtcgaggcacgtcatcgggcagccttccctgtgtgccaacgccagccttcgcttctgaaaaccaaactccagccgctgccagtcgggacttggtcgcccggcgctgccagaatgctccactgccagccggcccccctgcctcggtttcccttctgtttagtggcgacacaggcacccagctttggggtggtgctgacgctcccaggggtgccaggagccactgggacagggtgaggctcccagacgctcctcgaggtgcccagctctccagggagcttctggcccaaggccgtctgagggatctgctccttaaccccccagtgccttggcgagggcaggttccaagccacagacgcctgccccgagtggactctgcggccagtccctggtgccctcctggccctgctgcccagtgagggctcctacgggtgggttcattggcctgggcccagcgagcccccacctgcattgaccttaggcccatagagagggcctgtcccggtgctgccccagccaggatctggtcgctgccccagggggactgatgggcagagtcgcccctgtggctggactgtgaccatccctgatggggcctgaccgcgggagctgaggaagcgccgctccaccgtctgccctccaaggacccgcatggaggcagtgggctggcagcttcctgctgctccctgtcagagtcaaagcacaaatcctcaggacgggctcaagggccagggcagccgagggaagctccaggtggggaccacgtcttcctgaggttggtgcccactggctgggaccctttgcagtggggtggcctcccctctgtctgcctggtggagggagccgtgggcgtggggacgtgactgaataaagccaccatgggtggatgtgcttgg

SEQ ID NO: 2273 - DNA, 1097 bp, Homo sapiens
agacttcggcggcgcagcaatggccagagcatgccgcgtcactgctccgccgccggctgctgcacacgggacacgcgcgagacgcgcaaccgcggcatctccttccacagacttcccaagaaggacaacccgaggcgaggcttgtggctggccaactgccagcggctggaccccagcggccagggcctgtgggacccggcatccgagtacatctacttctgctccaaacactttgaggaggactgctttgagctggtgggaatcagtggatatcacaggctaaaggagggggcagtccccaccatatttgagtctttctccaagttgcgccggacaaccaagaccaaaggacacagttacccacctggccccgctgaagtcagccggctcagacgatgcaggaagcgctgctccgagggccgagggcccacaactccattttctccacctccacctgctgatgtcacctgctttcctgtggaagaggcctcagcacctgccactttgccggcctccccagctgggaggctggagcctggccttagcagccccttttcagacctactgggccccttgggtgcccaggcagatgaagcaggctgcagcgcccagccttcaccagagcggcagccctcccctctcgaaccacggccagtctccccctcagcgtatatgctgcgcctgcccccacccgccggagcctacatccagaatgaacacagctaccaggtgggcagcgccttactctggaagcggcgagccgaggcagcccttgatgcccttgacaaggcccagcgccagctgcaggcctgcaagcggcgggagcagcggctgcggttgagactgaccaagctgcagcaggagcgggcacgggagaagcgggcacaggcagatgcccgccagactctgaaggagcatgtgcaggactttgccatgcagctgagcagcagcatggcctgaggggctgctggactgaccgaggggctgcccagcaagactgcagcctcttcctccctcagatcccaccagacccaccaggtgccataataaagcggattctagacggagaaaaaaaaaaaaaaaaaaaaaaaaaaaaa

SEQ ID NO: 2274 - DNA, 1215 bp, Homo sapiens
cgcctttctcagatactgaggaggcttgaacctgtgggtgggaggtgaagcggaacggtcccggcgggactgaatgcagtcgggaaggggaggacgggaagtctagccggcttggacccgccccactctgttacctgccagatgacgctgaggaaactgcttttcttctcgaggcctccgttgcctcgtctgtgcccgggcggtggtgcttacccggcggggtcgcagacttcccaagaaggacaacccgaggcgaggcttgtggctggccaactgccagcggctggaccccagcggccagggcctgtgggacccggcatccgagtacatctacttctgctccaaacactttgaggaggactgctttgagctggtgggaatcagtggatatcacaggctaaaggagggggcagtccccaccatatttgagtctttctccaagttgcgccggacaaccaagaccaaaggacacagttacccacctggccccgctgaagtcagccggctcagacgatgcaggaagcgctgctccgagggccgagggcccacaactccattttctccacctccacctgctgatgtcacctgctttcctgtggaagaggcctcagcacctgccactttgccggcctccccagctgggaggctggagcctggccttagcagccccttttcagacctactgggccccttgggtgcccaggcagatgaagcaggctgcagcgcccagccttcaccagagcggcagccctcccctctcgaaccacggccagtctccccctcagcgtatatgctgcgcctgcccccacccgccggagcctacatccagaatgaacacagctaccaggtgggcagcgccttactctggaagcggcgagccgaggcagcccttgatgcccttgacaaggcccagcgccagctgcaggcctgcaagcggcgggagcagcggctgcggttgagactgaccaagctgcagcaggagcgggcacgggagaagcgggcacaggcagatgcccgccagactctgaaggagcatgtgcaggactttgccatgcagctgagcagcagcatggcctgaggggctgctggactgaccgaggggctgcccagcaagactgcagcctcttcctccctcagatcccaccagacccaccaggtgccataataaagcggattctagacggagaaaaaaaaaaaaaaaaaaaaaaaaaaaaa

SEQ ID NO: 2275 - DNA, 1271 bp, Homo sapiens
agacttcggcggcgcagcaatggccagagcgtgagtgccgctgacagaagtcaagagaatcggctgggacggggttggggcgacaacgggccgggggggacccgacaggccagagccccttggggaggagcggcggctggaggcgcgaggctcctccggatgcccggagagccgcttgcgacttaactcccgcctctttcccagatgccgcgtcactgctccgccgccggctgctgcacacgggacacgcgcgagacgcgcaaccgcggcatctccttccacagacttcccaagaaggacaacccgaggcgaggcttgtggctggccaactgccagcggctggaccccagcggccagggcctgtgggacccggcatccgagtacatctacttctgctccaaacactttgaggaggactgctttgagctggtgggaatcagtggatatcacaggctaaaggagggggcagtccccaccatatttgagtctttctccaagttgcgccggacaaccaagaccaaaggacacagttacccacctggccccgctgaagtcagccggctcagacgatgcaggaagcgctgctccgagggccgagggcccacaactccattttctccacctccacctgctgatgtcacctgctttcctgtggaagaggcctcagcacctgccactttgccggcctccccagctgggaggctggagcctggccttagcagccccttttcagacctactgggccccttgggtgcccaggcagatgaagcaggctgcagcgcccagccttcaccagagcggcagccctcccctctcgaaccacggccagtctccccctcagcgtatatgctgcgcctgcccccacccgccggagcctacatccagaatgaacacagctaccaggtgggcagcgccttactctggaagcggcgagccgaggcagcccttgatgcccttgacaaggcccagcgccagctgcaggcctgcaagcggcgggagcagcggctgcggttgagactgaccaagctgcagcaggagcgggcacgggagaagcgggcacaggcagatgcccgccagactctgaaggagcatgtgcaggactttgccatgcagctgagcagcagcatggcctgaggggctgctggactgaccgaggggctgcccagcaagactgcagcctcttcctccctcagatcccaccagacccaccaggtgccataataaagcggattctagacggagaaaaaaaaaaaaaaaaaaaaaaaaaaaaa

SEQ ID NO: 2276 - DNA, 2955 bp, Homo sapiens
gcgacggaggtaggcttacgaggcctgtgtcgggtagaaagggtccttcctggaccgggaccctctgccacgaccatggaccgtaggaaaaagcctttggacgtcacggcctcctcgttggtagatcttaaggctgaactcttccgaaagcaagaagaattcaaacaagaaaaacttctaaaagattctggagtttttggaaaaccaaaaacaactaacaagaaaccaagtatctggagcaaacagaatgtaggcgtttcaaatcgagctgagaaggatgctgaacagaagattgaagaacagaagactttagacaaagcaagggaaaaattggaagaaaaagccaaattatatgaaaaaatgactaaaggagactttatagatgaagaagtagaggatatgtaccttgtggatttcacacagaagatcatagacaagcgcaaagaaatggaggcatctggtgcccatagagattctcaaaaggcaggagaaagggacgacgatgaggaaaaccttcctgagggagagatccctcctccccaagaccccagtgaagaatgggtggattacgtggactctttggggcgttcccggcgctgtatgagaaaggatttgccagatctgctggagatggataaaaatcttcaggggagactttttattagtcctgctaatgaaaaaaccctattatctgaagatatgagaaaagaacttcagcgccagcaatgggaggaagaagaaagagaggccctgaagaggcccatggggcccgtacattatgaagacattcgggaaaatgaggcccggcaacttggtgttgggtattttgcctttgcccgagacaaagagttgagaaacaagcagatgaaaaccttagagatgctgcgtgaacagacaacagatcagagaacaaaacgagaaaacataaaggaaaagcgaaaggctatcttagaggcaagacttgccaaacttcgacaaaaaaagatgaaaaaatcaaaagaaggtggaacagaagaagaaaatagagatggagatgttattgggcctttgccaccggagccagaggctgtgccaaccccacgtcctgctgcccagagtagcaaagtagaagtcattgtccaggagaggaaggacaccaagcctggagtgccacacatccgggagtgggaccgcggaaaagaattttcctttggatactggtcgaagaggcagtcagatctccgggctgagagagatcctgagtttgccccgccgtcagattactttgtgggtcagaagagaactggtttttccagcagccaggcatggagcagacctgggccagcacagagtgacccagggcagtgccctgaccagagccacggacctagccctgaacatacgtcacccactcctgcccccgacaacccaccacaagcccccacagttactttcaaaactctggatgacatgatttcctattacaaacaagtgacatgatctttcaaagcacgctgacttgggtttgtactttgacagtgcctttctctcccagagggagaaataactttaggaactgaattgtacctttgtcctgtcctttccctaggaggcacagacttcgggttggatttgtcagcaaggaggaaagttatggaaactttggccacttggctgttcattttattctaagtgggatagggacatacctacctggatttacatgtgagctgcgatagaatagaagtatttattctgtaaaattagacactgagatgtgcttataaccctgtttcatatctactcccacgacttactcatatttaagggttcttttccattccttttgcaaatccgagcatgcaggtgtctttattccaagggttcagcttccagatcagccgatggaccataggtcacgaggaatttctccctgtcaagcagtggaaaactgcatgggaggcaaaatgctctgttctccaagaggacccggaagtaatcacataggaaatgataaggaagaccaggaggagctcttcgtagtccagaaaggtagaagtgggagttgtttacttaattttactgtcataccatgctattacctacactcctgtgtgcagtgggcattcagtaaatgtgtgttgaaggactgggacgtacgtggaggctgctggacctggtcagagactgatgtgccttagcggcaatggttagagcttttcagtgcatcccacctccctgtcgcccccatgctcggcttcctcacattcaggagcctgacttggatcagacttggggctgcacagtggagcaggtgggttcccgtgtcattagtaataaggagagggttgggggtgggcagggctccagaaagtcagcagtgtgcctgggcacccaccccatcctctacctgccacacctcagagggttcctacagctgcacacaagcagttgagagttgatgaccaggcccatagggctcccacagctggttcccaggccagtgagtgctgtgagaatacagtagcacaagtccttgttctctgaagagtgggaaggagaggagtgagtgaagtagcctgtcccctgcaggtcctctgcgatggcattgtctcggttcccgcagtgctgcagtgtggaagggagtgccccatcctcattacagatgacacactggagtgtggaggggtcgatgacttgtgcagggtcatatggtacctaaggggcagatctcagacttaaacacaattgatgtctaacccctagacagtctttttagtgccctctgctctcagtcttgttgccctagtatcaagcaatcttagacaaacatcctgaattcttacaaacttacctctaaactctgaggataaagttgccagtccttttaatggtcagcctaatcattctgtcagcctaatcgggtaattgctttttttaataaatacacataaaaaccaaaaaaaaaaaaaaaaa

SEQ ID NO: 2277 - DNA, 6121 bp, Homo sapiens
gaattcccttttctgggcaccgccttctgctagggggttgtagatgaaagtgcctgctcccagagaagcttgtctaacctagcacagtttctaagctacccaggctgccagaccgagcgaccgtgctgccatggacacagactctcagcgttctcatctctcttccttcaccatgaagctgatggacaaattccactcacccaaaatcaagagaacgccatcaaagaagggaaaaccagctgaggtgtccgtaaagattccagagaagcctgtgaacaaagaggcaacagacagatttctaccagagggctaccctctccccttggatctggagcagcaggcagtagaatttatgtccaccagtgctgtggcttccaggtctcaaaggcagaagaacctgagctggctggaggagaaagagaaggaagttgtcagtgccctgcgctactttaagaccattgtggacaaaatggcaattgataagaaggtactggagatgcttccagggtcagccagcaaggtgctggaggccatcttacccctggtgcagaacgatcctcgaattcagcacagctcagccctctcttcctgctatagccgagtgtaccaaagcctcgccaacctcattcgctggtctgaccaagtgatgctggaaggcgtgaactcagaagacaaggagatggtgacgactgtgaagggggtcatcaaggctgtgctggatggagtgaaggagctggtcaggctcaccatcgagaagcagggacgtccgtctccgacgagccccgtgaagcccagttcccctgccagcaagcctgatggcccagcagagctccccctgacagaccgcgaggtagagatcctaaacaagacgactgggatgtcacagtcaactgagctcctcccagatgccacggatgaagaggtcgcgccccccaagcctcctctgcctggcattcgggtggttgataatagtcctccaccagcattgccacccaagaaaagacagtcggcgccgtcccctacccgagtggctgtggtggcccccatgagccgagccaccagtggctccagtttgcctgttggaatcaataggcaggattttgatgttgactgttacgcacagaggcgactgtcaggaggcagccactcatatggtggagagtcgccccgcctctccccctgcagcagcataggcaagctcagcaagtcagacgagcagctgtcctctctggacagggacagtgggcagtgctcccggaacacaagctgtgaaacactagaccactatgatcccgactatgaattcctccagcaagacctctctaacgcagaccagatacctcagcagacggcctggaaccttagcccgttgccagagtctttgggggagtctgggtctccatttcttggccctcctttccagctgcctcttggcggccatccccagccagacggacctctggccccagggcagcagacagatacgccacctgctctccccgagaagaagcgcaggagcgcagcctcccagacggcggacggctctggctgcagggtgtcctacgagcggcatccctcgcagtatgacaacatctctggggaggacctgcagagcacagccccgatcccatccgtcccctacgcgccctttgctgctattctgccctttcagcatggaggttcctcagcccctgtcgaatttgtgggtgattttactgctcctgagtcaaccggtgacccagaaaaaccacctcctctaccagagaagaaaaacaaacacatgctggcctacatgcagttgctggaggactactcggagccgcagccctctatgttctaccagacgccacagaacgagcacatctaccagcagaagaacaagctcctcatggaggtatacggcttcagcgactccttcagtggggtggactccgtgcaggagctggccccgccgcccgccctaccccccaagcagcggcagctggagccaccggctgggaaagacggacatcccagagatccctcagcggtcagcggcgtccctgggaaggacagcagagacggcagtgagagggccccaaagtcaccagatgctctggagtcggctcagtcggaggaggaagtggacgagctgtccctcattgaccacaacgaaattatgtccaggctgacgctcaagcaggagggtgatgacgggccggacgtccgcggaggatctggggacatcttactggtccatgctactgagactgacaggaaagatttggtgttgtactgcgaggcattcctgaccacctacaggaccttcatctccccagaggagctcatcaagaagctgcagtacagatatgagaaattctctccctttgccgacacattcaagaagcgcgtcagcaagaacacgttcttcgtgctggtacgggtggtggatgagctctgcctggtggagttgacagaagagatcctgaagctgctgatggaactggtcttccgcctggtgtgcaatggggagctgagcctggcccgtgtgctccggaagaacatcctggacaaggtggaccagaagaagctactcaggtgtgccacctccagccagcccctggcagcccggggggtagcagccaggccggggaccttgcacgactttcacagccatgagatagcggagcagctaacgctgctggatgctgagctcttctataaaatagagattcctgaggttttgctttgggcaaaagagcagaatgaggagaagagccccaacttgacccagttcacggagcacttcaacaacatgtcctactgggtccggtccataatcatgttacaggaaaaggcccaggacagggaacggctgctcttgaagttcatcaagatcatgaagcacttgcggaagctgaataacttcaactcctacttggccatcctctctgccctggactcggcgcccatccgcaggctggagtggcagaagcagacttcagagggcctggccgagtactgcacactgatcgacagctcgtcctccttccgagcctaccgggccgccctctcggaggtggaaccgccgtgcatcccgtacctggggctgatcctgcaggacctgaccttcgttcacctgggaaacccagactacatcgacgggaaagtgaacttctccaagcggtggcagcagttcaacatcctcgacagcatgcgctgcttccagcaggcgcactatgacatgcggaggaacgacgacattataaacttcttcaatgacttcagtgaccacctggctgaggaggccctatgggaactgtctctgaaaattaaacccaggaacataacaaggagaaaaacagaccgggaagagaagacctaggagcagacgccgggatccaggagaatgctcgaggggcgcagagggcagctcccagaccggagaggaccttggacctgttaggcgcatggcaggagtcccggcctcggagccatgaggctggccagccctcagcggggccgggcgggagctggagcctgccagccgcttcctgcctccttcctctgtgggagcagacccgtgggcctcagggcagccagcaggcaggtcttgttgccaatttacaaaccggtggttttctggtttggttttgttttctgcttttacttccatctctcccctcttgaccttccacccactcccctccagggagagagcagcagagacctcatcagcagaccaaggaagtggtgggtgctccccctccctaagctccagggtccctgaatcttctgaaatctcaaatgagtggaggcctcctggggtggcctgtcctgcaggggccctggaatgggggcaagcagctgggtgggcagaatgcagagtagactcgggggaggatcctttcactttccgcttccccttctgatgcatggaggatggtgtgagcttttcagcaggcccggaaaggtacgcaggtgacgccttagcagccccgcagctggtgctctgccccgcggtactggcgccatcagggcctcccttgcccgcctgagagcagcagcagtctctgtcatcccgtcgccccttaccccccaccccaggccactgggcccctcccacaccacctggggagctgagaagaggaggctggagtaagggaggacttgatcatccaagaaatactttttattgctgggagtcttctgaacctcaccaaactgaggccagagctgagctcctgggggagttaattcagaggggagaggccagcacctccctcctccatcgctcgctgtgtgccttaaactccatctcatgtccctccccatcccctggctttccctccctccttgccccatcctgggccagccagcagggctcctcctctggctcttcagacctttcagccagtgctgtcagtgcccctgggagggaagggcatccctgaggcacccgaatggtccctcagggtgcagggaggcagaagcctggccacagaggagcctcctaaggcagcagctgcagcaagcgcaccctctccccactctccccacgccagagcggcttccagagcagatgctgtttccatcctcctcgtcaaaaccattctcgctgctgagcttgacaatctgggcaaggcttgtggggcgcttgacaaacagaatctgccctgtgccgcctggttccgtggcctccagcatgagcctgcaggcagggcgctgcgggaacccagttgtgctgccccagcccatgcctccgggtctgctgtgcatgaatgagtgctcacttgtcccgggtttaggacgtggtcaagtgaacagcagggtctaactgtgcttacttagcccagttcaaacagaacaaaggaaaaatatagaaagcaacatctgttgatcatttaggtttttttttaaaccaccatgtcactttgagtccttcatgggtttttgaacagcatttatcaagaagaaaatgtgggctttttcccctctcccgtgttttgtttgtcctgtagatagagggaggaaagccgtgcagtggcaggcgggaccccctctggtggcgggaccccctcttgcggtggtcttgcggggccagccgggacctgtcactttattatttaaggagtgtgtgtgtagagtcgctggcttattaacagtattgtgtgtgggttgggtttttagtttgttccttctttttgaagtcccttcatttcaatccttgactctctctccccttcccttgcccagctctgttgaatgctgctgtgcgcgtgtgagggccgctctgcacacagggcccttgggttgtgtgaactgaaattctccctgtatttgtgagactcgcaggagtccccatctgtagcacaggcaatgccagtgccatgctgcagcctcagaaaccaggcctctcactccagcagcaggcagaaccgtgtctgtggtcgggtgctgtccacagctctgtctgccttgttcttgggcttgagctggatagaggtggggtctcttcaccttccctgaattcagaacagaccctgtgcctggccccagtgtgcccaggcaattccccaggccctcactgggagcccttggtgttctgagcagcagggcccaggcagcacatgagcagtgcccaggggctccctgcgtgaggacggcaaggtgcgatgtatgtctaacttattgatggcaggcagccccctgtgccccctaagcctggccctggttattgctgagctctgtgctcagtgctgcggcctggccgtggctcgtctgttcctttggggggcccgggcgggttgtgggaatcagtcttcacagacagacgtgagccaggcggaggactcgttccttgcagaggtcagtcctcacctgcaggtgtcggggtgggggggggcaaggaggggcaggcacacaccatgtctgacctgaacccgattctggggagcatcttcccgctccggccccacgacctccacagggttacattgtaatatatatgccccagctaacctgtctgatggtggcatcttcctgcagacatttcaaacatgtaacttttatatgaaaaaaaataaacacagatgaaagctgcccaatgccaaaaaaaaaaaaaaaaaaaaaaaaaaaaaaa

SEQ ID NO: 2278 - DNA, 6204 bp, Homo sapiens
gagattcctcaggcttcccttgtgaggctgcctgggttctgccgctgggtggtttgggatgtccaagagatatcccctttcagccagtgactcggtcctcagttgctgctccggaaagacgctggggctgggaagggccctgtgtcctctggctttaaaatgggcaatgctattgaaaaacagaagcccttgaaacgaagtcatctgtacccctggaaacaagactctcagcgttctcatctctcttccttcaccatgaagctgatggacaaattccactcacccaaaatcaagagaacgccatcaaagaagggaaaaccagctgaggtgtccgtaaagattccagagaagcctgtgaacaaagaggcaacagacagatttctaccagagggctaccctctccccttggatctggagcagcaggcagtagaatttatgtccaccagtgctgtggcttccaggtctcaaaggcagaagaacctgagctggctggaggagaaagagaaggaagttgtcagtgccctgcgctactttaagaccattgtggacaaaatggcaattgataagaaggtactggagatgcttccagggtcagccagcaaggtgctggaggccatcttacccctggtgcagaacgatcctcgaattcagcacagctcagccctctcttcctgctatagccgagtgtaccaaagcctcgccaacctcattcgctggtctgaccaagtgatgctggaaggcgtgaactcagaagacaaggagatggtgacgactgtgaagggggtcatcaaggctgtgctggatggagtgaaggagctggtcaggctcaccatcgagaagcagggacgtccgtctccgacgagccccgtgaagcccagttcccctgccagcaagcctgatggcccagcagagctccccctgacagaccgcgaggtagagatcctaaacaagacgactgggatgtcacagtcaactgagctcctcccagatgccacggatgaagaggtcgcgccccccaagcctcctctgcctggcattcgggtggttgataatagtcctccaccagcattgccacccaagaaaagacagtcggcgccgtcccctacccgagtggctgtggtggcccccatgagccgagccaccagtggctccagtttgcctgttggaatcaataggcaggattttgatgttgactgttacgcacagaggcgactgtcaggaggcagccactcatatggtggagagtcgccccgcctctccccctgcagcagcataggcaagctcagcaagtcagacgagcagctgtcctctctggacagggacagtgggcagtgctcccggaacacaagctgtgaaacactagaccactatgatcccgactatgaattcctccagcaagacctctctaacgcagaccagatacctcagcagacggcctggaaccttagcccgttgccagagtctttgggggagtctgggtctccatttcttggccctcctttccagctgcctcttggcggccatccccagccagacggacctctggccccagggcagcagacagatacgccacctgctctccccgagaagaagcgcaggagcgcagcctcccagacggcggacggctctggctgcagggtgtcctacgagcggcatccctcgcagtatgacaacatctctggggaggacctgcagagcacagccccgatcccatccgtcccctacgcgccctttgctgctattctgccctttcagcatggaggttcctcagcccctgtcgaatttgtgggtgattttactgctcctgagtcaaccggtgacccagaaaaaccacctcctctaccagagaagaaaaacaaacacatgctggcctacatgcagttgctggaggactactcggagccgcagccctctatgttctaccagacgccacagaacgagcacatctaccagcagaagaacaagctcctcatggaggtatacggcttcagcgactccttcagtggggtggactccgtgcaggagctggccccgccgcccgccctaccccccaagcagcggcagctggagccaccggctgggaaagacggacatcccagagatccctcagcggtcagcggcgtccctgggaaggacagcagagacggcagtgagagggccccaaagtcaccagatgctctggagtcggctcagtcggaggaggaagtggacgagctgtccctcattgaccacaacgaaattatgtccaggctgacgctcaagcaggagggtgatgacgggccggacgtccgcggaggatctggggacatcttactggtccatgctactgagactgacaggaaagatttggtgttgtactgcgaggcattcctgaccacctacaggaccttcatctccccagaggagctcatcaagaagctgcagtacagatatgagaaattctctccctttgccgacacattcaagaagcgcgtcagcaagaacacgttcttcgtgctggtacgggtggtggatgagctctgcctggtggagttgacagaagagatcctgaagctgctgatggaactggtcttccgcctggtgtgcaatggggagctgagcctggcccgtgtgctccggaagaacatcctggacaaggtggaccagaagaagctactcaggtgtgccacctccagccagcccctggcagcccggggggtagcagccaggccggggaccttgcacgactttcacagccatgagatagcggagcagctaacgctgctggatgctgagctcttctataaaatagagattcctgaggttttgctttgggcaaaagagcagaatgaggagaagagccccaacttgacccagttcacggagcacttcaacaacatgtcctactgggtccggtccataatcatgttacaggaaaaggcccaggacagggaacggctgctcttgaagttcatcaagatcatgaagcacttgcggaagctgaataacttcaactcctacttggccatcctctctgccctggactcggcgcccatccgcaggctggagtggcagaagcagacttcagagggcctggccgagtactgcacactgatcgacagctcgtcctccttccgagcctaccgggccgccctctcggaggtggaaccgccgtgcatcccgtacctggggctgatcctgcaggacctgaccttcgttcacctgggaaacccagactacatcgacgggaaagtgaacttctccaagcggtggcagcagttcaacatcctcgacagcatgcgctgcttccagcaggcgcactatgacatgcggaggaacgacgacattataaacttcttcaatgacttcagtgaccacctggctgaggaggccctatgggaactgtctctgaaaattaaacccaggaacataacaaggagaaaaacagaccgggaagagaagacctaggagcagacgccgggatccaggagaatgctcgaggggcgcagagggcagctcccagaccggagaggaccttggacctgttaggcgcatggcaggagtcccggcctcggagccatgaggctggccagccctcagcggggccgggcgggagctggagcctgccagccgcttcctgcctccttcctctgtgggagcagacccgtgggcctcagggcagccagcaggcaggtcttgttgccaatttacaaaccggtggttttctggtttggttttgttttctgcttttacttccatctctcccctcttgaccttccacccactcccctccagggagagagcagcagagacctcatcagcagaccaaggaagtggtgggtgctccccctccctaagctccagggtccctgaatcttctgaaatctcaaatgagtggaggcctcctggggtggcctgtcctgcaggggccctggaatgggggcaagcagctgggtgggcagaatgcagagtagactcgggggaggatcctttcactttccgcttccccttctgatgcatggaggatggtgtgagcttttcagcaggcccggaaaggtacgcaggtgacgccttagcagccccgcagctggtgctctgccccgcggtactggcgccatcagggcctcccttgcccgcctgagagcagcagcagtctctgtcatcccgtcgccccttaccccccaccccaggccactgggcccctcccacaccacctggggagctgagaagaggaggctggagtaagggaggacttgatcatccaagaaatactttttattgctgggagtcttctgaacctcaccaaactgaggccagagctgagctcctgggggagttaattcagaggggagaggccagcacctccctcctccatcgctcgctgtgtgccttaaactccatctcatgtccctccccatcccctggctttccctccctccttgccccatcctgggccagccagcagggctcctcctctggctcttcagacctttcagccagtgctgtcagtgcccctgggagggaagggcatccctgaggcacccgaatggtccctcagggtgcagggaggcagaagcctggccacagaggagcctcctaaggcagcagctgcagcaagcgcaccctctccccactctccccacgccagagcggcttccagagcagatgctgtttccatcctcctcgtcaaaaccattctcgctgctgagcttgacaatctgggcaaggcttgtggggcgcttgacaaacagaatctgccctgtgccgcctggttccgtggcctccagcatgagcctgcaggcagggcgctgcgggaacccagttgtgctgccccagcccatgcctccgggtctgctgtgcatgaatgagtgctcacttgtcccgggtttaggacgtggtcaagtgaacagcagggtctaactgtgcttacttagcccagttcaaacagaacaaaggaaaaatatagaaagcaacatctgttgatcatttaggtttttttttaaaccaccatgtcactttgagtccttcatgggtttttgaacagcatttatcaagaagaaaatgtgggctttttcccctctcccgtgttttgtttgtcctgtagatagagggaggaaagccgtgcagtggcaggcgggaccccctctggtggcgggaccccctcttgcggtggtcttgcggggccagccgggacctgtcactttattatttaaggagtgtgtgtgtagagtcgctggcttattaacagtattgtgtgtgggttgggtttttagtttgttccttctttttgaagtcccttcatttcaatccttgactctctctccccttcccttgcccagctctgttgaatgctgctgtgcgcgtgtgagggccgctctgcacacagggcccttgggttgtgtgaactgaaattctccctgtatttgtgagactcgcaggagtccccatctgtagcacaggcaatgccagtgccatgctgcagcctcagaaaccaggcctctcactccagcagcaggcagaaccgtgtctgtggtcgggtgctgtccacagctctgtctgccttgttcttgggcttgagctggatagaggtggggtctcttcaccttccctgaattcagaacagaccctgtgcctggccccagtgtgcccaggcaattccccaggccctcactgggagcccttggtgttctgagcagcagggcccaggcagcacatgagcagtgcccaggggctccctgcgtgaggacggcaaggtgcgatgtatgtctaacttattgatggcaggcagccccctgtgccccctaagcctggccctggttattgctgagctctgtgctcagtgctgcggcctggccgtggctcgtctgttcctttggggggcccgggcgggttgtgggaatcagtcttcacagacagacgtgagccaggcggaggactcgttccttgcagaggtcagtcctcacctgcaggtgtcggggtgggggggggcaaggaggggcaggcacacaccatgtctgacctgaacccgattctggggagcatcttcccgctccggccccacgacctccacagggttacattgtaatatatatgccccagctaacctgtctgatggtggcatcttcctgcagacatttcaaacatgtaacttttatatgaaaaaaaataaacacagatgaaagctgcccaatgccaaaaaaaaaaaaaaaaaaaaaaaaaaaaaaa

SEQ ID NO: 2279 - DNA, 2035 bp, Homo sapiens
agtgctcatgctcgctgcaggggtcggaggtcagggcgagcgtctcgcaggccgtaggaggaagatggcggtggagtcgcgcgttacccaggaggaaattaagaaggagccagagaaaccgatcgaccgcgagaagacatgcccactgttgctacgggtcttcaccaccaataacggccgccaccaccgaatggacgagttctcccggggaaatgtaccgtccagcgagttgcagatctacacttggatggatgcaaccttgaaagaactgacaagcttagtaaaagaagtctacccagaagctagaaagaagggcactcacttcaattttgcaatcgtttttacagatgttaaaagacctggctatcgagttaaggagattggcagcaccatgtctggcagaaaggggactgatgattccatgaccctgcagtcgcagaagttccagataggagattacttggacatagcaattacccctccaaatcgggcaccacctccttcagggcgcatgagaccatattaaattctatttactatttgttgaatttatttttccgtcagttatgtaaaataaacatactcttcttcctcccctgattattgccattaagcctttaaattctaaacaaattataatgcatcatctatttaggagttagatttggatgtgctattgtatgattacgaatagtctgtatgtttcaagcccttctgtaaaatatgaagaaaagtgctcttagcattctgtgtaaaactgtactgttaaatatatgtgtgtaatcagcctgagtgtgaaagttaatggaggcctgggaacagggtttatactaagtagtggaggagcgtatggttaagcccaaaggggcagaacaagaaagccacgggattgtatgaaatcaaacatgagtttgtggtgtagactgctgtatgcagttggaaaggacacgtgagagtgagctcaagtggcagcagaggcagtttggaataagctgcggcaagttgaagaagctgtgttggacgagattgccccgccttgatcagggtaccatgacataaaaggttaaagaacaggcaacacaatgagcacttaagtttttaacatgtggggaatagggcattttaaaggctggaaccagttcagaggaaacaagggtttgggtagaggtagaaaggtttaattaaccctggagatctgcaaatggagggaggggtgaaggaggaatcttaagaccgagggagaagagccaaggacaaggtcaggttgaatgagtaggaggtgttcacacatcctcttgtgtgctaggtagtggcgtgcatctgatctgagaggcagtaaagcagtgatgaagacagtgcagcagaacattgaagtcctgattgcagcagtgactctgcaaccttggataaattatttcaatctttattttgtaaaacggagataacggcctataggattgttaagactgaatattttaaaagagcttagaatggtgcctgacaaatgagaaacaataaatactgattattggccataaagtggtattaaaactggatctcttttcttccatggcactactctcattttgaagtttatgaacagtacgacagtgtattgtaaattccctttagtttgttacagtagccaattgaaaatgtatatcccaaaatttaaaaaaaaaagtaccagcagcaataaaattgcactagttttatctggtacatacaaaaacagccatttaaaatctgatgattctgtggaattggtgtccctgttagcaatggcagagaccagcctggagcctagatctggtgcttcttctgtgctgtggtttaccccaaacctttaggttgtttattcattcagattagatagactggagccataaagttaatttgcacctagctttttggagaatagccatgattaactgctattcgtggtgggggtgggggggaaccctatgatttactatgcagatgaagagggtaggaactaaataaaggactttgtaagccaaaaaaaaaaaaaaaa

SEQ ID NO: 2280 - DNA, 4081 bp, Homo sapiens
gtggggacgactcttctggaggaagcagcgcgggcttgaccggcgtcggcccgccgcctccgctgccgcttcgccccaatccggtccctctggcccggcctgacccggtctggcttgttcgggctcagcggccgcgaggccgcagctcccgatggaaatcatattatgtagaatacttgggtgacatctgcctgagagatctccaagaattacagaagacaaaaatactaatgcatttgagaaagcggtagttttggggggagggggaaaaagcaactgctttcctgatctgcaacttggctggatgctaagatgtcagtggacatgaatagccaggggtctgacagcaatgaagaggactatgacccaaattgtgaggaagaggaagaagaagaagaagacgaccctggggacatagaggactattacgtgggagtagccagcgatgtggagcagcagggggctgatgcctttgatcccgaggagtaccagttcacttgcttgacctacaaggaatctgagggtgccctcaatgagcacatgaccagcttagcttctgtcctaaaggtatctcattcagttgctaaacttatattagttaatttccactggcaagtttcagagatattggacagatacaagtccaattctgctcaactgcttgttgaggctcgagttcagcctaatccatcaaaacatgttcccacatcccatccccctcaccactgtgcagtgtgtatgcagtttgtgcgaaaggaaaacctactctctctggcctgtcagcaccagttttgccgcagctgctgggagcagcactgctcagttctcgtcaaggacggcgtgggcgtgggagtctcttgcatggctcaggactgtccactccgtacaccagaggactttgtgtttccattgcttcccaatgaagaattgagagagaaatacaggcgctacctcttcagggactatgtggagagtcattaccagctccagctgtgccctggtgcagactgccccatggttattcgggtacaggagcctagagctcgccgagtacagtgcaatcggtgcaacgaggtcttctgtttcaagtgtcgtcagatgtatcacgcacccacagactgtgccacaatccggaaatggctcacgaagtgtgcagacgactctgaaacagccaactacattagtgctcacactaaagactgtcccaagtgcaacatctgcattgagaagaatggaggctgcaatcacatgcaatgctccaaatgtaaacacgacttctgctggatgtgtctaggagattggaagactcatggcagtgaatactatgagtgcagtcgttacaaggagaatcctgacatcgtgaaccagagccaacaagcccaggcgagggaagccctcaagaagtacttattctactttgagaggtgggaaaaccacaataaaagcttgcagctagaggcacagacataccagcggattcacgagaagattcaggagagggtcatgaacaatctggggacatggatcgactggcagtacctacagaatgctgccaagctcttggccaagtgtcgatacaccctgcaatacacctacccatatgcatattacatggagtccggacccaggaagaagctgtttgaataccagcaggctcagctggaggctgagatcgaaaacctctcatggaaagtggagcgtgcagacagctatgacagaggggacttggagaaccagatgcatatagcggagcagcggaggagaaccctgctgaaagatttccatgacacctaagttgggatgtggatgtgccggggtgaggaagatgtggctgcaaggtctcccggctgccatactgcatgctgcaggctctgcctttcatgaccccaggcaacagccagggccccactcctgagagacactggcaacacctcttagttgatttctgttttcttctcttttcactttttgtttctaccagggtagaggccatgttgaactggcctcttttcaggacttttatttccccctggatggttgttgggagggagggaaagtgttttctgaatggctattaatagtattagatcattacaacttatgtaactttcaaaggttgtacaattatacaaaaaaaaaaaaaaggcaaactataggataacacagagccctttttgaaaataaattggcattggagtgttttaccctctagctgttttacttagaatgtaacatatgctgcctacccacctcaaaatgtctgtactgcaagagggccctgggcctctgctttccatattcacgtttggccagagttgtagtcccaaagaagagcatgggtggcagatggtagggaattgaactggcctgtgcaatgggcatggagcacaaggggtcacagcatgcctcctgccttaccgtggcagtacggagacagtccagaacatggtcttcttgccacggggtgttgttgtctctggtggtgctgcatgtctgtggctcacctttattcttgaaactgaggtttacctggatctggctactgaggctagagcccacagcagaatggggttgggcctgtggccccccaaactagggggtgtgggttcatcacagtgttgccttttgtctcctaaagatagggatctacttttgaagggaattgttcctcccaaataaatttgctttaccttggtcctttcttttgtgccagtattcaagtggtatagctctgagcagggtcacatttggccaaacctgacactgtcttgctgcattctcctttggcaaacatcagggtcagaattcaggatagcccttcctagggcactggactttctggcatgggggctgtgtttgcacaagttattttcatgttacctggagagtgtccagaggctgctctgaggctgaggtgtgttcccccttgcctggttccagctgtcagagggataccatcctagggtctgggaatccaaggccacgagactccttggtttgtggtccgagatcctgtactaaggagggtctggccagaggaacagaccagcttttgcacaatgaagcgcaagggaacaagtggtttgcctggtgtcctacctgtcctgaacctggtcctgtgggccattgaaaagttagatctgtgatctctggggtttttgtggctttgttcaatgcttccactctagggcaggcagagcagtctatactctcccaagcctgcttgacctccaagtagagctgatacagagatctgtgaatattgtgatagaaattctttggtattcatacatttcagctgcaagtcagcaatttcccaggtaccatgtaagctataaaacagtcattcttaaagacagaggatagctgtgactcatgggatcatgaggtccatggctggttgcaggttccctttttccttcctcaggttttgtctcttcctgtgttgtccccagcaagggagagactgtggggtggattgggagaacagattaggagtatagcaaatgaacccagaatggaacagtggggagctaactgtgaatgaggagagtacctgctgcaggacctggaggtcaggtgtgaatgctgtattggcacagggaataaatatcctggcgtctggagccttcacctctccgtcaagtccttcctgtgatactgccatggcacaggatctgagttgcagctctgcaccctaaatcacaccctgggcattgtctgggctgcagggctgccaggttctgtacttgtgtccagctgtggccctggatgctggagctggagggttttctgtgctcagactgtagcctgtagctcttggcctgtgtagagccccctcctgtgccctcagtggctgtcgtttgttaacatcatcaggaagatgggaaaggtcaggcagaatttttctgccctacaaagggtggaagagaaaggacacagtattttcatgaatttaccatatatctttgtttttcttcaacgaaaaagttaattgaggcaatgtcatctgctcaaagttgagtggtttattcacaataaactgtaagtttctgattataaaaaaaaaaaaaaaaaaaaa

SEQ ID NO: 2281 - DNA, 811 bp, Homo sapiens
gcagaagcgttccgtgcgtgcaagtgctgcgaaccacgtgggtcccgggcgcgtttcgggtgctggcggctgcagccggagttcaaacctaagcagctggaaggaaccatggccaactgtgagcgtaccttcattgcgatcaaaccagatggggtccagcggggtcttgtgggagagattatcaagcgttttgagcagaaaggattccgccttgttggtctgaaattcatgcaagcttccgaagatcttctcaaggaacactacgttgacctgaaggaccgtccattctttgccggcctggtgaaatacatgcactcagggccggtagttgccatggtctgggaggggctgaatgtggtgaagacgggccgagtcatgctcggggagaccaaccctgcagactccaagcctgggaccatccgtggagacttctgcatacaagttggcaggaacattatacatggcagtgattctgtggagagtgcagagaaggagatcggcttgtggtttcaccctgaggaactggtagattacacgagctgtgctcagaactggatctatgaatgacaggagggcagaccacattgcttttcacatccatttcccctccttcccatgggcagaggaccaggctgtaggaaatctagttatttacaggaacttcatcataatttggagggaagctcttggagctgtgagttctccctgtacagtgttaccatccccgaccatctgattaaaatgcttcctcccagcataggattcattgagttggttacttcatattgttgcattgcttttttttccttct

SEQ ID NO: 2282 - DNA, 1031 bp, Homo sapiens
gcagaagcgttccgtgcgtgcaagtgctgcgaaccacgtgggtcccgggcgcgtttcgggtgctggcggctgcagccggagttcaaacctaagcagctggaagggccctgtggctaggtaccatagagtctctacacaggactaagtcagcctggtgtgcaggggaggcagacacacaaacagaaaattggactacagtgctaagatgctgtaagaagaggttaactaaaggacaggaagatggggccaagagatggtgctactgtctactttagggatcgtctttcaaggcgaggggcctcctatctcaagctgtgatacaggaaccatggccaactgtgagcgtaccttcattgcgatcaaaccagatggggtccagcggggtcttgtgggagagattatcaagcgttttgagcagaaaggattccgccttgttggtctgaaattcatgcaagcttccgaagatcttctcaaggaacactacgttgacctgaaggaccgtccattctttgccggcctggtgaaatacatgcactcagggccggtagttgccatggtctgggaggggctgaatgtggtgaagacgggccgagtcatgctcggggagaccaaccctgcagactccaagcctgggaccatccgtggagacttctgcatacaagttggcaggaacattatacatggcagtgattctgtggagagtgcagagaaggagatcggcttgtggtttcaccctgaggaactggtagattacacgagctgtgctcagaactggatctatgaatgacaggagggcagaccacattgcttttcacatccatttcccctccttcccatgggcagaggaccaggctgtaggaaatctagttatttacaggaacttcatcataatttggagggaagctcttggagctgtgagttctccctgtacagtgttaccatccccgaccatctgattaaaatgcttcctcccagcataggattcattgagttggttacttcatattgttgcattgcttttttttccttct

SEQ ID NO: 2283 - DNA, 3837 bp, Homo sapiens
atcgcctcctccctccccaagatggcgtccttgctgcagtcggaccgggttctctatctagtccagggagaaaagaaggttcgggccccgctctcgcaactctacttctgccgctattgtagcgaactgcggtcgctggaatgtgtgtctcacgaggtggactcccattattgtcccagttgtttagaaaatatgccatcggctgaagccaaactaaaaaagaatagatgtgccaattgttttgactgtcctggctgcatgcacaccctctctactcgggccacgagcatctccacacagcttccagatgacccagccaagaccaccatgaagaaagcctattacctggcatgtggattttgtcgctggacgtctagagatgtgggcatggcagacaaatctgtagctagtggcggttggcaggaacctgaaaatcctcacacacaacggatgaacaaattgattgaatattaccagcagcttgctcagaaagagaaggttgagcgagatcgcaagaaactggcacgacgtagaaactatatgcctctggctttttcggacaaatatggtcttggaaccaggcttcagcgaccacgagctggtgcatccatcagtacccttgccggactttcccttaaagaaggagaggatcagaaagagataaagattgagccagctcaggctgtggatgaagtggaacctctacctgaagactattatacaagaccagtaaatttaacagaggtaacaacccttcagcagcgtctgttacagcctgacttccagccagtctgtgcttcacagctctatcctcgccacaaacatcttctgatcaaacggtccctgcgctgccgtaaatgtgaacataatttgagcaagccagaatttaacccaacgtcaatcaaattcaaaatccagctggtcgctgtcaattatattccagaagtgagaatcatgtcaattcccaaccttcgctacatgaaggagagccaggtcctcctgactcttacaaatccagttgagaacctcacccatgtgactctcttcgagtgtgaggagggggaccctgatgatatcaacagcactgctaaggtggtggtgcctcccaaagagctcgttttagctggcaaggatgcagcagcagagtacgatgagttggcagaacctcaagactttcaggacgatcctgacattatagccttcagaaaggccaacaaagtgggtattttcatcaaagttacaccacagcgtgaggagggtgaagtgaccgtgtgcttcaagatgaagcatgattttaaaaacctggcagcccccattcgccccattgaagaaagtgaccagggaacagaagtcatctggctcacccagcatgtggaacttagcttgggcccacttcttccttaaaaggttccactggagggcagatcccaaaggacagtatcaccgtaaacctgcgttaaaatgtggaagctgctgcttcattaggccttgtttataacgatgtacccatgcactacggaattctattgctaagaaagtgggagcataggcaaggcattgggaacacagggtagctgctgttgctcttgctctcacccctgttgacaccagtaagtctgtgtcttcctcactgaaccctgcacgttgagtaacagcagcataattccatcctaggaaagggggatgggtgttccttggaaatggcattgtatttaccacctgagaaactctgtactgtctcttgatctgatctcactaaggatcacaatgtcacagatgaaacttaaatgataacccaaaggtagacctgctgttaatgatccagcattggtcacaatgtaccaactgctttctgcattccgttaaatatcatctaacagtctaaaacatatcccttcattgccataatggctgccattttgccatagatttccatataactgaaaaactgaattgtcactttatctttagtatcatgatgattggaaaaacctgtgaagttgttaaggcactctcatttgccctctttttctaagtgaatacaggacacgtattagttgttcttaatttttttcccagtaaaatatggatcttttaagaagaatttgagaagcaaacaattacatgtcatgtcaagggggtagcagattccattcgttttcaatattgccacaatacccagggattaatgctgccacaggggggcaatctttatttgtcttacttcctaccccttccctgttctgcctctttaactcagttaagttgttctgtttgggacctggaaaagaacccaaagaaaacctgagtggacaggttcatttctggaatgcagaaaacattttaaaggctagatttttagaatattctcaactagcattctttccattgatttgaaggggaaattaactattataatctcttgaatccaaaactggatattaagaactttcccccttactaagtttaagacttttgtcatgtggtgagtcaaataagaccattttgattgtaaaccataaaatagttcagcaagtagcccacagttctggcctaacagcagacttgctgttttcacttggtatcctggagttgggttgctaaccttaatttctatgatgttttctaaaatgaaacttgataaagtagaccaccagctgcaccgtgttttctgtaaaagtattgttagtaagtggccaagagacttgaggaaaatacagattttttgtttaccttggtcttgttttaagtcttaaaaaattaaagataacattataatgtagaatacagatgggacatagtccttgtaagcttcccttgaaaatgttttaaatatttaggaagcttttaaaagacactaaattgtactctaaaagacactaaattgtactaattgtacaaaggtcaagccaattttatgaaacagtcctacagagtaatatatgtgatgcagtgtaagaaggaaaatactcatctctaacattatggtaataacatttagcctcttaggagttggagcagggggatgggtaattacagatttgcagactatagaaagagtttcatttttttgtgaccccacagagtctcaaatttttattccactacctgctagagcctactgtgaaatcactgctccatatttgccagtggaggaaatgggcatagagtagagaatagcttcatatgtttacacgtttgcatagactacacacatgtcatgcgtttatggcaggtagctggtatttattccccaaagtaataatgttgaagtatgggtctcatcattcccatacacagaaacacaaaacactttgatcataaacttttttcttcagaagccaaactaacttgcagaataatagagccactggtttaatgtttcctcaagataggttttagtgtaagctagtattctgtgtgttcgtagaaatgattcaatacctgcagctggtgaattaggaattgtatttgttgccttttttatattagatgaggtgcaaaaattttaatgctagtcagtatgcaccaccacaggaaagttagatcccattagcacttgagactacagctttggaaacttaggctaagttaatttggatttgttacttgattcacctactgaccttttcttttgtttgaagtgcttatcagcataatgagctaagtgtcatgcatatttgtgaagaaacacccttgtttggtcccttttgggacagagaggtactccttgatctttatgaatgaccggttactgttttgccttattgcttaacttaatgtagtgaaataaagcagaccaagcttgaaaaaaaaaaaaaaaaaaaaaaaaaaaaa

SEQ ID NO: 2284 - DNA, 2589 bp, Homo sapiens
gtttccctctgcgttcgctccgcgctgctggaggctgtcgtcccaatgctccccaaacggcggcgagcgcgggtcgggtcccctagcggcgatgccgcttcctccacgccgccctcgacgcgcttcccgggagtcgccatctacctggtcgagcctcgcatgggtcgcagccgccgggccttcctcacaggcctggcgcgctccaaaggcttccgcgtccttgacgcctgcagctccgaagcgacacatgttgtgatggaagagacctcagcagaggaggccgtcagctggcaggagcgcaggatggcagctgctcccccgggttgcacccccccagctctgctggacataagctggttaacagagagcctgggagctgggcagcctgtacctgtggagtgccggcaccgcctggaggtggctgggccaaggaaggggcctctgagcccagcatggatgcctgcctatgcctgccagcgccctacgcccctcacacaccacaacactggcctctccgaggctctggagatactggccgaggcagcaggctttgaaggcagtgagggccgcctcctcaccttctgcagagcagcctcggtgctcaaggcccttcccagccctgtcacaaccctgagccagctgcaggggcttccccactttggagaacactcctctagggttgtccaggagctgctggagcatggagtgtgtgaggaggtggagagagttcggcgctcagagaggtaccagaccatgaagctcttcacccagatcttcggggtcggtgtgaagactgctgaccggtggtaccgggaaggactgcgaaccttagatgacctccgagagcagccccagaaactaacccaacagcagaaagcggggctccagcaccaccaggacctgagcaccccagtcctgcggtccgatgtagatgccctgcagcaggtggtggaggaagctgtggggcaggccctgcctggggccaccgtcacgctgaccggcggcttccgcagggggaagttgcagggccatgacgtggacttcctcatcacccaccccaaggagggtcaggaggcggggctgctgcctagagtgatgtgccgcctgcaggaccagggcctcatcctgtaccaccagcaccagcacagctgctgtgagtcccctacccgcctggcccaacagagccacatggacgcttttgagagaagtttctgcattttccgcctaccacaacctccaggggctgctgtggggggatccacgaggccctgcccatcctggaaggccgtgagagtggacttggtagttgcacccgtcagccagttccctttcgccctgctcggttggactggctccaagcttttccagcgggagctgcgccgcttcagccggaaggagaagggcctgtggctgaacagccatgggctgtttgacccggagcagaagacatttttccaagcggcttcagaggaagacatcttcagacacctgggccttgagtaccttcctccagagcagagaaacgcctgaacctgcctgtgtcccccacttccactcaggaaattgggctgcccccaaactggccactgaatgtctccaagcaaatatgctgccccctgaccccaccttcaaccctccccgccaaggcctggctcttccggaggtcaattgtgcctgcaggatcagttgagcccctgctggtgtgctgcagggtgtgatgaggtgggagccctcagtgccagcctcatcactgtgtgaccctgggtctgctcttagcctccccatggctcacgttcctgccctggatgggatgtgagtggggcccacatcgtggagctgtggtggggcctgcagtcatgaatggcaagtggtccctgatgtgcagtgtctcattagttgcactgcagttaactgtggctcctgcagggcaccctgcccagaatgcccagaagagaaccatgcatacctgcactgcatttgagagccatgagctggaggctgtggttcgtgccagcaaggagcctactgtctggtgtgctgtaggcatctggagagggagagggcctgggtaggagctgggaggaagataattttcaactatggggcttcagtactgcagcgccccgaagccaggctctgtgcttctgcctttaaggcctgttctcagcacaatgtctcaaaaataggtcatatcctgccactcccgtcgcagagccctttaatggttccaaaccctaagtccacacatagcccctggctctggcatctctccagccccactggccccgagctgcttgactcaccggcttcctatttgatgcacccaggcccccttgtggccaactccctccccttctcactgaggcagaagcactgaggtgggctggacatgggtgccctccacgtccctcatatccccaggcacactctggcctcaggttttgccctggccatgtcatctacctggagtgggccctccccttcttcaggccttgaatcaaaagccactttgttaggcgaggatttcccagaccactcatcacattaaaaaatattttgaaaacatgcagtaaaaaaaaaaaaaaaaaa

SEQ ID NO: 2285 - DNA, 1633 bp, Homo sapiens
cccacgtgacgggcgcccgcggaaggcgacatgggctccgctccctgggccccggtcctgctgctggcgctcgggctgcgcggcctccaggcgggggcccgcagggccccggaccccggcttccaggagcgcttcttccagcagcgtctggaccacttcaacttcgagcgcttcggcaacaagaccttccctcagcgcttcctggtgtcggacaggttctgggtccggggcgaggggcccatcttcttctacactgggaacgagggcgacgtgtgggccttcgccaacaactcggccttcgtcgcggagctggcggccgagcggggggctctactggtcttcgcggagcaccgctactacgggaagtcgctgccgttcggtgcgcagtccacgcagcgcgggcacacggagctgctgacggtggagcaggccctggccgacttcgcagagctgctccgcgcgctacgacgcgacctcggggcccaggatgcccccgccatcgccttcggtggaagttatggggggatgctcagtgcctacctgaggatgaagtatccccacctggtggcgggggcgctggcggccagcgcgcccgttctagctgtggcaggcctcggcgactccaaccagttcttccgggacgtcacggcggactttgagggccagagtcccaaatgcacccagggtgtgcgggaagcgttccgacagatcaaggacttgttcctacagggagcctacgacacggtccgctgggagttcggcacctgccagccgctgtcagacgagaaggacctgacccagctcttcatgttcgcccggaatgccttcaccgtgctggccatgatggactacccctaccccactgacttcctgggtcccctccctgccaaccccgtcaaggtgggctgtgatcggctgctgagtgaggcccagaggatcacggggctgcgagcactggcagggctggtctacaacgcctcgggctccgagcactgctacgacatctaccggctctaccacagctgtgctgaccccactggctgcggcaccggccccgacgccagggcctgggactaccaggcctgcaccgagatcaacctgaccttcgccagcaacaatgtgaccgatatgttcccggacctgcccttcactgacgagctccgccagcggtactgcctggacacctggggcgtgtggccccggcccgactggctgctgaccagcttctgggggggtgatctcagagccgccagcaacatcatcttctccaacgggaacctggacccctgggcagggggcgggattcggaggaacctgagtgcctcagtcatcgccgtcaccatccaggggggagcgcaccacctcgacctcagagcctcccacccagaagatcctgcttccgtggttgaggcgcggaagctggaggccaccatcatcggcgagtgggtaaaggcagccaggcgtgagcagcagccagctctgcgtggggggcccagactcagcctctgagcacaggactggaggggtctcaaggctcctcatggagtgggggcttcactcaagcagctggcggcagagggaaggggctgaataaacgcctggaggcctggccatgtaaaaaaaaaaaaaaaaa

SEQ ID NO: 2286 - DNA, 929 bp, Homo sapiens
ccgtggcccacgaagctcatctttgaactgtccccgccttctcccgccttgacttgtgaccctaggccctttggggcgcctctgacccagctagccagatcccggacccaaaccatgttccctgtgaaggtgaaagtggagaaatcagagctggagatggccaaagcccggaaccaactggatgctgtcttgcagtgtctgctggagaagagtcacatggacagggagcgtctggatgaggaagctgggaaaacaccctcagacacccacaataaggactgctccatcgcagccactggcaaaaggccatctgcccgcttcccccaccagcggaggaagaagaggagggagatggatgatgggctggctgagggagggccgcagcgatccaacacatatgtgatcaagctgttcgaccggagcgtggacttggcccagttcagcgagaacacgccactgtacccaatctgccgcgcctggatgcgcaacagcccctctgtgcgcgagcgtgaatgctctcccagctcacccctgcccccgctgcctgaggatgaggagggctcagaggtaaccaacagcaagagtcgtgatgtgtacaagctgccgccacccacacccccggggccacccggagatgcctgcagatcccgcatcccatctccactgcagcctgagatgcagggcacccctgacgatgagccctctgagcccgagccctcaccctccacactcatctatcgcaacatgcagcgctggaaacgcatccgccagaggtggaaggaggcctctcatcggaaccagcttcgttactcagaaagcatgaagatcctacgagagatgtacgaacgacagtgatgttcccaggtccccccacaccagtaaacatcccccagctccacaaaaaaaaaaaaaaaaaaaaaaaaaaaaaa

SEQ ID NO: 2287 - DNA, 1728 bp, Homo sapiens
cgggaagtaggcggggtgacgtgtggttgacgagctcggcggcgggtttgctgagatctgtggccggcggcagctggtgcggggggcagctgagagcgagaggtggatcggggcggtgtgtggccagggccatgacgggcaacgccggggagtggtgcctcatggaaagcgaccccggggtcttcaccgagctcattaaaggattcggttgccgaggagcccaagtagaagaaatatggagtttagagcctgagaattttgaaaaattaaagccagttcatgggttaatttttcttttcaagtggcagccaggagaagaaccagcaggctctgtggttcaggactcccgacttgacacgatattttttgctaagcaggtaattaataatgcttgtgctactcaagccatagtgagtgtgttactgaactgtacccaccaggatgtccatttaggcgagacattatcagagtttaaagaattttcacaaagttttgatgcagctatgaaaggcttggcactgagcaattcagatgtgattcgacaagtacacaacagtttcgccagacagcaaatgtttgaatttgatacgaagacatcagcaaaagaagaagatgcttttcactttgtcagttatgttcctgttaatgggagactgtatgaattagatggattaagagaaggaccgattgatttaggtgcatgcaatcaagatgattggatcagtgcagtaaggcctgtcatagaaaaaaggatacaaaagtacagtgaaggtgaaattcgatttaatttaatggccattgtgtctgacagaaaaatgatatatgagcagaagatagcagagttacaaagacaacttgcagaggaggaacccatggatacagatcaaggtaatagtatgttaagtgctattcagtcagaagttgccaaaaatcagatgcttattgaagaagaagtacagaaattaaaaagatacaagattgagaatatcagaaggaagcataattatctgcctttcattatggaattgttaaagactttagcagaacaccagcagttaataccactagtagaaaaggcaaaagaaaaacagaacgcaaagaaagctcaggaaaccaaatgaagatgttttcagatatgtacacatttctgcttctgcacatattttcatggaaaccattatgtataaagaacttagagcaacatcctaattggctcagtgcacgtttggcaatagtgccagcctgtcttgtctttaatgcatggattcataaacttcttccctacctgcatcatgtgcatgtagtgcatattaaatgaaagtgatattaagaatgctttcccaaattccattatttgacattgagtctgacaactgttagttttctggttgtccaactaccatatgaagctagaaaatgcacaaacgatattccttatctgtaatttaaatacttaaaatttgcaattgtcagatcttgattaaactggttgtcttatttcttctcatcattaacggaaaaaaaatcagtatttctatctttgatatctaagtgttttgaggattttaaaactgaattttatctgctataccagttatttgagaaagtatgattttaatgtaaatcatttaaaaaggacaaaagtataatttccagtgattttcactgctgtcagtagaaaagtaataaacatctcaattttaaaaaaaaaaaaaaaaaaaaaaaaaa

SEQ ID NO: 2288 - DNA, 2362 bp, Homo sapiens
tcaggacgctgcagctgaaacgttccggctccggctctgctggccggtctaaagcggcagccgccggggcgcaatgcgagcggctggcgtaggcttggtggactgtcactgccacctctccgccccggactttgaccgcgatttggatgatgtgttggagaaagccaagaaggccaatgttgtggcccttgtggcagttgccgaacattcaggagaatttgaaaagattatgcaactttcagaaaggtataatgggtttgtcctgccatgcttgggtgttcatccagttcaaggacttccaccagaagaccaaagaagtgtcacactaaaggatttggatgtagctttgcccattattgagaattataaggatcggttgttggcaattggagaggttggactagatttctcccccagatttgctggcactggtgaacagaaggaagagcaaagacaagtcctaatcagacagatccagttagccaaaagactaaatttgcctgtaaatgtgcactcacgctctgctggaagacctaccatcaaccttttacaagagcaaggtgctgagaaggtactgctgcatgcatttgatggtcggccatctgtagccatggaaggagtaagagctgggtacttcttctcaattcccccttctatcataagaagtggacagaagcagaaacttgtgaaacaattgcctttaacttctatatgcttagaaacagattcacctgcactaggaccagaaaaacaggtacggaatgagccctggaacatttctatttcagcagaatatattgcccaggtgaaagggatctcagtggaagaagttatagaagtgacgacacagaatgcattaaaactgtttcctaagctccgacacttgctccagaaatagcttcaaaaccatccattacaaaatcgaatcaactgcagggggcagcatttgaaaaatagaaatgttctgatgaagaatctgaactgaagaagctgttttatagggttatagaagattgtaattgtagagaaatatttctcttagaaataaaactgggcttggatcctgaaaccctgggttctgattctagccttgtgctgcttttcaattagccgagttctggcaggatattgggaaaatactgctacttcttacattgcccttttatatagaaccaccacctgaactgaaaccattgctactgggaagggtggctcccacaggaagagtataagcactactgtgatgaggatggagtaagctaaagtatacttttttttttttttgatggagtttcgctgttgttgcccaggctggagtgcaatggcacgatcttggctcactgcaacctccacttcccaggttctagcgagtctcctccctcagcctcccaagtagctgggattacaggcatgtgccaccatgcccagctaattttgtatttttagtagagacagggtttctccatgttggtcaggctggtctcgaactcccgacctcaggtgatccgcccgcctcggcctcccaaagtgctgggattacaggcatgagccactgcgccagcctaaagtgtgttcttaccacctatttttcttcccataggagttagccagtgaagggagaatgtctggttttctatgctgtcagaaatctcttttctaggtttgtaaaattgaacttttagtacttcgaattatttctctttaagataaaaatgcatacgatttttacactgatcttagatttttgacttatgaggccagtggtttaaacaatcattattgaataccaagcccaaaagtttagttaatacaccaattgtaagttctggtctgaattttgtcaacatatttagaatgtaaatggcattattaaaaatgtatctgatttctctgtgaacagtaatatttcatatttttaagtttaaaaatgttagtgtaagccaggcacagtggcattcacctgtagtgccaaccactcaggaggctgagatgggagaccttttaagcctgagtttgagtcaggcctgggcaacatagatgtgagcacctatctctaaaaatgtaaataaataaaaatctcaaaaaaattaaaaatctcaagtgtaaaaacagttctgtagatagatggtagtgatggtagcacatcaatgtgaaggtatttaatgccactgaactgtacacttataacgaattaggataaattttatgttatgtgtatttactacaattttttaaaaatcgtatatgtagtttaacaggtgtggtcaatatcaaaacttaggtatttaatcttgttaaattatataagcagaaaatgctggaaaaagtacctgtcatagaaaaaaataaacttcctaaatca

SEQ ID NO: 2289 - DNA, 567 bp, Homo sapiens
tcaggacgctgcagctgaaacgttccggctccggctctgctggccggtctaaagcggcagccgccggggcgcaatgcgagcggctggcgtaggcttggtggactgtcactgccacctctccgccccggactttgaccgcgatttggatgatgtgttggagaaagccaagaaggccaatgttgtggcccttgtggcagttgccgaacattcaggagaatttgaaaagattatgcaactttcagaaaggtataatgggtttgtcctgccatgcttgggtgttcatccagttcaaggacttccaccagaagaccaaagaagtgtcacactaaaggatttggatgtagctttgcccattattgagaattataaggatcggttgttggcaattggagaggttggactagatttctcccccagatttgctggcactggtgaacagaaggaagagcaaagacaagtcctaatcagacagatccagttagccaaaagactaaatttgcctgtgtaggttaattattttcctatgttaatagctatagagcaaattaaataatgatcagagttctc

SEQ ID NO: 2290 - DNA, 2246 bp, Homo sapiens
tcaggacgctgcagctgaaacgttccggctccggctctgctggccggtctaaagcggcagccgccggggcgcaatgcgagcggctggcgtaggcttggtggactgtcactgccacctctccgccccggactttgaccgcgatttggatgatgtgttggagaaagccaagaaggccaatgttgtggcccttgtggcagttgccgaacattcaggagaatttgaaaagattatgcaactttcagaaaggtataatgggtttgtcctgccatgcttgggtgttcatccagttcaaggacttccaccagaagaccaaagaagtgtcacactaaaggatttggatgtagctttgcccattattgagaattataaggatcggttgttggcaattggagaggttggactagatttctcccccagatttgctggcactggtgaacagaaggaagagcaaagacaagtcctaatcagacagatccagttagccaaaagactaaatttgcctgtaaatgtgcactcacgctctgctggaagacctaccatcaaccttttacaagagcaagcagaaacttgtgaaacaattgcctttaacttctatatgcttagaaacagattcacctgcactaggaccagaaaaacaggtacggaatgagccctggaacatttctatttcagcagaatatattgcccaggtgaaagggatctcagtggaagaagttatagaagtgacgacacagaatgcattaaaactgtttcctaagctccgacacttgctccagaaatagcttcaaaaccatccattacaaaatcgaatcaactgcagggggcagcatttgaaaaatagaaatgttctgatgaagaatctgaactgaagaagctgttttatagggttatagaagattgtaattgtagagaaatatttctcttagaaataaaactgggcttggatcctgaaaccctgggttctgattctagccttgtgctgcttttcaattagccgagttctggcaggatattgggaaaatactgctacttcttacattgcccttttatatagaaccaccacctgaactgaaaccattgctactgggaagggtggctcccacaggaagagtataagcactactgtgatgaggatggagtaagctaaagtatacttttttttttttttgatggagtttcgctgttgttgcccaggctggagtgcaatggcacgatcttggctcactgcaacctccacttcccaggttctagcgagtctcctccctcagcctcccaagtagctgggattacaggcatgtgccaccatgcccagctaattttgtatttttagtagagacagggtttctccatgttggtcaggctggtctcgaactcccgacctcaggtgatccgcccgcctcggcctcccaaagtgctgggattacaggcatgagccactgcgccagcctaaagtgtgttcttaccacctatttttcttcccataggagttagccagtgaagggagaatgtctggttttctatgctgtcagaaatctcttttctaggtttgtaaaattgaacttttagtacttcgaattatttctctttaagataaaaatgcatacgatttttacactgatcttagatttttgacttatgaggccagtggtttaaacaatcattattgaataccaagcccaaaagtttagttaatacaccaattgtaagttctggtctgaattttgtcaacatatttagaatgtaaatggcattattaaaaatgtatctgatttctctgtgaacagtaatatttcatatttttaagtttaaaaatgttagtgtaagccaggcacagtggcattcacctgtagtgccaaccactcaggaggctgagatgggagaccttttaagcctgagtttgagtcaggcctgggcaacatagatgtgagcacctatctctaaaaatgtaaataaataaaaatctcaaaaaaattaaaaatctcaagtgtaaaaacagttctgtagatagatggtagtgatggtagcacatcaatgtgaaggtatttaatgccactgaactgtacacttataacgaattaggataaattttatgttatgtgtatttactacaattttttaaaaatcgtatatgtagtttaacaggtgtggtcaatatcaaaacttaggtatttaatcttgttaaattatataagcagaaaatgctggaaaaagtacctgtcatagaaaaaaataaacttcctaaatca

SEQ ID NO: 2291 - DNA, 2383 bp, Homo sapiens
tcaggacgctgcagctgaaacgttccggctccggctctgctggccggtctaaagcggcagccgccggggcgcaatgcgagcggctggcgtaggcttggtggactgtcactgccacctctccgccccggactttgaccgcgatttggatgatgtgttggagaaagccaagaaggccaatgttgtggcccttgtggcagttgccgaacattcaggagaatttgaaaagattatgcaactttcagaaaggtataatgggtttgtcctgccatgcttgggtgttcatccagttcaaggacttccaccagaagaccaaagaagtgtcacactaaaggatttggatgtagctttgcccattattgagaattataaggatcggttgttggcaattggagaggttggactagatttctcccccagatttgctggcactggtgaacagaaggaagagcaaagacaagtcctaatcagacagatccagttagccaaaagactaaatttgcctgtaaatgtgcactcacgctctgctggaagacctaccatcaaccttttacaagagcaaggtgctgagaaggtactgctgcatgcatttgatggtcggccatctgtagccatggaaggagtaagagctgggtacttcttctcaattcccccttctatcataagaagtggacagctgctttctcttttctctaagaagcagaaacttgtgaaacaattgcctttaacttctatatgcttagaaacagattcacctgcactaggaccagaaaaacaggtacggaatgagccctggaacatttctatttcagcagaatatattgcccaggtgaaagggatctcagtggaagaagttatagaagtgacgacacagaatgcattaaaactgtttcctaagctccgacacttgctccagaaatagcttcaaaaccatccattacaaaatcgaatcaactgcagggggcagcatttgaaaaatagaaatgttctgatgaagaatctgaactgaagaagctgttttatagggttatagaagattgtaattgtagagaaatatttctcttagaaataaaactgggcttggatcctgaaaccctgggttctgattctagccttgtgctgcttttcaattagccgagttctggcaggatattgggaaaatactgctacttcttacattgcccttttatatagaaccaccacctgaactgaaaccattgctactgggaagggtggctcccacaggaagagtataagcactactgtgatgaggatggagtaagctaaagtatacttttttttttttttgatggagtttcgctgttgttgcccaggctggagtgcaatggcacgatcttggctcactgcaacctccacttcccaggttctagcgagtctcctccctcagcctcccaagtagctgggattacaggcatgtgccaccatgcccagctaattttgtatttttagtagagacagggtttctccatgttggtcaggctggtctcgaactcccgacctcaggtgatccgcccgcctcggcctcccaaagtgctgggattacaggcatgagccactgcgccagcctaaagtgtgttcttaccacctatttttcttcccataggagttagccagtgaagggagaatgtctggttttctatgctgtcagaaatctcttttctaggtttgtaaaattgaacttttagtacttcgaattatttctctttaagataaaaatgcatacgatttttacactgatcttagatttttgacttatgaggccagtggtttaaacaatcattattgaataccaagcccaaaagtttagttaatacaccaattgtaagttctggtctgaattttgtcaacatatttagaatgtaaatggcattattaaaaatgtatctgatttctctgtgaacagtaatatttcatatttttaagtttaaaaatgttagtgtaagccaggcacagtggcattcacctgtagtgccaaccactcaggaggctgagatgggagaccttttaagcctgagtttgagtcaggcctgggcaacatagatgtgagcacctatctctaaaaatgtaaataaataaaaatctcaaaaaaattaaaaatctcaagtgtaaaaacagttctgtagatagatggtagtgatggtagcacatcaatgtgaaggtatttaatgccactgaactgtacacttataacgaattaggataaattttatgttatgtgtatttactacaattttttaaaaatcgtatatgtagtttaacaggtgtggtcaatatcaaaacttaggtatttaatcttgttaaattatataagcagaaaatgctggaaaaagtacctgtcatagaaaaaaataaacttcctaaatca

SEQ ID NO: 2292 - DNA, 2362 bp, Homo sapiens
tcaggacgctgcagctgaaacgttccggctccggctctgctggccggtctaaagcggcagccgccggggcgcaatgcgagcggctggcgtaggcttggtggactgtcactgccacctctccgccccggactttgaccgcgatttggatgatgtgttggagaaagccaagaaggccaatgttgtggcccttgtggcagttgccgaacattcaggagaatttgaaaagattatgcaactttcagaaaggtataatgggtttgtcctgccatgcttgggtgttcatccagttcaaggacttccaccagaagaccaaagaagtgtcacactaaaggatttggatgtagctttgcccattattgagaattataaggatcggttgttggcaattggagaggttggactagatttctcccccagatttgctggcactggtgaacagaaggaagagcaaagacaagtcctaatcagacagatccagttagccaaaagactaaatttgcctgtaaatgtgcactcacgctctgctggaagacctaccatcaaccttttacaagagcaaggtgctgagaaggtactgctgcatgcatttgatggtcggccatctgtagccatggaaggagtaagagctgggtacttcttctcaattcccccttctatcataagaagtggacagaagcagaaacttgtgaaacaattgcctttaacttctatatgcttagaaacagattcacctgcactaggaccagaaaaacaggtacggaatgagccctggaacatttctatttcagcagaatatattgcccaggtgaaagggatctcagtggaagaagttatagaagtgacgacacagaatgcattaaaactgtttcctaagctccgacacttgctccagaaatagcttcaaaaccatccattacaaaatcgaatcaactgcagggggcagcatttgaaaaatagaaatgttctgatgaagaatctgaactgaagaagctgttttatagggttatagaagattgtaattgtagagaaatatttctcttagaaataaaactgggcttggatcctgaaaccctgggttctgattctagccttgtgctgcttttcaattagccgagttctggcaggatattgggaaaatactgctacttcttacattgcccttttatatagaaccaccacctgaactgaaaccattgctactgggaagggtggctcccacaggaagagtataagcactactgtgatgaggatggagtaagctaaagtatacttttttttttttttgatggagtttcgctgttgttgcccaggctggagtgcaatggcacgatcttggctcactgcaacctccacttcccaggttctagcgagtctcctccctcagcctcacaagtagctgggattacaggcatgtgccaccatgcccagctaattttgtatttttagtagagacagggtttctccatgttggtcaggctggtctcgaactcccgacctcaggtgatctgcccgcctcggcctcccaaagtgctgggattacaggcatgagccactgcgccagcctaaagtgtgttcttaccacctatttttcttcccataggagttagccagtgaagggagaatgtctggttttctatgctgtcagaaatctcttttctaggtttgtaaaattgaacttttagtacttcgaattatttctctttaagataaaaatgcatacgatttttacactgatcttagatttttgacttatgaggccagtggtttaaacaatcattattgaataccaagcccaaaagtttagttaatacaccaattgtaagttctggtctgaattttgtcaacatatttagaatgtaaatggcattattaaaaatgtatctgatttctctgtgaacagtaatatttcatatttttaagtttaaaaatgttagtgtaagccaggcacagtggcattcacctgtagtgccaaccactcaggaggctgagatgggagaccttttaagcctgagtttgagtcaggcctgggcaacatagatgtgagcacctatctctaaaaatgtaaataaataaaaatctcaaaaaaattaaaaatctcaagtgtaaaaacagttctgtagatagatggtagtgatggtagcacatcaatgtgaaggtatttaatgccactgaactgtacacttataacgaattaggataaattttatgttatgtgtatttactacaattttttaaaaatcgtatatgtagtttaacaggtgtggtcaatatcaaaacttaggtatttaatcttgttaaattatataagcagaaaatgctggaaaaagtacctgtcatagaaaaaaataaacttcctaaatca

SEQ ID NO: 2293 - DNA, 567 bp, Homo sapiens; identical to SEQ ID NO: 2289

SEQ ID NO: 2294 - DNA, 2246 bp, Homo sapiens
tcaggacgctgcagctgaaacgttccggctccggctctgctggccggtctaaagcggcagccgccggggcgcaatgcgagcggctggcgtaggcttggtggactgtcactgccacctctccgccccggactttgaccgcgatttggatgatgtgttggagaaagccaagaaggccaatgttgtggcccttgtggcagttgccgaacattcaggagaatttgaaaagattatgcaactttcagaaaggtataatgggtttgtcctgccatgcttgggtgttcatccagttcaaggacttccaccagaagaccaaagaagtgtcacactaaaggatttggatgtagctttgcccattattgagaattataaggatcggttgttggcaattggagaggttggactagatttctcccccagatttgctggcactggtgaacagaaggaagagcaaagacaagtcctaatcagacagatccagttagccaaaagactaaatttgcctgtaaatgtgcactcacgctctgctggaagacctaccatcaaccttttacaagagcaagcagaaacttgtgaaacaattgcctttaacttctatatgcttagaaacagattcacctgcactaggaccagaaaaacaggtacggaatgagccctggaacatttctatttcagcagaatatattgcccaggtgaaagggatctcagtggaagaagttatagaagtgacgacacagaatgcattaaaactgtttcctaagctccgacacttgctccagaaatagcttcaaaaccatccattacaaaatcgaatcaactgcagggggcagcatttgaaaaatagaaatgttctgatgaagaatctgaactgaagaagctgttttatagggttatagaagattgtaattgtagagaaatatttctcttagaaataaaactgggcttggatcctgaaaccctgggttctgattctagccttgtgctgcttttcaattagccgagttctggcaggatattgggaaaatactgctacttcttacattgcccttttatatagaaccaccacctgaactgaaaccattgctactgggaagggtggctcccacaggaagagtataagcactactgtgatgaggatggagtaagctaaagtatacttttttttttttttgatggagtttcgctgttgttgcccaggctggagtgcaatggcacgatcttggctcactgcaacctccacttcccaggttctagcgagtctcctccctcagcctcacaagtagctgggattacaggcatgtgccaccatgcccagctaattttgtatttttagtagagacagggtttctccatgttggtcaggctggtctcgaactcccgacctcaggtgatctgcccgcctcggcctcccaaagtgctgggattacaggcatgagccactgcgccagcctaaagtgtgttcttaccacctatttttcttcccataggagttagccagtgaagggagaatgtctggttttctatgctgtcagaaatctcttttctaggtttgtaaaattgaacttttagtacttcgaattatttctctttaagataaaaatgcatacgatttttacactgatcttagatttttgacttatgaggccagtggtttaaacaatcattattgaataccaagcccaaaagtttagttaatacaccaattgtaagttctggtctgaattttgtcaacatatttagaatgtaaatggcattattaaaaatgtatctgatttctctgtgaacagtaatatttcatatttttaagtttaaaaatgttagtgtaagccaggcacagtggcattcacctgtagtgccaaccactcaggaggctgagatgggagaccttttaagcctgagtttgagtcaggcctgggcaacatagatgtgagcacctatctctaaaaatgtaaataaataaaaatctcaaaaaaattaaaaatctcaagtgtaaaaacagttctgtagatagatggtagtgatggtagcacatcaatgtgaaggtatttaatgccactgaactgtacacttataacgaattaggataaattttatgttatgtgtatttactacaattttttaaaaatcgtatatgtagtttaacaggtgtggtcaatatcaaaacttaggtatttaatcttgttaaattatataagcagaaaatgctggaaaaagtacctgtcatagaaaaaaataaacttcctaaatca

SEQ ID NO: 2295 - DNA, 2383 bp, Homo sapiens
tcaggacgctgcagctgaaacgttccggctccggctctgctggccggtctaaagcggcagccgccggggcgcaatgcgagcggctggcgtaggcttggtggactgtcactgccacctctccgccccggactttgaccgcgatttggatgatgtgttggagaaagccaagaaggccaatgttgtggcccttgtggcagttgccgaacattcaggagaatttgaaaagattatgcaactttcagaaaggtataatgggtttgtcctgccatgcttgggtgttcatccagttcaaggacttccaccagaagaccaaagaagtgtcacactaaaggatttggatgtagctttgcccattattgagaattataaggatcggttgttggcaattggagaggttggactagatttctcccccagatttgctggcactggtgaacagaaggaagagcaaagacaagtcctaatcagacagatccagttagccaaaagactaaatttgcctgtaaatgtgcactcacgctctgctggaagacctaccatcaaccttttacaagagcaaggtgctgagaaggtactgctgcatgcatttgatggtcggccatctgtagccatggaaggagtaagagctgggtacttcttctcaattcccccttctatcataagaagtggacagctgctttctcttttctctaagaagcagaaacttgtgaaacaattgcctttaacttctatatgcttagaaacagattcacctgcactaggaccagaaaaacaggtacggaatgagccctggaacatttctatttcagcagaatatattgcccaggtgaaagggatctcagtggaagaagttatagaagtgacgacacagaatgcattaaaactgtttcctaagctccgacacttgctccagaaatagcttcaaaaccatccattacaaaatcgaatcaactgcagggggcagcatttgaaaaatagaaatgttctgatgaagaatctgaactgaagaagctgttttatagggttatagaagattgtaattgtagagaaatatttctcttagaaataaaactgggcttggatcctgaaaccctgggttctgattctagccttgtgctgcttttcaattagccgagttctggcaggatattgggaaaatactgctacttcttacattgcccttttatatagaaccaccacctgaactgaaaccattgctactgggaagggtggctcccacaggaagagtataagcactactgtgatgaggatggagtaagctaaagtatacttttttttttttttgatggagtttcgctgttgttgcccaggctggagtgcaatggcacgatcttggctcactgcaacctccacttcccaggttctagcgagtctcctccctcagcctcacaagtagctgggattacaggcatgtgccaccatgcccagctaattttgtatttttagtagagacagggtttctccatgttggtcaggctggtctcgaactcccgacctcaggtgatctgcccgcctcggcctcccaaagtgctgggattacaggcatgagccactgcgccagcctaaagtgtgttcttaccacctatttttcttcccataggagttagccagtgaagggagaatgtctggttttctatgctgtcagaaatctcttttctaggtttgtaaaattgaacttttagtacttcgaattatttctctttaagataaaaatgcatacgatttttacactgatcttagatttttgacttatgaggccagtggtttaaacaatcattattgaataccaagcccaaaagtttagttaatacaccaattgtaagttctggtctgaattttgtcaacatatttagaatgtaaatggcattattaaaaatgtatctgatttctctgtgaacagtaatatttcatatttttaagtttaaaaatgttagtgtaagccaggcacagtggcattcacctgtagtgccaaccactcaggaggctgagatgggagaccttttaagcctgagtttgagtcaggcctgggcaacatagatgtgagcacctatctctaaaaatgtaaataaataaaaatctcaaaaaaattaaaaatctcaagtgtaaaaacagttctgtagatagatggtagtgatggtagcacatcaatgtgaaggtatttaatgccactgaactgtacacttataacgaattaggataaattttatgttatgtgtatttactacaattttttaaaaatcgtatatgtagtttaacaggtgtggtcaatatcaaaacttaggtatttaatcttgttaaattatataagcagaaaatgctggaaaaagtacctgtcatagaaaaaaataaacttcctaaatca

SEQ ID NO: 2296 - DNA, 1064 bp, Homo sapiens
gcagagcgcacgcgcttggctgcctggcgactgcacaagcagggatggcgtcgcttcagcgttctcgggtgctacgctgctgcagctgccgcctcttccaggcgcaccaggtaaaaaagagtgtcaagtggacatgcaaagcttgtggagagaagcagtcctttttgcaggaaaaatcgcagccctcagagagtcgctggctgaagtatctagaaaaggactcccaagaactggagctggaaggaacaggagtgtgtttcagcaaacagccttcatccaaaatggaggagccaggcccccgcttcagtcaagacctgcctagaaaaaggaagtggagcaggagcaccgtccagcctccgtgcagccgtggcgtgcaggactcgggtggctctgaggtcgcctggggaccccagaagggacaggctggcctgacatggaaggtgaaacaaggcagcagcccctgcctccaggagaactctgcagactgcagtgccggggagctgaggggtcctgggaaggagctatggagtcccatccagcaggttacagccacatcctctaaatgggcgcaatttgtcctgccacctagaaaaagttcacatgtggacagtgagcagccaaggtctcttcagagggaccccaggccagctggtccagcacaggctaagcaagggacccccagagcacaggcctcaagagaaggcctcagcaggcccactgccgctgtccagcttcctcgggccacacaccccgtcacatctgggtctgagaggccttgcgggaagacctcatgggacgcaaggactccctgggcagagggtgggcccctggtcctggaggcacagaatcctcgacccacacgactatgtgacctctttataactggggaagacttcgatgatgatgtgtgatctgggactggcaggttattaatcgagatacacttgttaggagggacagggttcccctaaggcacttttaaagatactctgtaagaaccattaacaataaacttactgtcaatcatttctctctaaaaaaaaaaaaaaaaaaaaaaaaaaaaa

SEQ ID NO: 2297 - DNA, 1140 bp, Homo sapiens
gcagagcgcacgcgcttggctgcctggcgactgcacaagcagggatggcgtcgcttcagcgttctcgggtgctacgctgctgcagctgccgcctcttccaggcgcaccaggtaaaaaagagtgtcaagtggacatgcaaagcttgtggagagaagcagtcctttttgcaggtctctagaagaaactgtcagtgccagtgaagaagaaaacgtgggacaccagcaggctgggaatgtgaagcagcaggaaaaatcgcagccctcagagagtcgctggctgaagtatctagaaaaggactcccaagaactggagctggaaggaacaggagtgtgtttcagcaaacagccttcatccaaaatggaggagccaggcccccgcttcagtcaagacctgcctagaaaaaggaagtggagcaggagcaccgtccagcctccgtgcagccgtggcgtgcaggactcgggtggctctgaggtcgcctggggaccccagaagggacaggctggcctgacatggaaggtgaaacaaggcagcagcccctgcctccaggagaactctgcagactgcagtgccggggagctgaggggtcctgggaaggagctatggagtcccatccagcaggttacagccacatcctctaaatgggcgcaatttgtcctgccacctagaaaaagttcacatgtggacagtgagcagccaaggtctcttcagagggaccccaggccagctggtccagcacaggctaagcaagggacccccagagcacaggcctcaagagaaggcctcagcaggcccactgccgctgtccagcttcctcgggccacacaccccgtcacatctgggtctgagaggccttgcgggaagacctcatgggacgcaaggactccctgggcagagggtgggcccctggtcctggaggcacagaatcctcgacccacacgactatgtgacctctttataactggggaagacttcgatgatgatgtgtgatctgggactggcaggttattaatcgagatacacttgttaggagggacagggttcccctaaggcacttttaaagatactctgtaagaaccattaacaataaacttactgtcaatcatttctctctaaaaaaaaaaaaaaaaaaaaaaaaaaaaa

SEQ ID NO: 2298 - DNA, 1309 bp, Homo sapiens
gcagagcgcacgcgcttggctgcctggcgactgcacaagcagggatggcgtcgcttcagcgttctcgggtgctacgctgctgcagctgccgcctcttccaggcgcaccaggtaaaaaagagtgtcaagtggacatgcaaagcttgtggagagaagcagtcctttttgcagagttccccagacacggagctcctgcttccgagcttcctgttccttcaggaagtgaaatggatggagcagaatctggaaaggcttatggtgaaggctctggtgctgattgtagacgccatgtccaaaagttaaatctactacagggacaagtttcagagctgccactcaggtctctagaagaaactgtcagtgccagtgaagaagaaaacgtgggacaccagcaggctgggaatgtgaagcagcaggaaaaatcgcagccctcagagagtcgctggctgaagtatctagaaaaggactcccaagaactggagctggaaggaacaggagtgtgtttcagcaaacagccttcatccaaaatggaggagccaggcccccgcttcagtcaagacctgcctagaaaaaggaagtggagcaggagcaccgtccagcctccgtgcagccgtggcgtgcaggactcgggtggctctgaggtcgcctggggaccccagaagggacaggctggcctgacatggaaggtgaaacaaggcagcagcccctgcctccaggagaactctgcagactgcagtgccggggagctgaggggtcctgggaaggagctatggagtcccatccagcaggttacagccacatcctctaaatgggcgcaatttgtcctgccacctagaaaaagttcacatgtggacagtgagcagccaaggtctcttcagagggaccccaggccagctggtccagcacaggctaagcaagggacccccagagcacaggcctcaagagaaggcctcagcaggcccactgccgctgtccagcttcctcgggccacacaccccgtcacatctgggtctgagaggccttgcgggaagacctcatgggacgcaaggactccctgggcagagggtgggcccctggtcctggaggcacagaatcctcgacccacacgactatgtgacctctttataactggggaagacttcgatgatgatgtgtgatctgggactggcaggttattaatcgagatacacttgttaggagggacagggttcccctaaggcacttttaaagatactctgtaagaaccattaacaataaacttactgtcaatcatttctctctaaaaaaaaaaaaaaaaaaaaaaaaaaaaa

SEQ ID NO: 2299 - DNA, 1229 bp, Homo sapiens
gcagagcgcacgcgcttggctgcctggcgactgcacaagcagggatggcgtcgcttcagcgttctcgggtgctacgctgctgcagctgccgcctcttccaggcgcaccaggtaaaaaagagtgtcaagtggacatgcaaagcttgtggagagaagcagtcctttttgcaggcttatggtgaaggctctggtgctgattgtagacgccatgtccaaaagttaaatctactacagggacaagtttcagagctgccactcaggtctctagaagaaactgtcagtgccagtgaagaagaaaacgtgggacaccagcaggctgggaatgtgaagcagcaggaaaaatcgcagccctcagagagtcgctggctgaagtatctagaaaaggactcccaagaactggagctggaaggaacaggagtgtgtttcagcaaacagccttcatccaaaatggaggagccaggcccccgcttcagtcaagacctgcctagaaaaaggaagtggagcaggagcaccgtccagcctccgtgcagccgtggcgtgcaggactcgggtggctctgaggtcgcctggggaccccagaagggacaggctggcctgacatggaaggtgaaacaaggcagcagcccctgcctccaggagaactctgcagactgcagtgccggggagctgaggggtcctgggaaggagctatggagtcccatccagcaggttacagccacatcctctaaatgggcgcaatttgtcctgccacctagaaaaagttcacatgtggacagtgagcagccaaggtctcttcagagggaccccaggccagctggtccagcacaggctaagcaagggacccccagagcacaggcctcaagagaaggcctcagcaggcccactgccgctgtccagcttcctcgggccacacaccccgtcacatctgggtctgagaggccttgcgggaagacctcatgggacgcaaggactccctgggcagagggtgggcccctggtcctggaggcacagaatcctcgacccacacgactatgtgacctctttataactggggaagacttcgatgatgatgtgtgatctgggactggcaggttattaatcgagatacacttgttaggagggacagggttcccctaaggcacttttaaagatactctgtaagaaccattaacaataaacttactgtcaatcatttctctctaaaaaaaaaaaaaaaaaaaaaaaaaaaaa

SEQ ID NO: 2300 - DNA, 2564 bp, Homo sapiens
gagcggtcacgtgtgaggggcggcccgaggtcacgtgacggagcgccggagcggagggagccggggctgggagttctcctgagggaagaggagtggagtaggggggacgcggcggcggcgttgacaatgagttttcttggaggcttttttggtccaatttgtgagatcgatattgttcttaatgatggggaaaccaggaaaatggcagaaatgaaaactgaagatggcaaagtagaaaaacactatctcttctatgacggagaatccgtttcaggaaaggtaaacctagcctttaagcaacctggaaagaggctagaacaccaaggaattagaattgaatttgtaggtcaaattgaacttttcaatgacaagagtaatactcatgaatttgtaaacctagtgaaagaactagccttacctggagaactgactcagagcagaagttatgattttgaatttatgcaagttgaaaagccatatgaatcttacatcggtgccaatgtccgcttgaggtattttcttaaagtgacaatagtgagaagactgacagatttggtaaaagagtatgatcttattgttcaccagcttgccacctatcctgatgttaacaactctattaagatggaagtgggcattgaagattgtctacatatagaatttgaatataataaatcaaagtatcatttaaaggatgtgattgttggaaaaatttacttcttattagtaagaataaaaatacaacatatggagttacagctgatcaaaaaagagatcacaggaattggacccagtaccacaacagaaacagaaacaatcgccaaatatgaaataatggatggtgcaccagtaaaaggagataattttatggagaaaagctcctgaaaaactgaggaaacagagaacaaactttcaccagcgatttgaatctccagaatcacaggcatctgccgaacagcctgaaatgtgaactgaacaggagaaaaaaagaaaagcaaaaaactcctgtaacccttgagattaagttcagcaggttaaagatggttgcagctggagggggcggaaaaaggccaaaactccatatatgttagtcttcctttatcttacagcgcagcatttattttatgatataatgaaatgttcgttcatgtatatacatttttaaaagtgctttctttgaaacactggaactttgttaagctgcctttttttttttaacttcctactttgatgataagcactcagatatatatcagcgtaaacatgaaaaattttcatgtgagtaggctggtatttgtaattttgctttctttctgcataatgttgattataaatcctctcttttcaggctaatgattacctcttattctctacatgcaaaaaattaaatattttgtgttcaaataaaattagaaaacctgagtggcctcttgtgtcctgcagagatttaaaacatggcatctcaatatttttgagaactacatttgtttttaacatatgtgtttgagaaaagcatatggagtgtttcaccgcaggcacttctgagtaccattccatggcttccagaattttatcctctttgaggtcttctgtgctatgaatattagatttctttccccaagggattatgtggcaggtcattatggccttcttttttttggccatattaagtaacagttttgctatattccagtagtaccgttgtgtgttttctgcaatgtggagttgacttagcttggcattttagatttgttaaaactattttttccataaatactttgaaacatatttatatatttcaatttaaggaatctttttgccatgtgtatgcaaatattattttcttcatacattcattttcttttcaggggaaaattttgggatgggggactcaggaggacctgtgaagcatgtagttatctagatctgggtaatttcatgtttattaaactcgaactttggctagttaaactcatattgaaacttcatctagtctcttaattttttaacactaaattcaagtcatttgttttaagtctctaaaaaagaagattgcagtcatccattcatatgcatggggtctgatcgcaaatacactaaatgtggagtgtaggaaccaaaatgaaacctgctgtatggaaactactttcacttatggttcattggtttttgtaccaatattttttatgcacttcagtgcaagtcttgtcagttaaccttactttatgagtaagctaaataacccaaattacatttctttaaacctgttttactactatggcactttgataaaatggtcaggaaccaactttactggcaaaagggtccatgtaccaccatgtgctggagcatctgttctacatgtggatatctatgaatggtaatgttttccttcatgtaagtgcctattcagagtttcagaattttaaaatgccaaatattttcatggtcatttgcatgtagtaagccagaaaatattcaaagagattttgaaaaccaattgtatttaaccagcctcaaattgtgcaaccatgatgtataataaagaatttgaaacagaaaaaaaa

SEQ ID NO: 2301 - DNA, 2707 bp, Homo sapiens
gagcggtcacgtgtgaggggcggcccgaggtcacgtgacggagcgccggagcggagggagccggggctgggagttctcctgagggaagaggagtggagtaggggggacgcggcggcggcgttgacaatgagttttcttggaggcttttttggtccaatttgtgagatcgatattgttcttaatgatggggaaaccaggaaaatggcagaaatgaaaactgaagatggcaaagtagaaaaacactatctcttctatgacggagaatccgtttcaggaaaggtaaacctagcctttaagcaacctggaaagaggctagaacaccaaggaattagaattgaatttgtaggtcaaattgaacttttcaatgacaagagtaatactcatgaatttgtaaacctagtgaaagaactagccttacctggagaactgactcagagcagaagttatgattttgaatttatgcaagttgaaaagccatatgaatcttacatcggtgccaatgtccgcttgaggtattttcttaaagtgacaatagtgagaagactgacagatttggtaaaagagtatgatcttattgttcaccagcttgccacctatcctgatgttaacaactctattaagatggaagtgggcattgaagattgtctacatatagaatttgaatataataaatcaaagtatcatttaaaggatgtgattgttggaaaaatttacttcttattagtaagaataaaaatacaacatatggagttacagctgatcaaaaaagagatcacaggaattggacccagtaccacaacagaaacagaaacaatcgccaaatatgaaataatggatggtgcaccagtaaaaggtgaatcaattccaataaggctatttttagcaggatatgacccaactccaacaatgagagatgtgaacaaaaaattttcagtaaggtactttttgaatttagtgcttgttgatgaggaagaccggaggtacttcaaacagcaggagataattttatggagaaaagctcctgaaaaactgaggaaacagagaacaaactttcaccagcgatttgaatctccagaatcacaggcatctgccgaacagcctgaaatgtgaactgaacaggagaaaaaaagaaaagcaaaaaactcctgtaacccttgagattaagttcagcaggttaaagatggttgcagctggagggggcggaaaaaggccaaaactccatatatgttagtcttcctttatcttacagcgcagcatttattttatgatataatgaaatgttcgttcatgtatatacatttttaaaagtgctttctttgaaacactggaactttgttaagctgcctttttttttttaacttcctactttgatgataagcactcagatatatatcagcgtaaacatgaaaaattttcatgtgagtaggctggtatttgtaattttgctttctttctgcataatgttgattataaatcctctcttttcaggctaatgattacctcttattctctacatgcaaaaaattaaatattttgtgttcaaataaaattagaaaacctgagtggcctcttgtgtcctgcagagatttaaaacatggcatctcaatatttttgagaactacatttgtttttaacatatgtgtttgagaaaagcatatggagtgtttcaccgcaggcacttctgagtaccattccatggcttccagaattttatcctctttgaggtcttctgtgctatgaatattagatttctttccccaagggattatgtggcaggtcattatggccttcttttttttggccatattaagtaacagttttgctatattccagtagtaccgttgtgtgttttctgcaatgtggagttgacttagcttggcattttagatttgttaaaactattttttccataaatactttgaaacatatttatatatttcaatttaaggaatctttttgccatgtgtatgcaaatattattttcttcatacattcattttcttttcaggggaaaattttgggatgggggactcaggaggacctgtgaagcatgtagttatctagatctgggtaatttcatgtttattaaactcgaactttggctagttaaactcatattgaaacttcatctagtctcttaattttttaacactaaattcaagtcatttgttttaagtctctaaaaaagaagattgcagtcatccattcatatgcatggggtctgatcgcaaatacactaaatgtggagtgtaggaaccaaaatgaaacctgctgtatggaaactactttcacttatggttcattggtttttgtaccaatattttttatgcacttcagtgcaagtcttgtcagttaaccttactttatgagtaagctaaataacccaaattacatttctttaaacctgttttactactatggcactttgataaaatggtcaggaaccaactttactggcaaaagggtccatgtaccaccatgtgctggagcatctgttctacatgtggatatctatgaatggtaatgttttccttcatgtaagtgcctattcagagtttcagaattttaaaatgccaaatattttcatggtcatttgcatgtagtaagccagaaaatattcaaagagattttgaaaaccaattgtatttaaccagcctcaaattgtgcaaccatgatgtataataaagaatttgaaacagaaaaaaaa

SEQ ID NO: 2302 - DNA, 1868 bp, Homo sapiens
agcgactcttcagggaggtggcaggaaaggcttggaacagctgccggaggtgacggagcggcggccccgcccggtgcgctggaggtcgaagcttccagctctggacatcctgagcccaagtcccccacactcagtgcagtgatgagtgcggaagtgaaggtgacagggcagaaccaggagcaatttctgctcctagccaagtcggccaagggggcagcgctggccacactcatccatcaggtgctggaggcccctggtgtctacgtgtttggagaactgctggacatgcccaatgttagagagctggctgagagtgactttgcctctaccttccggctgctcacagtgtttgcttatgggacatacgctgactacttagctgaagcccggaatcttcctccactaacagaggctcagaagaataagcttcgacacctctcagttgtcaccctggctgctaaagtaaagtgtatcccatatgcagtgttgctggaggctcttgccctgcgtaatgtgcggcagctggaagaccttgtgattgaggctgtgtatgctgacgtgcttcgtggctccctggaccagcgcaaccagcggctcgaggttgactacagcatcgggcgggacatccagcgccaggacctcagtgccattgcccgaaccctgcaggaatggtgtgtgggctgtgaggtcgtgctgtcaggcattgaggagcaggtgagccgtgccaaccaacacaaggagcagcagctgggcctgaagcagcagattgagagtgaggttgccaaccttaaaaaaaccattaaagttacgacggcagcagcagccgcagccacatctcaggaccctgagcaacacctgactgagctgagggaaccagctcctggcaccaaccagcgccagcccagcaagaaagcctcaaagggcaaggggctccgagggagcgccaagatttggtccaagtcgaattgaaagaactgtcgtttcctccctggggatgtggggtcccagctgcctgcctgcctcttaggagtcctcagagagccttctgtgcccctggccagctgataatcctaggttcatgacccttcacctcccctaaccccaaacatagatcacaccttctctagggaggagtcaaatgtaggtcatgtttttgttggtactttctgttttttgtgacttcatgtgttccattgctccccgctgccatgctctctcccttgtttccttaagagctcagcatctgtccctgttcattacatgtcattgagtaggtgggtagccctgatgggggtcgctctgtctggagcataacccacaggcgttttttctgccaccccatccctgcatgcctgatccccagttcctataccctacccctgacctattgagcagcctctgaagagccatagggcccccacctttactcacaccctgagaattctgggagccagtctgccatgccaggagtcactggacatgttcatcctagaatcctgtcacactacagtcatttcttttcctctctctggcccttgggtcctgggaatgctgctgcttcaaccccagagcctaagaatggcagccgtttcttaacatgttgagagatgattctttcttggccctggccatctcgggaagcttgatggcaatcctggaagggtttaatctccttttgtgagtttggtggggaagggaagggtatatagattgtattaaaaaaaaaaaggtatatatgcatatatctatatataatatgacgcagaaataaatctatgagaaatctatctacaaaaaaaaaaaaaaaaaaaaaaaaaaaaaaaaaaaaaaaaaaaaaaaaaaaaaaaaaaaaaaaaaaaaaaaaaaaa

SEQ ID NO: 2303 - DNA, 723 bp, Homo sapiens
gcgcactcagggtctgaggcagctagtagccggagggtcaccatgaagttcaatcccttcgttacctcggaccgcagtaaaaaccgcaaacgtcacttcaatgccccctcacacgtgcgcaggaagatcatgtcatccccgctctccaaggagctgcggcagaagtacaatgtccgctccatgcccatccgcaaggacgacgaggtccaggtagttcgaggacactacaaaggtcagcaaattggcaaggtagtccaggtgtacagaaagaaatatgtcatctacatcgagcgggtgcagcgtgagaaggccaacggcacaactgtccacgtgggcattcacccaagcaaggtggttatcaccaggctaaaactggacaaggatcggaaaaaaattcttgaacgcaaagccaagtctcgacaagttggaaaagagaaaggcaaatataaagaagaacttattgagaaaatgcaggaataaatagaacctgttgtgcaaccacggtttaaccggagattttgaggctagggtgtgtttctttcgaacttttcggaatgtctggaacatttcatttcctgttttgttacctgtgcctctgtaaatctacttttgcaattttaagtaataattttatgaataaaaatgggaaatgcttcctaattccacatagtatttgcattgttttataaataaattccacttactatcaaaaaaaaaaaaaaa

SEQ ID NO: 2304 - DNA, 3609 bp, Homo sapiens
tcaaggacgcatcacctaatgccgcggtcacggccaccgtcacaagcgcccccagccccaccccaccccggcctgcccgccgtccttctcccgcccccgcccctgcctgccagctccaccgggccgtaggtgcggacgacctcaaaattcctcggcccgcgaaggccgccagctgcggggaggggaggggaggcgcggtcccgcagcgcccccaggctcatgtcccaggtatgtccagacccccgaggcaccgcttgcagggcagtgacagcccgtgaggctcggcctcgacccctggcacccttggtcccagctacgccggctcctggccttcccccaagtccgagagagaggtgggattctccccgacgcagttggaaaccgggaatcccctttagggtcccgttcgtgctgcactactgactccaccatctgcaaagggattcttgtccagaatccccgaaggctttaggacagcgcttattttgttgaatgaagagtctctaattttcggaaagaccacaggctaaaagtcaagttgtgcctttttagccaagaagcatggaagtcattcacggcaggccctactgttgcagggagcttgaaggagctgacatactgtccaacaccttttactctaatgaattgcacaaccccctccagacggttactcgcccaactgcctcagaggacaggtatcaggaattaagggagtcacttcaacaatgtaggcttccttggggcgctgaaagagagtatggtgggataataccgatttcactccccgaggaccacaggccaaagtatgagcctcctcgtgtcatgggcaaaggacatcagcattatggatttggtggagaaacctggccaagaaagcttcctgttgaacaattttattatttgacccagaacaaaaaaagtgatgtctatggaaatgattctttgatacccaagccgcctaattcaacagtaggagagatctgcttgccatatccaattgaacacccctaccacacacacatctgtcgcggcgccatgttccccaccttcacgtcacctgaggacctctacacgggcattaaagcccgcacccagcagccctttcctcccacggtgccaaccaaggcttatgattcaacagttttgaagacaagaggtaatccttatagatatgaactgattgatattcccatggattcaaagaagaaagcactgacttggccaggtcaaggtgtatattatgattttcccagaggtgttgagaaaaataagccagtattctacccaaaacctcctaaaaccttcgctcctaacacttctttaaattcatgggaccctatttgctctgccaaagaagccaacatacaaagaaatcttgagaggtcccactggctcacttcgtacactcatgattttacaggtctggggcccatggacccccttgaactggatgattaccatgaaaagatggtagcagagttaacacgaaagataggatttgacccagagccgcaagaaaaattccaccctgtcttcaaacctcccagaccgttggaaggacgaattgcccgattaattcagaaccgacgttctctggaggctatagtccagcaaagaccacgttcctgtccagattgtactcctagagttttgtgtaattttcatacctttgtacccagttctaaagaaatggtggcacttagtgataacataccagccggtgtgacccataaaaaccaggatattgaagagaagatcatagaagaacagagcttgctgtctacctatgaactcccatcttgttacccaacaaaagacctaactagcatttatgacataaagccatttccaaaaatcacagatactaaaaagacagaagatttatactggagacagcagtcactaaaaacccaacccacaccttactgtaaaccagaccactggattcactatgaaaatcttaaatctcccctacgtgatcagtataatatgtgtccagaccctgttagccttagtaaacctagtgttttacaaaataaacaagacacggaagctttcactttagaacattttttaagtaagccagaagaagagttgttcttgaatatggaaaacaatgaagaaacaagacctgttcttggttggattcctagagctggagtgaccaaacctcagaccaacctgctggagcttaagaactctttttcaaaaactggtgcacaaaagcgtttccataaatcaattctagaagaccataaagacctcagggataatgagcattcggggatgaagcaccaattctatggccataattcctattatttctataattgagatactcattcttcccttcaaaacccagcctcttgcaagaagctaaaaaatataacagaatttccttcgtattgctggattctgttttctagattaaaccacaaggaccttgttagtgaggtttacattttcaggaatttaagttagtatctggttggaggaacccagaaaaggtgatgttatgacttcttgaaaagtttaacaatttggcaataaaatattagaactagaaaaatttatagtctttaatctctcatcttcagattatacaaggaaattttccaaaatcacaaaaagcaatgtgtacaacaaagtttacatcattgtttcaccaaaaaaaattgaaaagctggaaagaactcaaatgatcaataattaatgaatgactatacaaattatagtatcttaataaaaatgagaacactgtccctttatgtaaatttttgtacatagtagcattaggtagaaaagacaaaacccaaacacctagttaattgagggatggacacctctaaaaactatattgtcttaaaagtatgtggactctgttcctttatgtaaacatgtaaagaaaataagtcagcgaaaaaaatgaaacccaaaactctctgcatgtacacattacaaattgaattgtttgcttacccttaaccttctgattgagaaacataactgtttcttttatgcagataaaattattttactgaagatctagcaatggccttaattagcaactggtgagttctaattatagcaagaaaggatggcttggtatcagttattacagagccccaaatcttcatttctggagtgtgttctctaagagtttggctaactcccatatgcaagtcaattcatttaatgtgccaagaggtagattttaaacatagtctatcgtggaagttcaagaggaatttctttaagtattttgtgaatatttattttaattttatgaccaacatgtcatttggttgtaacctccttaaaactattctgggctaaagttagagaatttttttccaactgcattctgtacagcactagttacattatgacaggaagtaaaagtttacatggtgaaataatactggggaaatcggagcaacaatgtcagttgcatgccttggtcactgggttctctatagcctttaatatgtaatgcaattgggagtgtctgaagtgagggagatatagtgtacacactttttatcacagagtagatcactggaatggaattccaaataataaactttggaaggtgtaactctccagtat

SEQ ID NO: 2305 - DNA, 4927 bp, Homo sapiens
ggcaggtgcagctgccacagtgagacgggcaccccgacccgggcatggaggggggcaaggggcccaggctcagagacttcctgagtgggagtctggctacctgggcgctgggactggccgggctggtcggggaggcggaggactcggagggggaagaagaggaagaggaggaagagccgcccctttggttggagaagagattcctgcgcctcagcgatggggccctgctcctccgggtgctgggcatcattgcccccagctcccgagggggacctcggatgctcagaggccttgacggacctgctgcctggcgagtgtggaacctgaaccacctgtggggccgactgagggacttctaccaggaggagctgcagctgctgatcctgtcgccacccccagacctccagacattgggatttgaccctctctcagaagaagcggtggagcagctggaaggcgttcttcggctactgttgggagcgtcagtacagtgtgagcaccgggaactcttcatccgccacatccagggcctcagtctcgaggtccagagcgagctggccgctgccatccaggaggtgacccagccgggggccggcgtggtgctggcactgtctgggccagatcctggggagctggcacctgccgagctggagatgctgtcccggagcctgatggggacactgtcgaagctggcacgggagcgtgacctgggggcccagcggctggctgaactgctgctggagcgagaacccctctgcttgaggcctgaggctccctctagggctcccgccgagggcccctcgcaccatctggccctgcagctggccaacgccaaggctcagctgcggcgtctgcggcaggagctggaggagaaggccgagctgctgctagactcccaggccgaggtgcagggtttggaggccgaaataagaaggctccgccaggaggcccaggcgctgtcgggacaggccaagcgggccgagctgtaccgcgaggaggcagaggcgctgcgggagcgggccggccgcctgccccgcctgcaggaggagctgaggcgctgccgcgagcggctgcaggcggctgaggcctacaagagtcagctggaggaggagcgggtgctctcgggggtgctggaggcgtccaaggcgctgctggaagagcagctggaggctgcccgagagcgctgcgcccggctgcacgagacccagcgcgagaacctgctgctgcgaacccggctgggcgaggcccatgcggagctggactctctgcggcatcaggtggaccagctggctgaggagaatgtggagctggagctggagcttcagcggagcttggagccacctccaggatcccctggggaggcacccctagcaggagcggccccctcgctgcaagatgaggtgagggaggcagaggctgggcggcttcggacccttgagagggagaaccgggagcttcgggggctgcttcaggtgcttcaggggcagccagggggccagcaccccctgctggaggcaccgagagaggaccctgttcttccagtgctggaggaggctccccagactcctgtggccttcgaccacagccctcagggcttggttcagaaggcaagggatggaggcccccaggccttggacttggctcccccggcattagactcagtgctcgaggcatcagctgagtgtccccaggcacctgattcagacccacaggaggcagagagtccccttcaggcagctgccatggacccccaggcctcagactggtccccgcaagagtcaggctctcctgtggagacacaggagtccccggagaaggctggccgtagatcctctctccagagccctgcctctgtggccccacctcagggtccagggaccaaaattcaggccccgcagttgctgggaggagagacagagggaagagaggctccccaaggcgagttggtgcctgaggcctgggggttgagacaggagggccctgagcacaagccagggccttcggagcccagctctgtgcagctggaggagcaggagggcccaaaccagggcctggacctggccacgggacaagcagaggccagagagcatgaccagaggctggaagggacggtcagggacccagcctggcaaaaaccacagcagaagtcagaaggggctcttgaggtccaggtctgggaaggcccaatcccaggggagagcctggccagtggtgtcgcagagcaggaggccctcagggaggaggtggcacagttgaggagaaaggctgaggcccttggagatgagctggaagcccaggcccgcaagctggaggcccaaaacacggaggctgcccgcctctccaaggagctggcccaagcgcgaagggcagaggccgaggcccaccgggaggcagaggcccaggcctgggagcaagcccggctgcgggaggcagtggaggctgctggccaggagctggagtctgcgtcccaggaacgggaggcgctggtggaggcgctggcagcagcgggccgggagcggaggcagtgggagcgtgaggggtccaggctgcgggcccagtcggaggccgccgaggaacggatgcaggtgctggagagcgagggccgccagcacttggaggaggctgagagggagcgccgggagaaggaggccctccaggcggagctggagaaagctgtggtgcggggcaaggagttgggggcccggctggagcatttgcagcgtgagctggagcaggcggctctcgagcgccaggaatttctgcgagaaaaggaaagccagcaccagaggtaccagggcttggagcagcggctggaagctgagctgcaggcggcggcgaccagcaaggaggaggcgctgatggagctcaagaccagggccctgcagctggaagaggagctgttccagctgcgccagggccccgcggggctggggcccaaaaagcgtgcggagcctcagctggtggagacccagaatgtgcggcttattgaggtggagcgcagtaatgcgatgctggtggcagagaaggcagctttgcaggggcagctgcagcacctggaggggcagctggggagcctgcagggccgtgcccaggagctgctgctgcagagccagcgggcgcaggagcacagcagccgcctgcaggccgagaagtctgtgctggagattcagggccaggagctgcaccggaagctggaggtgctggaggaggaggtgcgggcggcacggcagtcccaggaggagacccgcgggcagcagcaggccctgcttcgggaccacaaggccctggcacagctgcagcggcggcaggaggccgagctagagggactgctggtgcggcaccgagacctcaaggccaacatgcgggcactggagctggcccaccgggagctgcagggccggcacgagcagctgcaggcccagcgggccagcgtggaggcacaggaggtggccctgctggcagagcgtgaacgcctgatgcaagatgggcatcggcagcggggcctggaggaggagctgcggaggcttcagagcgagcacgacagggctcagatgctgctggcagagttgtctcgggagcggggtgagctgcagggtgaacgcggggagctacggggccggctggcgcggctggagctggagcgggcacagctggagatgcagagccagcagctgcgcgagtccaaccagcagctggacctgagcgcctgccggctgaccacgcagtgtgagctattgacacagctgcgaagtgcccaggaagaggagaaccggcagctgctggctgaagttcaggccctgagccgggagaacagggagctcctggagcgcagcctggagagtcgggaccacctgcaccgcgaacagcgggagtacctggaccagcttaatgccctgcgccgcgagaagcagaagctcgtggagaagatcatggaccaataccgcgtgctggagcctgtgcccctgccccggaccaagaagggcagctggctggcagacaaggtgaagaggctgatgcggccccggcgggaggggggcccccctggggggctgcgcctgggggccgatggggctggcagcaccgagagcctggggggccccccggagacggagcttcctgagggcagggaggcagatgggacagggtccccttccccggcacccatgcgccgggcccagagctccctctgcctgcgggatgagaccttggcaggcgggcagcggcggaaactcagctcaaggttcccggtggggcgaagctctgagtcattcagccctggggacacccctaggcaacgattccgacagcgccatccaggccccctgggggcgcccgtctcccacagcaaaggacctggtgtgggatgggagaactccgctgagaccctgcaggaacacgaaacagatgccaaccgagagggccctgaggtacaggaaccggagaaacgtcccctcaccccatccctcagccagtgacaccgtgggaacagcaggcttgggagtgcagccttctcggcactggagtgtcagcggaggccccaggcagcccaagagctcagggagccagggaccccaaggggagtccttggacaaggaggcctgggccctgagatcctccacggtcagcgccggggcccggagatggagctgggacgagtgtgtggacaggggggatggctggcccccacgagcagctccaggctggagttctggttcttccaggtggctcccgctgaggcagcggtctctgggggatcccccagctgaaggaggctggcaggagttggcaagagaaccccctgccctgtccaggtgggaagctgagtcccagtgctgggggactgtggcctgggctgatcttgagccttaactggacatgaggggcatgagaataaagctgaactgcagcctcctgaaaaaaaaaaaaa

SEQ ID NO: 2306 - DNA, 8368 bp, Homo sapiens
gcgatccgggcgccaccccgcggtcatcggtcaccggtcgctctcaggaacagcagcgcaacctctgctccctgcctcgcctcccgcgcgcctaggtgcctgcgactttaattaaagggccgtcccctcgccgaggctgcagcaccgcccccccggcttctcgcgcctcaaaatgagtagctcccactctcgggcgggccagagcgcagcaggcgcggctccgggcggcggcgtcgacacgcgggacgccgagatgccggccaccgagaaggacctggcggaggacgcgccgtggaagaagatccagcagaacactttcacgcgctggtgcaacgagcacctgaagtgcgtgagcaagcgcatcgccaacctgcagacggacctgagcgacgggctgcggcttatcgcgctgttggaggtgctcagccagaagaagatgcaccgcaagcacaaccagcggcccactttccgccaaatgcagcttgagaacgtgtcggtggcgctcgagttcctggaccgcgagagcatcaaactggtgtccatcgacagcaaggccatcgtggacgggaacctgaagctgatcctgggcctcatctggaccctgatcctgcactactccatctccatgcccatgtgggacgaggaggaggatgaggaggccaagaagcagacccccaagcagaggctcctgggctggatccagaacaagctgccgcagctgcccatcaccaacttcagccgggactggcagagcggccgggccctgggcgccctggtggacagctgtgccccgggcctgtgtcctgactgggactcttgggacgccagcaagcccgttaccaatgcgcgagaggccatgcagcaggcggatgactggctgggcatcccccaggtgatcacccccgaggagattgtggaccccaacgtggacgagcactctgtcatgacctacctgtcccagttccccaaggccaagctgaagccaggggctcccttgcgccccaaactgaacccgaagaaagcccgtgcctacgggccaggcatcgagcccacaggcaacatggtgaagaagcgggcagagttcactgtggagaccagaagtgctggccagggagaggtgctggtgtacgtggaggacccggccggacaccaggaggaggcaaaagtgaccgccaataacgacaagaaccgcaccttctccgtctggtacgtccccgaggtgacggggactcataaggttactgtgctctttgctggccagcacatcgccaagagccccttcgaggtgtacgtggataagtcacagggtgacgccagcaaagtgacagcccaaggtcccggcctggagcccagtggcaacatcgccaacaagaccacctactttgagatctttacggcaggagctggcacgggcgaggtcgaggttgtgatccaggaccccatgggacagaagggcacggtagagcctcagctggaggcccggggcgacagcacataccgctgcagctaccagcccaccatggagggcgtccacaccgtgcacgtcacgtttgccggcgtgcccatccctcgcagcccctacactgtcactgttggccaagcctgtaacccgagtgcctgccgggcggttggccggggcctccagcccaagggtgtgcgggtgaaggagacagctgacttcaaggtgtacacaaagggcgctggcagtggggagctgaaggtcaccgtgaagggccccaagggagaggagcgcgtgaagcagaaggacctgggggatggcgtgtatggcttcgagtattaccccatggtccctggaacctatatcgtcaccatcacgtggggtggtcagaacatcgggcgcagtcccttcgaagtgaaggtgggcaccgagtgtggcaatcagaaggtacgggcctggggccctgggctggagggcggcgtcgttggcaagtcagcagactttgtggtggaggctatcggggacgacgtgggcacgctgggcttctcggtggaagggccatcgcaggctaagatcgaatgtgacgacaagggcgacggctcctgtgatgtgcgctactggccgcaggaggctggcgagtatgccgttcacgtgctgtgcaacagcgaagacatccgcctcagccccttcatggctgacatccgtgacgcgccccaggacttccacccagacagggtgaaggcacgtgggcctggattggagaagacaggtgtggccgtcaacaagccagcagagttcacagtggatgccaagcacggtggcaaggccccacttcgggtccaagtccaggacaatgaaggctgccctgtggaggcgttggtcaaggacaacggcaatggcacttacagctgctcctacgtgcccaggaagccggtgaagcacacagccatggtgtcctggggaggcgtcagcatccccaacagccccttcagggtgaatgtgggagctggcagccaccccaacaaggtcaaagtatacggccccggagtagccaagacagggctcaaggcccacgagcccacctacttcactgtggactgcgccgaggctggccagggggacgtcagcatcggcatcaagtgtgcccctggagtggtaggccccgccgaagctgacatcgacttcgacatcatccgcaatgacaatgacaccttcacggtcaagtacacgccccggggggctggcagctacaccattatggtcctctttgctgaccaggccacgcccaccagccccatccgagtcaaggtggagccctctcatgacgccagtaaggtgaaggccgagggccctggcctcagtcgcactggtgtcgagcttggcaagcccacccacttcacagtaaatgccaaagctgctggcaaaggcaagctggacgtccagttctcaggactcaccaagggggatgcagtgcgagatgtggacatcatcgaccaccatgacaacacctacacagtcaagtacacgcctgtccagcagggtccagtaggcgtcaatgtcacttatggaggggatcccatccctaagagccctttctcagtggcagtatctccaagcctggacctcagcaagatcaaggtgtctggcctgggagagaaggtggacgttggcaaagaccaggagttcacagtcaaatcaaagggtgctggtggtcaaggcaaagtggcatccaagattgtgggcccctcgggtgcagcggtgccctgcaaggtggagccaggcctgggggctgacaacagtgtggtgcgcttcctgccccgtgaggaagggccctatgaggtggaggtgacctatgacggcgtgcccgtgcctggcagcccctttcctctggaagctgtggcccccaccaagcctagcaaggtgaaggcgtttgggccggggctgcagggaggcagtgcgggctcccccgcccgcttcaccatcgacaccaagggcgccggcacaggtggcctgggcctgacggtggagggcccctgtgaggcgcagctcgagtgcttggacaatggggatggcacatgttccgtgtcctacgtgcccaccgagcccggggactacaacatcaacatcctcttcgctgacacccacatccctggctccccattcaaggcccacgtggttccctgctttgacgcatccaaagtcaagtgctcaggccccgggctggagcgggccaccgctggggaggtgggccaattccaagtggactgctcgagcgcgggcagcgcggagctgaccattgagatctgctcggaggcggggcttccggccgaggtgtacatccaggaccacggtgatggcacgcacaccattacctacattcccctctgccccggggcctacaccgtcaccatcaagtacggcggccagcccgtgcccaacttccccagcaagctgcaggtggaacctgcggtggacacttccggtgtccagtgctatgggcctggtattgagggccagggtgtcttccgtgaggccaccactgagttcagtgtggacgcccgggctctgacacagaccggagggccgcacgtcaaggcccgtgtggccaacccctcaggcaacctgacggagacctacgttcaggaccgtggcgatggcatgtacaaagtggagtacacgccttacgaggagggactgcactccgtggacgtgacctatgacggcagtcccgtgcccagcagccccttccaggtgcccgtgaccgagggctgcgacccctcccgggtgcgtgtccacgggccaggcatccaaagtggcaccaccaacaagcccaacaagttcactgtggagaccaggggagctggcacgggcggcctgggcctggctgtagagggcccctccgaggccaagatgtcctgcatggataacaaggacggcagctgctcggtcgagtacatcccttatgaggctggcacctacagcctcaacgtcacctatggtggccatcaagtgccaggcagtcctttcaaggtccctgtgcatgatgtgacagatgcgtccaaggtcaagtgctctgggcccggcctgagcccaggcatggttcgtgccaacctccctcagtccttccaggtggacacaagcaaggctggtgtggccccattgcaggtcaaagtgcaagggcccaaaggcctggtggagccagtggacgtggtagacaacgctgatggcacccagaccgtcaattatgtgcccagccgagaagggccctacagcatctcagtactgtatggagatgaagaggtaccccggagccccttcaaggtcaaggtgctgcctactcatgatgccagcaaggtgaaggccagtggccccgggctcaacaccactggcgtgcctgccagcctgcccgtggagttcaccatcgatgcaaaggacgccggggagggcctgctggctgtccagatcacggatcccgaaggcaagccgaagaagacacacatccaagacaaccatgacggcacgtatacagtggcctacgtgccagacgtgacaggtcgctacaccatcctcatcaagtacggtggtgacgagatccccttctccccgtaccgcgtgcgtgccgtgcccaccggggacgccagcaagtgcactgtcacagtgtcaatcggaggtcacgggctaggtgctggcatcggccccaccattcagattggggaggagacggtgatcactgtggacactaaggcggcaggcaaaggcaaagtgacgtgcaccgtgtgcacgcctgatggctcagaggtggatgtggacgtggtggagaatgaggacggcactttcgacatcttctacacggccccccagccgggcaaatacgtcatctgtgtgcgctttggtggcgagcacgtgcccaacagccccttccaagtgacggctctggctggggaccagccctcggtgcagccccctctacggtctcagcagctggccccacagtacacctacgcccagggcggccagcagacttgggccccggagaggcccctggtgggtgtcaatgggctggatgtgaccagcctgaggccctttgaccttgtcatccccttcaccatcaagaagggcgagatcacaggggaggttcggatgccctcaggcaaggtggcgcagcccaccatcactgacaacaaagacggcaccgtgaccgtgcggtatgcacccagcgaggctggcctgcacgagatggacatccgctatgacaacatgcacatcccaggaagccccttgcagttctatgtggattacgtcaactgtggccatgtcactgcctatgggcctggcctcacccatggagtagtgaacaagcctgccaccttcaccgtcaacaccaaggatgcaggagaggggggcctgtctctggccattgagggcccgtccaaagcagaaatcagctgcactgacaaccaggatgggacatgcagcgtgtcctacctgcctgtgctgccgggggactacagcattctagtcaagtacaatgaacagcacgtcccaggcagccccttcactgctcgggtcacaggtgacgactccatgcgtatgtcccacctaaaggtcggctctgctgccgacatccccatcaacatctcagagacggatctcagcctgctgacggccactgtggtcccgccctcgggccgggaggagccctgtttgctgaagcggctgcgtaatggccacgtggggatttcattcgtgcccaaggagacgggggagcacctggtgcatgtgaagaaaaatggccagcacgtggccagcagccccatcccggtggtgatcagccagtcggaaattggggatgccagtcgtgttcgggtctctggtcagggccttcacgaaggccacacctttgagcctgcagagtttatcattgatacccgcgatgcaggctatggtgggctcagcctgtccattgagggccccagcaaggtggacatcaacacagaggacctggaggacgggacgtgcagggtcacctactgccccacagagccaggcaactacatcatcaacatcaagtttgccgaccagcacgtgcctggcagccccttctctgtgaaggtgacaggcgagggccgggtgaaagagagcatcacccgcaggcgtcgggctccttcagtggccaacgttggtagtcattgtgacctcagcctgaaaatccctgaaattagcatccaggatatgacagcccaggtgaccagcccatcgggcaagacccatgaggccgagatcgtggaaggggagaaccacacctactgcatccgctttgttcccgctgagatgggcacacacacagtcagcgtcaagtacaagggccagcacgtgcctgggagccccttccagttcaccgtggggcccctaggggaagggggagcccacaaggtccgagctgggggccctggcctggagagagctgaagctggagtgccagccgaattcagtatctggacccgggaagctggtgctggaggcctggccattgctgtcgagggccccagcaaggctgagatctcttttgaggaccgcaaggacggctcctgtggtgtggcttatgtggtccaggagccaggtgactacgaagtctcagtcaagttcaacgaggaacacattcccgacagccccttcgtggtgcctgtggcttctccgtctggcgacgcccgccgcctcactgtttctagccttcaggagtcagggctaaaggtcaaccagccagcctcttttgcagtcagcctgaacggggccaagggggcgatcgatgccaaggtgcacagcccctcaggagccctggaggagtgctatgtcacagaaattgaccaagataagtatgctgtgcgcttcatccctcgggagaatggcgtttacctgattgacgtcaagttcaacggtacccacatccctggaagccccttcaagatccgagttggggagcctgggcatggaggggacccaggcttggtgtctgcttacggagcaggtctggaaggcggtgtcacagggaacccagctgagttcgtcgtgaacacgagcaatgcgggagctggtgccctgtcggtgaccattgacggcccctccaaggtgaagatggattgccaggagtgccctgagggctaccgcgtcacctatacccccatggcacctggcagctacctcatctccatcaagtacggcggcccctaccacattgggggcagccccttcaaggccaaagtcacaggcccccgtctcgtcagcaaccacagcctccacgagacatcatcagtgtttgtagactctctgaccaaggccacctgtgccccccagcatggggccccgggtcctgggcctgctgacgccagcaaggtggtggccaagggcctggggctgagcaaggcctacgtaggccagaagagcagcttcacagtagactgcagcaaagcaggcaacaacatgctgctggtgggggttcatggcccaaggaccccctgcgaggagatcctggtgaagcacgtgggcagccggctctacagcgtgtcctacctgctcaaggacaagggggagtacacactggtggtcaaatgggggcacgagcacatcccaggcagcccctaccgcgttgtggtgccctgagtctggggcccgtgccagccggcagcccccaagcctgccccgctacccaagcagccccgccctcttcccctcaaccccggcccaggccgccctggccgcccgcctgtcactgcagctgcccctgccctgtgccgtgctgcgctcacctgcctccccagccagccgctgacctctcggctttcacttgggcagagggagccatttggtggcgctgcttgtcttctttggttctgggaggggtgagggatgggg

SEQ ID NO: 2307 - DNA, 1990 bp, Homo sapiens
aggcggtgctgcagggctggtccgggaggtgacgaccggcttcggagagtctatcatggcagctcggactggtcatacggccttgagaagggtagtctcgggatgccgtccgaagtcggcgacagcggccggggcgcaggcgcccgtgcggaatggcagatatttagcttcctgtggtatactgatgagcagaactcttccactacatacctcaattttgcctaaggagatatgtgcacgaactttcttcaaaatcactgcaccattaataaacaaaaggaaagaatattcagagagaagaattttaggatattcaatgcaggaaatgtatgatgtagtatcgggagtggaggattacaagcattttgttccttggtgcaaaaaatcagatgttatatcaaagagatctggatattgtaaaacaagattagaaattggatttccacctgtgttggagcgatatacatcagtagtaaccttggtgaaacctcatttagtaaaggcatcttgtactgatgggagacttttcaatcatttggagactatttggcgttttagcccaggtcttcctggctacccaagaacttgtaccttggatttttcaatttcttttgaatttcgatcacttctacattcccagcttgccacactcttttttgatgaagttgtgaagcagatggtagctgcctttgaaagaagagcatgtaagctgtatggtccagaaacaaatatacctcgggagttaatgcttcatgaagtccatcacacataaaggcaaaaaagaactggtgccacctgcttctgactttagtttgttcacttttaggaagtattttcatgacatgttttcagaagccagaaagcatttgttaaacgcagctttggttataaacctgcaccattgaaaatttgcacatagaatatagactcacttgtacatagaattatttcttcaagtataattcaaaataatatggacattatcatgttctgcattacaataatgggatgtcatcaccattgctagaatactggcatgattcttctgagcagaagttgaaactgtaaatttaaaccttttaattatcaccttacctgaaagaggttagttaagatattcacacagtatgtattatattaaccatatcacacttaagttattaaattcagactatttgtaacttattgttatagggcctgccgtatggcttaggatatttgagtaatcatatatttaaagtaaaaactttgggctgggcacagtggctcacacctgtaatcccagcacttggggaagctgaggtgggcagatcagttgaggtcaggagttctagaccagcctggtcaacatggcgaaaccccatctctactaaaaatacaaaaattagctgggcgtggtggcacacacctgtaatcccagttacttgggaggctgaggcacaagaatcgcttgaacccgggaggcggaggttgcagttagccaagatcgccctgctgcactccagcctgggcaacagagggagactctgtctccaaaaacaaaaacaaaaactgttagtgaaggttccctgggacttttgatattttaaaaattgttcttatgactagtagataaattcattgccataatgaggctagctcccagataaacagtgtattttcttctttttttttttttttttggtgagtggtccagagctttaagctacttttccagtagtttgccactttctccgaggtagtttggctgctctttcagtaatgctaattgtgtgtcaaattttgtctacaacagtaggcaacagatgaagataagttggttgaatgtctccagcactatgcatccctattttctatttattgtgtacactcactttcagtaatgtgtttcaaactggtattttttaaaaaacaaatcaatgtaaggactgaagttgaagtagcaatgtaataaagttaatttgtttattttttgaaaaaaaaaaaaaaa

SEQ ID NO: 2308 - DNA, 6428 bp, Homo sapiens
gctagtggaagttactgccgcgccaccgagtccggaccggagactttggggcctaactagtgaatggtagtgtctagaaagggtatgtcccttcaagagagaggtgccaatgtccaaccggcctaataacaatccaggggggtcactgcgacgttcacagaggaacactgccggggcccaaccacaagacgactcaataggaggaagaagctgcagttcatcatctgctgtgatagttccacaaccagaggatccagacagagccaatacttcagaaagacaaaaaacggggcaggtgcctaagaaagacaattctcgaggagtgaagcgcagtgctagtccagactacaacaggaccaattctcctagctctgcaaaaaaaccaaaagcacttcagcatactgaatctccctcagaaacaaataagccacatagtaagtcaaagaagagacatttagaccaggagcaacaactgaaatctgcacaatcaccatcaacaagcaaggctcataccaggaagagtggggccactggcggttcacggagtcagaaaagaaaaaggacagagagttcttgtgtaaagagtggctccgggtctgaatcaactggtgcagaagagagatctgcgaaacctaccaagctggcttcaaaatcagccacctcagccaaagctgggtgtagcaccatcactgattcttcttctgctgcctctacttcctcctcgtcttctgctgtagcctcggcctcctccactgtaccaccaggtgccagagtgaaacaaggaaaagatcagaacaaggccaggcgttcccgttcagcgtccagtcccagccccagaagaagtagcagggaaaaggaacagagtaaaactggtggctcttcaaaatttgattgggctgctcgtttcagccctaaagttagccttcctaaaacaaaactgtctcttccagggtcttctaagtcagagacatcaaaacctggaccttctggattacaggccaaattagcaagtttaagaaaatctacgaagaaacgcagtgagtctccacctgctgagctccccagtttgaggcggagcacacgccaaaagaccacgggctcctgtgctagtaccagtcggcgaggctctggcctgggcaaaagaggagcagctgaagctcgtcgacaggagaaaatggcagaccctgaaagcaaccaggaggcagtaaattcttcagctgctcggacagatgaagctccccaaggagctgcaggggctgttggcatgaccacctctggggagagtgaatcagatgattccgagatgggacgtttgcaagctttgttagaggcaaggggtcttccccctcacctatttggtcctcttggtcctcggatgtcacagcttttccatagaacaattggaagtggagctagttctaaggcccagcagctactacaaggattgcaagccagtgatgaaagtcaacagcttcaggcagttattgagatgtgtcagttactggtcatgggaaatgaggagacactgggagggtttcctgtcaagagtgttgttccagctttgattacgttacttcagatggagcacaattttgatattatgaaccatgcttgtcgagccttaacatacatgatggaagcacttcctcgatcttctgctgttgtagtagatgctattcctgtctttttagaaaagctgcaagttattcagtgtattgatgtggcagagcaggccttgactgccttggagatgttgtcacggagacatagtaaagccattctacaggcgggtggtttggcagactgcttgctgtacctagaattcttcagcataaatgcccaaagaaatgcattagcaattgcagctaattgctgccagagtatcacgccagatgaatttcattttgtggcagattcactcccattgctaacccaaaggctaacacatcaggataaaaagtcagtagaaagcacttgcctttgttttgcacgcctagtggacaacttccagcatgaggagaatttactccagcaggttgcttccaaagatctgcttacaaatgttcaacagctgttggtagtgactccacccattttaagttctgggatgtttataatggtggttcgcatgttttctctgatgtgttccaactgtccaactttagctgttcaacttatgaaacaaaacattgcagaaacgcttcactttctcctgtgtggtgcctccaatggaagttgtcaggaacagattgatcttgttccacgaagccctcaagagttgtatgaactgacatctctgatttgtgaacttatgccatgtttaccaaaagaaggcatttttgcagttgataccatgttgaagaagggaaatgcacagaacacagatggtgcgatatggcagtggcgtgatgatcggggcctctggcatccatataacaggattgacagccggatcattgagcaaatcaatgaggacacgggaacagcacgtgccattcagagaaaacctaacccgttagccaatagtaacactagtggatattcagagtcaaagaaggatgatgctcgagcacagcttatgaaagaggatccggaactggctaagtcttttattaagacattatttggtgttctttatgaagtgtatagttcctcagcaggacctgcggtcagacataagtgccttagagcaattcttaggataatttattttgcggatgctgaacttctgaaggatgttctgaaaaatcatgctgtttcaagtcacattgcttccatgctgtcaagccaagacctgaagatagtagtgggagcacttcagatggcagaaattttaatgcagaagttacctgatatttttagtgtttacttcagaagagaaggtgtaatgcatcaagtaaaacacttagcagaatcagagtctttgttgacaagtccaccaaaggcatgtacgaatggatcgggatccatgggatccacaacttcagtcagcagtgggacagccacagctgccactcatgctgcagctgacttgggatcacccagcttgcagcacagcagggatgattctttagatctcagccctcaaggtcgattaagtgatgttctaaagagaaaacgactgccaaaacgagggccaagaaggccaaagtactcacctccaagagatgatgacaaagtagacaatcaagctaaaagccccaccactactcagtcacctaaatcttctttcctggcaagcttgaatccaaaaacatggggaaggttaagtacacagtccaacagcaacaacattgagccagcacggactgcgggaggtagtggccttgccagggctgcctcaaaggataccatctccaataatagagaaaaaattaaaggttggattaaggagcaggcacataaatttgtagaacgttatttcagttctgagaatatggatggaagcaaccctgcattgaatgtccttcagagactttgtgctgcaaccgaacaactcaacctccaggtggatggtggagctgagtgccttgtagaaatccgtagcatagtctcagagtcagatgtttcatcatttgaaatccaacatagtggatttgtgaagcagctgttgctttatttgacatctaaaagtgaaaaggatgctgtgagcagagagatcagattaaagcgatttcttcatgtatttttttcttctccacttcctggagaagagcccattggaagagtggaaccagtgggtaatgcacctttgttggcattagttcacaagatgaacaactgcctcagccagatggaacaatttccagtcaaagtacatgatttccctagtggaaatgggacaggaggcagcttttctctcaacagaggatcacaggctttaaaatttttcaacacacatcaattaaaatgccagttacaaaggcatccagactgtgcaaatgtgaagcagtggaagggtggacctgtcaagattgaccctctggctttggtacaagccatcgagagataccttgtagttagagggtatggaagagtaagagaagatgatgaagacagcgatgacgatggatcagatgaggaaatagatgagtctctggctgctcagttcctaaattcaggaaatgtaagacacaggctgcagttttatattggagaacatttgctgccgtataacatgactgtgtatcaggcagtacggcagtttagtatacaggctgaagatgaaagagaatccacagatgatgagagcaatcctctaggcagagctggtatttggacaaagactcatacaatatggtataaacctgtgagagaggatgaagaaagtaataaagattgtgttggtggtaaaagaggaagagcccaaacagctccaacgaaaacttcccctagaaatgcaaaaaagcatgatgagttatggcacgatggagtgtgcccatcagtatcaaatcctttagaagtttacctcattcccacaccacctgaaaatataacatttgaagacccgtcattagatgtgatccttcttttaagagttttacatgctatcagtcgatactggtattacttgtatgataatgcaatgtgcaaggaaattattccaactagtgaatttattaacagtaagttaacagcaaaagcaaataggcaacttcaagatcctttagtaatcatgacaggaaacatcccaacatggcttactgagctaggaaaaacctgcccatttttctttccttttgatacccggcaaatgcttttttatgtaactgcatttgatcgggaccgagcaatgcaaagattacttgataccaacccagaaatcaaccagtctgattctcaagatagcagagttgcacctagattggatagaaaaaaacgtactgtgaaccgagaggagctgctgaaacaggcggagtctgtgatgcaggacctcggcagctcacgggccatgttagaaatccagtatgaaaatgaggttggtacaggtcttgggcctacactggagttttatgcgcttgtatctcaggaactacagagagctgacttgggtctttggagaggtgaagaagtaactcttagcaatccaaaagggagccaagaagggaccaagtatattcaaaacctccagggcctgtttgcgcttccctttggtaggacagcaaagccagctcatatcgcaaaggttaagatgaagtttcgcttcttaggaaaattaatggccaaggctatcatggatttcagattggtggaccttccccttggcttacccttttataaatggatgctacggcaagaaacttcactgacatcacacgatttgtttgacatcgacccagttgtagccagatcagtttatcacctagaagacattgtcagacagaagaaaagacttgaacaagataaatcccagaccaaagagagtctacagtatgcattagaaaccttgactatgaatggctgctcagttgaagatctaggactggatttcactctgccagggtttcccaatatcgaactgaagaaaggagggaaggatataccagtcactatccacaatttagaggagtatctaagactggttatattctgggcactaaatgaaggcgtttctaggcaatttgattcgttcagagatggatttgaatcagtcttcccactcagtcatcttcagtacttctacccggaggaactggatcagctcctttgtggcagtaaagcagacacttgggatgcaaagacactgatggaatgctgtaggcctgatcatggttatactcatgacagtcgggctgtgaagtttttgtttgagattctcagtagttttgataatgagcagcagaggttatttctccagtttgtgactggtagcccaagattgcctgttggaggattccggagtttgaatccacctttgacaattgtccgaaagacgtttgaatcaacagaaaacccagatgacttcttgccctctgtaatgacttgtgtgaactatcttaagttgccggactattcaagcattgagataatgcgtgaaaaactgttgatagcagcaagagaagggcagcagtcgttccatctttcctgattatagcaagaaatgcagtgtctgcctgttacagcaaaagaaacaaatcatgatttcttttctaatgttatcacctgagtcaaggaaacatgttacgccttcttgttgtaggaaaaacggcttgcagattataaagagacatttggttgatattcattaatggccccatggacttaaagtgatcaggccctaaaacgttgttgtgatgaggtttctttagcaagttcttgtttaaattatcatttatttgatgagtgaagtttttaacatgctttgctgtgtgaaatttaaaaaagggatgtttttccaggctggaacaataaatgtggctgtgcagttt

SEQ ID NO: 2309 - DNA, 4386 bp, Homo sapiens
tccgcggtcttctctctccacccccgacaccgcggggctccccccgcccgcccacggcgggccccggctgcccgatccccctcgcttcccgcgctctccagcggggccccagccccggccccctctctccctcccttctctctaattccccttccggacgctgccatcatgttgaagcctcagccgctacaacagccctcccagccccagcagccgccccccacgcaacaggccgtggcccgtcggccccccgggggcaccagccctcccaacggcggcctcccggggccgctggccacctctgcggctcctcccgggcctccagcggccgcctccccctgcctggggcctgtggccgctgccgggagcgggctccgccggggagccgaaggcatcttggcgccgcagccgccgccgccgcagcaacaccaggagaggccgggggcagccgccatcggcagcgccaggggacagagcacaggaaagggacccccacagtcacctgtgtttgaaggcgtctacaacaattccagaatgctgcatttccttacagctgttgtgggctccacttgtgatgtaaaggtgaaaaatggtaccacttatgagggtatcttcaagacgctaagctcaaagtttgaactagccgtggatgctgtgcaccggaaagcatctgagccagcaggtggccctcgtcgggaggacattgtggacaccatggtgtttaagccaagtgatgtcatgcttgttcacttccgaaatgttgacttcaactatgctactaaagacaagttcaccgattcagccattgccatgaactcgaaagtgaatggggaacacaaagagaaggtgcttcagcgctgggaggggggtgacagcaacagcgacgactatgacctcgagtctgacatgtccaatggatgggaccccaatgaaatgttcaagttcaatgaggagaactacggtgtgaagactacctatgatagcagtctttcttcttatacggtgcccttagaaaaggacaactcagaagagtttcgtcagcgagagctgcgtgcggcccagttggctcgagagattgaatcaagcccccagtaccgcctacggatcgccatggagaacgacgatgggcgcactgaagaggagaagcacagtgcagtccagcggcagggctcagggcgggagagccccagcttggcatccagggaggggaagtatatccctctgcctcaacgagtccgggaaggtccccggggaggagttcgatgcagcagctctcggggcggtcggcctggccttagctctttgccacctcgtggccctcaccatctggacaacagcagccctggcccaggttctgaggcccgtggtatcaatggaggcccttcccgcatgtccccaaaggcacagcggcctctgagaggtgccaagactctgtcttcgcccagtaataggccttctggagaaacttctgttccacctcctcctgcagtgggccggatgtatcccccgcgttctcccaagtctgctgcccctgccccaatctcagcttcctgtccagagcctcccatcggctcggcagtgccaacctcttcagcctccatccctgtgacctcatcagtctcagatcctggagtgggctccatttctccagcttctccaaagatctccctggcccccacagatgtaaaagaactctctaccaaggaacctgggagaactctggagccccaggagctggctcggatagctgggaaagtccctggtcttcagaatgaacagaaacgattccaactggaagaactgagaaagtttggggcccagtttaagcttcagcccagtagctcccctgagaacagcctggatccttttcctccccggatcttaaaggaggagcccaaaggaaaggagaaagaggttgatggtctgttgacttcagagcccatggggtctcccgtctcctccaagacagagtccgtatcggataaggaggacaaaccacccctggcaccatcaggaggcactgaggggccagagcagcccccaccaccttgtccaagccaaactggcagccccccggtgggcctcatcaagggagaagacaaagatgagggccctgttgctgaacaagtaaagaaatcaacgttgaaccctaatgctaaggagttcaatcctacaaagcctctgctgtctgtgaataaatccaccagtaccccaacttctccggggccccggactcattcaactccctccatcccggtgctgacagcaggccagagtgggctatacagcccccagtacatctcctacatacctcagatccacatgggaccagctgtgcaggcacctcagatgtatccatatcctgtatccaattcagtgcctgggcagcagggcaagtaccggggagcaaaaggctcccttcctccgcagcgctcggaccaacaccagccagcctcagccccgccgatgatgcaggccgccgcggctgctggcccgcctctggtggctgccacgccctattcttcctacatcccctacaaccctcagcagttcccaggccagccagccatgatgcagcccatggcccactacccctcacagccggtgtttgcccccatgcttcagagcaacccacgcatgctgacgtcgggcagccatccccaggccatcgtgtcatcctctacccctcagtacccttctgcagagcagcctaccccccaagccctttatgccactgttcaccagtcctacccacaccatgccacacagctccatgcccaccagccgcagccggctaccacgcctactggaagccagccgcagtcccagcatgcggcccccagtcctgtccagcatcaggcggggcaggccccacacttgggcagtggacagccacagcagaatctgtaccacccaggggccctgacaggcacgccgccctctctgccaccgggaccttctgcccagtcccctcagagcagcttcccccagccagccgctgtgtatgccatccaccaccagcagctgccccacggcttcaccaacatggcccatgttacccaggcccatgtccaaactggaatcacagcagccccgccccctcaccctggggctccccacccgccccaggtgatgctgctgcacccaccccagagtcatggggggcccccccaaggcgcggtgccccagagtggggtgcctgcactctcagcttccacaccctcaccctacccctacatcggacacccccaaggtgagcagcctggccaggcgcctggatttccaggaggagccgatgacaggattcgtgagttctcattagctgggggaatttggcatggaagagctgaggggctgcaggtggggcaggatgcacgggttctgggtggggagtgaggggtcttggaggcagggctgtcccacagggcgcccgccgacctgcacctgtctgtgaagtatgtagggtgggcagaagccacagtcgccgccgccaggggcttgctcctggctctgtcctttgcttccctccgtcctcgctcagttgtgatccagcagcccccctccccactgcctccccagctctcagtgaccccgactgtctcctgacttagccgaggtaaggtcagtgcagcagacagggccagactggggtgtggggggctgagctgggcacatgagtgagggctctggcttactgggaaacagcgattgacctgtgcttctgacagcccccgagacaccttgaggaggccgctccttcccagacacacccccacgcccccactggacggcattggaggaagggacagctgcttgggttctaatgctcctgctctcttctctttcccctccaaccagttcaatctcatccctcccagcagctccccttccaccccccggggaactgaagattgtcctggccgcgacctgagacctccatgagtggagggaagagtgatctatgtctcttcccccagcagctcggaccactcccagccccccatccccccgttccccaggggagctggggaattcctgccaagcaccttgaatgggaggggcctcacagagggcagggccagggtccagcaggggtggggggttcctgctctgcccctgcccgtccccacccagtcttgccctcccatcctctcatctattcccccgctggagacggaagatcttttattttctattatttataacttcagacttgggccccctgttctttctttcccattaacttgagtgacctgtgtgagagacagacagatgccccacgaggatggctggacaaggacttttactttttattacataaaaatattaaaaaataaataaaaaaaataaaattttaaactaacttaaaaaaaaaaaaaaaaaaaa

SEQ ID NO: 2310 - DNA, 1549 bp, Homo sapiens
tccgcggtcttctctctccacccccgacaccgcggggctccccccgcccgcccacggcgggccccggctgcccgatccccctcgcttcccgcgctctccagcggggccccagccccggccccctctctccctcccttctctctaattccccttccggacgctgccatcatgttgaagcctcagccgctacaacagccctcccagccccagcagccgccccccacgcaacaggccgtggcccgtcggccccccgggggcaccagccctcccaacggcggcctcccggggccgctggccacctctgcggctcctcccgggcctccagcggccgcctccccctgcctggggcctgtggccgctgccgggagcgggctccgccggggagccgaaggcatcttggcgccgcagccgccgccgccgcagcaacaccaggagaggccgggggcagccgccatcggcagcgccaggggacagagcacaggaaagggacccccacagtcacctgtgtttgaaggcgtctacaacaattccagaatgctgcatttccttacagctgttgtgggctccacttgtgatgtaaaggtgaaaaatggtaccacttatgagggtatcttcaagacgctaagctcaaagtttgaactagccgtggatgctgtgcaccggaaagcatctgagccagcaggtggccctcgtcgggaggacattgtggacaccatggtgtttaagccaagtgatgtcatgcttgttcacttccgaaatgttgacttcaactatgctactaaagacaagttcaccgattcagccattgccatgaactcgaaagtgaatggggaacacaaagagaaggtgcttcagcgctgggaggggggtgacagcaacagcgacgactatgacctcgagtctgacatgtccaatggatgggaccccaatgaaatgttcaagttcaatgaggagaactacggtgtgaagactacctatgatagcagtctttcttcttatacggtgcccttagaaaaggacaactcagaagagtttcgtcagcgagagctgcgtgcggcccagttggctcgagagattgaatcaagcccccagtaccgcctacggatcgccatggagaacgacgatgggcgcactgaagaggagaagcacagtgcagtccagcggcagggctcagggcgggagagccccagcttggcatccagggaggggaagtatatccctctgcctcacagagggcagggccagggtccagcaggggtggggggttcctgctctgcccctgcccgtccccacccagtcttgccctcccatcctctcatctattcccccgctggagacggaagatcttttattttctattatttataacttcagacttgggccccctgttctttctttcccattaacttgagtgacctgtgtgagagacagacagatgccccacgaggatggctggacaaggacttttactttttattacataaaaatattaaaaaataaataaaaaaaataaaattttaaactaacttaaaaaaaaaaaaaaaaaaaa

SEQ ID NO: 2311 - DNA, 3805 bp, Homo sapiens
tccgcggtcttctctctccacccccgacaccgcggggctccccccgcccgcccacggcgggccccggctgcccgatccccctcgcttcccgcgctctccagcggggccccagccccggccccctctctccctcccttctctctaattccccttccggacgctgccatcatgttgaagcctcagccgctacaacagccctcccagccccagcagccgccccccacgcaacaggccgtggcccgtcggccccccgggggcaccagccctcccaacggcggcctcccggggccgctggccacctctgcggctcctcccgggcctccagcggccgcctccccctgcctggggcctgtggccgctgccgggagcgggctccgccggggagccgaaggcatcttggcgccgcagccgccgccgccgcagcaacaccaggagaggccgggggcagccgccatcggcagcgccaggggacagagcacaggaaagggacccccacagtcacctgtgtttgaaggcgtctacaacaattccagaatgctgcatttccttacagctgttgtgggctccacttgtgatgtaaaggtgaaaaatggtaccacttatgagggtatcttcaagacgctaagctcaaagtttgaactagccgtggatgctgtgcaccggaaagcatctgagccagcaggtggccctcgtcgggaggacattgtggacaccatggtgtttaagccaagtgatgtcatgcttgttcacttccgaaatgttgacttcaactatgctactaaagacaagttcaccgattcagccattgccatgaactcgaaagtgaatggggaacacaaagagaaggtgcttcagcgctgggaggggggtgacagcaacagcgacgactatgacctcgagtctgacatgtccaatggatgggaccccaatgaaatgttcaagttcaatgaggagaactacggtgtgaagactacctatgatagcagtctttcttcttatacggtgcccttagaaaaggacaactcagaagagtttcgtcagcgagagctgcgtgcggcccagttggctcgagagattgaatcaagcccccagtaccgcctacggatcgccatggagaacgacgatgggcgcactgaagaggagaagcacagtgcagtccagcggcagggctcagggcgggagagccccagcttggcatccagggaggggaagtatatccctctgcctcaacgagtccgggaaggtccccggggaggagttcgatgcagcagctctcggggcggtcggcctggccttagctctttgccacctcgtggccctcaccatctggacaacagcagccctggcccaggttctgaggcccgtggtatcaatggaggcccttcccgcatgtccccaaaggcacagcggcctctgagaggtgccaagactctgtcttcgcccagtaataggccttctggagaaacttctgttccacctcctcctgcagtgggccggatgtatcccccgcgttctcccaagtctgctgcccctgccccaatctcagcttcctgtccagagcctcccatcggctcggcagtgccaacctcttcagcctccatccctgtgacctcatcagtctcagatcctggagtgggctccatttctccagcttctccaaagatctccctggcccccacagatgtaaaagaactctctaccaaggaacctgggagaactctggagccccaggagctggctcggatagctgggaaagtccctggtcttcagaatgaacagaaacgattccaactggaagaactgagaaagtttggggcccagtttaagcttcagcccagtagctcccctgagaacagcctggatccttttcctccccggatcttaaaggaggagcccaaaggaaaggagaaagaggttgatggtctgttgacttcagagcccatggggtctcccgtctcctccaagacagagtccgtatcggataaggaggacaaaccacccctggcaccatcaggaggcactgaggggccagagcagcccccaccaccttgtccaagccaaactggcagccccccggtgggcctcatcaagggagaagacaaagatgagggccctgttgctgaacaagtaaagaaatcaacgttgaaccctaatgctaaggagttcaatcctacaaagcctctgctgtctgtgaataaatccaccagtaccccaacttctccggggccccggactcattcaactccctccatcccggtgctgacagcaggccagagtgggctatacagcccccagtacatctcctacatacctcagatccacatgggaccagctgtgcaggcacctcagatgtatccatatcctgtatccaattcagtgcctgggcagcagggcaagtaccggggagcaaaaggctcccttcctccgcagcgctcggaccaacaccagccagcctcagccccgccgatgatgcaggccgccgcggctgctggcccgcctctggtggctgccacgccctattcttcctacatcccctacaaccctcagcagttcccaggccagccagccatgatgcagcccatggcccactacccctcacagccggtgtttgcccccatgcttcagagcaacccacgcatgctgacgtcgggcagccatccccaggccatcgtgtcatcctctacccctcagtacccttctgcagagcagcctaccccccaagccctttatgccactgttcaccagtcctacccacaccatgccacacagctccatgcccaccagccgcagccggctaccacgcctactggaagccagccgcagtcccagcatgcggcccccagtcctgtccagcatcaggcggggcaggccccacacttgggcagtggacagccacagcagaatctgtaccacccaggggccctgacaggcacgccgccctctctgccaccgggaccttctgcccagtcccctcagagcagcttcccccagccagccgctgtgtatgccatccaccaccagcagctgccccacggcttcaccaacatggcccatgttacccaggcccatgtccaaactggaatcacagcagccccgccccctcaccctggggctccccacccgccccaggtgatgctgctgcacccaccccagagtcatggggggcccccccaaggcgcggtgccccagagtggggtgcctgcactctcagcttccacaccctcaccctacccctacatcggacacccccaaggtgagcagcctggccaggcgcctggatttccaggaggagccgatgacaggattcctccccttccaccccccggggaactgaagattgtcctggccgcgacctgagacctccatgagtggagggaagagtgatctatgtctcttcccccagcagctcggaccactcccagccccccatccccccgttccccaggggagctggggaattcctgccaagcaccttgaatgggaggggcctcacagagggcagggccagggtccagcaggggtggggggttcctgctctgcccctgcccgtccccacccagtcttgccctcccatcctctcatctattcccccgctggagacggaagatcttttattttctattatttataacttcagacttgggccccctgttctttctttcccattaacttgagtgacctgtgtgagagacagacagatgccccacgaggatggctggacaaggacttttactttttattacataaaaatattaaaaaataaataaaaaaaataaaattttaaactaaaaaaaaaaaaaaaaaa

SEQ ID NO: 2312 - DNA, 4000 bp, Homo sapiens
tccgcggtcttctctctccacccccgacaccgcggggctccccccgcccgcccacggcgggccccggctgcccgatccccctcgcttcccgcgctctccagcggggccccagccccggccccctctctccctcccttctctctaattccccttccggacgctgccatcatgttgaagcctcagccgctacaacagccctcccagccccagcagccgccccccacgcaacaggccgtggcccgtcggccccccgggggcaccagccctcccaacggcggcctcccggggccgctggccacctctgcggctcctcccgggcctccagcggccgcctccccctgcctggggcctgtggccgctgccgggagcgggctccgccggggagccgaaggcatcttggcgccgcagccgccgccgccgcagcaacaccaggagaggccgggggcagccgccatcggcagcgccaggggacagagcacaggaaagggacccccacagtcacctgtgtttgaaggcgtctacaacaattccagaatgctgcatttccttacagctgttgtgggctccacttgtgatgtaaaggtgaaaaatggtaccacttatgagggtatcttcaagacgctaagctcaaagtttgaactagccgtggatgctgtgcaccggaaagcatctgagccagcaggtggccctcgtcgggaggacattgtggacaccatggtgtttaagccaagtgatgtcatgcttgttcacttccgaaatgttgacttcaactatgctactaaagacaagttcaccgattcagccattgccatgaactcgaaagtgaatggggaacacaaagagaaggtgcttcagcgctgggaggggggtgacagcaacagcgacgactatgacctcgagtctgacatgtccaatggatgggaccccaatgaaatgttcaagttcaatgaggagaactacggtgtgaagactacctatgatagcagtctttcttcttatacggtgcccttagaaaaggacaactcagaagagtttcgtcagcgagagctgcgtgcggcccagttggctcgagagattgaatcaagcccccagtaccgcctacggatcgccatggagaacgacgatgggcgcactgaagaggagaagcacagtgcagtccagcggcagggctcagggcgggagagccccagcttggcatccagggaggggaagtatatccctctgcctcaacgagtccgggaaggtccccggggaggagttcgatgcagcagctctcggggcggtcggcctggccttagctctttgccacctcgtggccctcaccatctggacaacagcagccctggcccaggttctgaggcccgtggtatcaatggaggcccttcccgcatgtccccaaaggcacagcggcctctgagaggtgccaagactctgtcttcgcccagtaataggccttctggagaaacttctgttccacctcctcctgcagtgggccggatgtatcccccgcgttctcccaagtctgctgcccctgccccaatctcagcttcctgtccagagcctcccatcggctcggcagtgccaacctcttcagcctccatccctgtgacctcatcagtctcagatcctggagtgggctccatttctccagcttctccaaagatctccctggcccccacagatgtaaaagaactctctaccaaggaacctgggagaactctggagccccaggagctggctcggatagctgggaaagtccctggtcttcagaatgaacagaaacgattccaactggaagaactgagaaagtttggggcccagtttaagcttcagcccagtagctcccctgagaacagcctggatccttttcctccccggatcttaaaggaggagcccaaaggaaaggagaaagaggttgatggtctgttgacttcagagcccatggggtctcccgtctcctccaagacagagtccgtatcggataaggaggacaaaccacccctggcaccatcaggaggcactgaggggccagagcagcccccaccaccttgtccaagccaaactggcagccccccggtgggcctcatcaagggagaagacaaagatgagggccctgttgctgaacaagtaaagaaatcaacgttgaaccctaatgctaaggagttcaatcctacaaagcctctgctgtctgtgaataaatccaccagtaccccaacttctccggggccccggactcattcaactccctccatcccggtgctgacagcaggccagagtgggctatacagcccccagtacatctcctacatacctcagatccacatgggaccagctgtgcaggcacctcagatgtatccatatcctgtatccaattcagtgcctgggcagcagggcaagtaccggggagcaaaaggctcccttcctccgcagcgctcggaccaacaccagccagcctcagccccgccgatgatgcaggccgccgcggctgctggcccgcctctggtggctgccacgccctattcttcctacatcccctacaaccctcagcagttcccaggccagccagccatgatgcagcccatggcccactacccctcacagccggtgtttgcccccatgcttcagagcaacccacgcatgctgacgtcgggcagccatccccaggccatcgtgtcatcctctacccctcagtacccttctgcagagcagcctaccccccaagccctttatgccactgttcaccagtcctacccacaccatgccacacagctccatgcccaccagccgcagccggctaccacgcctactggaagccagccgcagtcccagcatgcggcccccagtcctgtccagcatcaggcggggcaggccccacacttgggcagtggacagccacagcagaatctgtaccacccaggggccctgacaggcacgccgccctctctgccaccgggaccttctgcccagtcccctcagagcagcttcccccagccagccgctgtgtatgccatccaccaccagcagctgccccacggcttcaccaacatggcccatgttacccaggcccatgtccaaactggaatcacagcagccccgccccctcaccctggggctccccacccgccccaggtgatgctgctgcacccaccccagagtcatggggggcccccccaaggcgcggtgccccagagtggggtgcctgcactctcagcttccacaccctcaccctacccctacatcggacacccccaaggtgagcagcctggccaggcgcctggatttccaggaggagccgatgacaggattctatgtagggtgggcagaagccacagtcgccgccgccaggggcttgctcctggctctgtcctttgcttccctccgtcctcgctcagttgtgatccagcagcccccctccccactgcctccccagctctcagtgaccccgactgtctcctgacttagccgaggtaagttcaatctcatccctcccagcagctccccttccaccccccggggaactgaagattgtcctggccgcgacctgagacctccatgagtggagggaagagtgatctatgtctcttcccccagcagctcggaccactcccagccccccatccccccgttccccaggggagctggggaattcctgccaagcaccttgaatgggaggggcctcacagagggcagggccagggtccagcaggggtggggggttcctgctctgcccctgcccgtccccacccagtcttgccctcccatcctctcatctattcccccgctggagacggaagatcttttattttctattatttataacttcagacttgggccccctgttctttctttcccattaacttgagtgacctgtgtgagagacagacagatgccccacgaggatggctggacaaggacttttactttttattacataaaaatattaaaaaataaataaaaaaaataaaattttaaactaacttaaaaaaaaaaaaaaaaaaaa

SEQ ID NO: 2313 - DNA, 3781 bp, Homo sapiens
tccgcggtcttctctctccacccccgacaccgcggggctccccccgcccgcccacggcgggccccggctgcccgatccccctcgcttcccgcgctctccagcggggccccagccccggccccctctctccctcccttctctctaattccccttccggacgctgccatcatgttgaagcctcagccgctacaacagccctcccagccccagcagccgccccccacgcaacaggccgtggcccgtcggccccccgggggcaccagccctcccaacggcggcctcccggggccgctggccacctctgcggctcctcccgggcctccagcggccgcctccccctgcctggggcctgtggccgctgccgggagcgggctccgccggggagccgaaggcatcttggcgccgcagccgccgccgccgcagcaacaccaggagaggccgggggcagccgccatcggcagcgccaggggacagagcacaggaaagggacccccacagtcacctgtgtttgaaggcgtctacaacaattccagaatgctgcatttccttacagctgttgtgggctccacttgtgatgtaaaggtgaaaaatggtaccacttatgagggtatcttcaagacgctaagctcaaagtttgaactagccgtggatgctgtgcaccggaaagcatctgagccagcaggtggccctcgtcgggaggacattgtggacaccatggtgtttaagccaagtgatgtcatgcttgttcacttccgaaatgttgacttcaactatgctactaaagacaagttcaccgattcagccattgccatgaactcgaaagtgaatggggaacacaaagagaaggtgcttcagcgctgggaggggggtgacagcaacagcgacgactatgacctcgagtctgacatgtccaatggatgggaccccaatgaaatgttcaagttcaatgaggagaactacggtgtgaagactacctatgatagcagtctttcttcttatacggtgcccttagaaaaggacaactcagaagagtttcgtcagcgagagctgcgtgcggcccagttggctcgagagattgaatcaagcccccagtaccgcctacggatcgccatggagaacgacgatgggcgcactgaagaggagaagcacagtgcagtccagcggcagggctcagggcgggagagccccagcttggcatccagggaggggaagtatatccctctgcctcaacgagtccgggaaggtccccggggaggagttcgatgcagcagctctcggggcggtcggcctggccttagctctttgccacctcgtggccctcaccatctggacaacagcagccctggcccaggttctgaggcccgtggtatcaatggaggcccttcccgcatgtccccaaaggcacagcggcctctgagaggtgccaagactctgtcttcgcccagtaataggccttctggagaaacttctgttccacctcctcctgcagtgggccggatgtatcccccgcgttctcccaagtctgctgcccctgccccaatctcagcttcctgtccagagcctcccatcggctcggcagtgccaacctcttcagcctccatccctgtgacctcatcagtctcagatcctggagtgggctccatttctccagcttctccaaagatctccctggcccccacagatgtaaaagaactctctaccaaggaacctgggagaactctggagccccaggagctggctcggatagctgggaaagtccctggtcttcagaatgaacagaaacgattccaactggaagaactgagaaagtttggggcccagtttaagcttcagcccagtagctcccctgagaacagcctggatccttttcctccccggatcttaaaggaggagcccaaaggaaaggagaaagaggttgatggtctgttgacttcagagcccatggggtctcccgtctcctccaagacagagtccgtatcggataaggaggacaaaccacccctggcaccatcaggaggcactgaggggccagagcagcccccaccaccttgtccaagccaaactggcagccccccggtgggcctcatcaagggagaagacaaagatgagggccctgttgctgaacaagtaaagaaatcaacgttgaaccctaatgctaaggagttcaatcctacaaagcctctgctgtctgtgaataaatccaccagtaccccaacttctccggggccccggactcattcaactccctccatcccggtgctgacagcaggccagagtgggctatacagcccccagtacatctcctacatacctcagatccacatgggaccagctgtgcaggcacctcagatgtatccatatcctgtatccaattcagtgcctgggcagcagggcaagtaccggggagcaaaaggctcccttcctccgcagcgctcggaccaacaccagccagcctcagccccgccgatgatgcaggccgccgcggctgctggcccgcctctggtggctgccacgccctattcttcctacatcccctacaaccctcagcagttcccaggccagccagccatgatgcagcccatggcccactacccctcacagccggtgtttgcccccatgcttcagagcaacccacgcatgctgacgtcgggcagccatccccaggccatcgtgtcatcctctacccctcagtacccttctgcagagcagcctaccccccaagccctttatgccactgttcaccagtcctacccacaccatgccacacagctccatgcccaccagccgcagccggctaccacgcctactggaagccagccgcagtcccagcatgcggcccccagtcctgtccagcatcaggcggggcaggccccacacttgggcagtggacagccacagcagaatctgtaccacccaggggccctgacaggcacgccgccctctctgccaccgggaccttctgcccagtcccctcagagcagcttcccccagccagccgctgtgtatgccatccaccaccagcagctgccccacggcttcaccaacatggcccatgttacccaggcccatgtccaaactggaatcacagcagccccgccccctcaccctggggctccccacccgccccaggtgatgctgctgcacccaccccagagtcatggggggcccccccaaggcgcggtgccccagagtggggtgcctgcactctcagcttccacaccctcaccctacccctacatcggacacccccaagttcaatctcatccctcccagcagctccccttccaccccccggggaactgaagattgtcctggccgcgacctgagacctccatgagtggagggaagagtgatctatgtctcttcccccagcagctcggaccactcccagccccccatccccccgttccccaggggagctggggaattcctgccaagcaccttgaatgggaggggcctcacagagggcagggccagggtccagcaggggtggggggttcctgctctgcccctgcccgtccccacccagtcttgccctcccatcctctcatctattcccccgctggagacggaagatcttttattttctattatttataacttcagacttgggccccctgttctttctttcccattaacttgagtgacctgtgtgagagacagacagatgccccacgaggatggctggacaaggacttttactttttattacataaaaatattaaaaaataaataaaaaaaataaaattttaaactaacttaaaaaaaaaaaaaaaaaaaa

SEQ ID NO: 2314 - DNA, 3758 bp, Homo sapiens
tccgcggtcttctctctccacccccgacaccgcggggctccccccgcccgcccacggcgggccccggctgcccgatccccctcgcttcccgcgctctccagcggggccccagccccggccccctctctccctcccttctctctaattccccttccggacgctgccatcatgttgaagcctcagccgctacaacagccctcccagccccagcagccgccccccacgcaacaggccgtggcccgtcggccccccgggggcaccagccctcccaacggcggcctcccggggccgctggccacctctgcggctcctcccgggcctccagcggccgcctccccctgcctggggcctgtggccgctgccgggagcgggctccgccggggagccgaaggcatcttggcgccgcagccgccgccgccgcagcaacaccaggagaggccgggggcagccgccatcggcagcgccaggggacagagcacaggaaagggacccccacagtcacctgtgtttgaaggcgtctacaacaattccagaatgctgcatttccttacagctgttgtgggctccacttgtgatgtaaaggtgaaaaatggtaccacttatgagggtatcttcaagacgctaagctcaaagtttgaactagccgtggatgctgtgcaccggaaagcatctgagccagcaggtggccctcgtcgggaggacattgtggacaccatggtgtttaagccaagtgatgtcatgcttgttcacttccgaaatgttgacttcaactatgctactaaagacaagttcaccgattcagccattgccatgaactcgaaagtgaatggggaacacaaagagaaggtgcttcagcgctgggaggggggtgacagcaacagcgacgactatgacctcgagtctgacatgtccaatggatgggaccccaatgaaatgttcaagttcaatgaggagaactacggtgtgaagactacctatgatagcagtctttcttcttatacggtgcccttagaaaaggacaactcagaagagtttcgtcagcgagagctgcgtgcggcccagttggctcgagagattgaatcaagcccccagtaccgcctacggatcgccatggagaacgacgatgggcgcactgaagaggagaagcacagtgcagtccagcggcagggctcagggcgggagagccccagcttggcatccagggaggggaagtatatccctctgcctcaacgagtccgggaaggtccccggggaggagttcgatgcagcagctctcggggcggtcggcctggccttagctctttgccacctcgtggccctcaccatctggacaacagcagccctggcccaggttctgaggcccgtggtatcaatggaggcccttcccgcatgtccccaaaggcacagcggcctctgagaggtgccaagactctgtcttcgcccagtaataggccttctggagaaacttctgttccacctcctcctgcagtgggccggatgtatcccccgcgttctcccaagtctgctgcccctgccccaatctcagcttcctgtccagagcctcccatcggctcggcagtgccaacctcttcagcctccatccctgtgacctcatcagtctcagatcctggagtgggctccatttctccagcttctccaaagatctccctggcccccacagatgtaaaagaactctctaccaaggaacctgggagaactctggagccccaggagctggctcggatagctgggaaagtccctggtcttcagaatgaacagaaacgattccaactggaagaactgagaaagtttggggcccagtttaagcttcagcccagtagctcccctgagaacagcctggatccttttcctccccggatcttaaaggaggagcccaaaggaaaggagaaagaggttgatggtctgttgacttcagagcccatggggtctcccgtctcctccaagacagagtccgtatcggataaggaggacaaaccacccctggcaccatcaggaggcactgaggggccagagcagcccccaccaccttgtccaagccaaactggcagccccccggtgggcctcatcaagggagaagacaaagatgagggccctgttgctgaacaagtaaagaaatcaacgttgaaccctaatgctaaggagttcaatcctacaaagcctctgctgtctgtgaataaatccaccagtaccccaacttctccggggccccggactcattcaactccctccatcccggtgctgacagcaggccagagtgggctatacagcccccagtacatctcctacatacctcagatccacatgggaccagctgtgcaggcacctcagatgtatccatatcctgtatccaattcagtgcctgggcagcagggcaagtaccggggagcaaaaggctcccttcctccgcagcgctcggaccaacaccagccagcctcagccccgccgatgatgcaggccgccgcggctgctggcccgcctctggtggctgccacgccctattcttcctacatcccctacaaccctcagcagttcccaggccagccagccatgatgcagcccatggcccactacccctcacagccggtgtttgcccccatgcttcagagcaacccacgcatgctgacgtcgggcagccatccccaggccatcgtgtcatcctctacccctcagtacccttctgcagagcagcctaccccccaagccctttatgccactgttcaccagtcctacccacaccatgccacacagctccatgcccaccagccgcagccggctaccacgcctactggaagccagccgcagtcccagcatgcggcccccagtcctgtccagcatcaggcggggcaggccccacacttgggcagtggacagccacagcagaatctgtaccacccaggggccctgacaggcacgccgccctctctgccaccgggaccttctgcccagtcccctcagagcagcttcccccagccagccgctgtgtatgccatccaccaccagcagctgccccacggcttcaccaacatggcccatgttacccaggcccatgtccaaactggaatcacagcagccccgccccctcaccctggggctccccacccgccccaggtgatgctgctgcacccaccccagagtcatggggggcccccccaaggcgcggtgccccagagtggggtgcctgcactctcagcttccacaccctcaccctacccctacatcggacacccccaagctccccttccaccccccggggaactgaagattgtcctggccgcgacctgagacctccatgagtggagggaagagtgatctatgtctcttcccccagcagctcggaccactcccagccccccatccccccgttccccaggggagctggggaattcctgccaagcaccttgaatgggaggggcctcacagagggcagggccagggtccagcaggggtggggggttcctgctctgcccctgcccgtccccacccagtcttgccctcccatcctctcatctattcccccgctggagacggaagatcttttattttctattatttataacttcagacttgggccccctgttctttctttcccattaacttgagtgacctgtgtgagagacagacagatgccccacgaggatggctggacaaggacttttactttttattacataaaaatattaaaaaataaataaaaaaaataaaattttaaactaacttaaaaaaaaaaaaaaaaaaaa

SEQ ID NO: 2315 - DNA, 1534 bp, Homo sapiens
tcagtgggcgtcgcgcgaaggctaagggagtgtggcgggcggctccgggagccaacatgcctcggtatgcgcagctggtcatgggccccgcgggcagcgggaagagcacctactgtgccaccatggtccagcactgtgaagccctcaaccggtctgtccaagttgtaaacctggatccagcagcagaacacttcaactactccgtgatggctgacatccgggaactgatcgaggtggatgatgtaatggaggatgattctctgcgattcggtcccaacggaggattggtattttgcatggagtactttgccaataattttgactggctggagaactgtcttggccatgtagaggacgactatatcctttttgattgtccaggtcagattgagttgtacactcacctgcctgtgatgaaacagctggtccagcagctcgagcagtgggagttccgagtctgtggagtttttcttgttgattctcagttcatggtggagtcattcaagtttatttctggcatcttggcagccctgagtgccatgatctctctagaaattccgcaagtcaacatcatgacaaaaatggatctgctgagtaaaaaagcaaaaaaggaaattgagaaatttttagatccagacatgtattctttattagaagattctacaagtgacttaagaagcaaaaaattcaagaaactgactaaagctatatgtggactgattgatgactacagcatggttcgatttttaccttacgatcagtcagatgaagaaagcatgaacattgcattgcagcatattgattttgccattcaatatggagaagacctagaatttaaagaaccaaaggaacgtgaagatgagtcttcctctatgtttgacgaatattttcaagaatgccaggatgaatgaagagtttactaaaagtaaccatctaaagagcttgtggccaaaccagcagaacattcttctcttcaaaggatgcaatagtagaaagctacttattttaatgaaaaaaagtaaaacttcgttctttatcagcctcatgcctgaatcaaatttttaattattctgaaactgctgctgtttaaagtggaatcttttagtattataacagcatcactttagattttgtaagtcaaaattgaaatgaatgcacatagatttatatataaattagcacctgagctaaggttaaggctggtctaaacttattttcactttttgtattatttttgagatgcaggaattactgtaacaaaatatgtatgtccgaagggaaaaagctgcaaggatatatataagaccactgcttatctgtatcttcccattttcctatattgaaaatgtatattatttatataacttaaaaagtaaaaataactatgttttgagatatgtatgtgtatatataaaagaaacaaaggtttttaatgattcttggacctagataacaagtaaaaaaaaaaaaaaaaaaaaaaaaaaaaaaaaaaaaaaaaaaaaaaaaaaaaaaaaaaaaaaaaaaaaaaaaaaaa

SEQ ID NO: 2316 - DNA, 2740 bp, Homo sapiens
caggtgtccgttctccttggcagggccggccagaagcaataggtccgggagctccagggctggactggaggctgccacccccatggtgacctcgttggcaacttctcccaaccgagtcacctggggccagaggtcagaggtcggggcaggatagatgtcggggcagactgtacgaagttgctctcaaagatggggaagtcccgaaactggtcgaattcgccgctctggaggtagcgttggagccgtctgggacggcccgtgggagaggctgccatcccacctggttccacctcgccagctccacccagggccggcttagggccgcgatcccgcctcattgcaatgtccccgtccgacgggagcggacggaggagcagagggagaaagcgagggggcgggactacgcgcactgtgacgtcatgatgcggagcgggctttatgacgtcacacaagagcgggctcctgatttgtgatgacgtccctggagggggcggctcctggagatcaggccaaaggggcggccccatcctgctgacgtcaggccccaggtgcggacgggtgccagtgcgcaggtgccggggcccagcgcaggcgcacgggcgtcaggatgcggcctgttcctcccggcgtgctccgcggctcttggctcacagccgtcccttcgctggtgggaagaagccgagatggcggcagccagcgctggggcaacccggctgctcctgctcttgctgatggcggtagcagcgcccagtcgagcccggggcagcggctgccgggccgggactggtgcgcgaggggctggggcggaaggtcgagagggcgaggcctgtggcacggtggggctgctgctggagcactcatttgagatcgatgacagtgccaacttccggaagcggggctcactgctctggaaccagcaggatggtaccttgtccctgtcacagcggcagctcagcgaggaggagcggggccgactccgggatgtggcagccctgaatggcctgtaccgggtccggatcccaaggcgacccggggccctggatggcctggaagctggtggctatgtctcctcctttgtccctgcgtgctccctggtggagtcgcacctgtcggaccagctgaccctgcacgtggatgtggccggcaacgtggtgggcgtgtcggtggtgacgcaccccgggggctgccggggccatgaggtggaggacgtggacctggagctgttcaacacctcggtgcagctgcagccgcccaccacagccccagccctgagacggcggccttcattgagcgcctggagatggaacaggcccagaaggccaagaacccccaggagcagaagtccttcttcgccaaatactggcacatcatcctggggggggccgtgttgctcacagccctgcgtcctgctgcgccagggcccgcgccaccgccacaggaggcctgatggatgtacatcattcccgtcgtcctgttcctcatgatgtcaggagcgccagacaccgggggccagggtgggggtgggggtgggggtggtggtgggggtagtggccggtgagggcccaggctggtcagcgtcccgtcttgcacacccaggggcctccctttctgctggagtcccctgtgtcctcagccatcccaagaagggtttgctggtccctcctttccccccgtcccacgaggccacctgggccagccccttgtcctctgccttctgctggcagaggagcagctggactggggcctttggcacagcagccggtgtctcctgcgcccgcctcccccatggccccatgcagccccaggggcttcccccctgcccatggagtagagcccgagatcctggccactatgccagttctgacctcgcatccccctaccccgagcccatgcagtctgggaacatgccgccttctctccagcctctgtgcctttgttccaggtggtctcaccctcctgtccctggctgggctaggtggtcctgtccaggctcctgcagcgcccccctcactttgacactggactaggatgcagcctcccttctgtgtccccttgagggtaccctgggtcccctcatcaggggcagaggcatgaaagagtcggggctggatggccgggggcttctgggcccgacgcctagtgcagcccctggggtcgtggtttgacatttgtctgcctggtgcaaacaaggaatccttgcctttaaggtgacaggccctccacaggcttccagacttgaaggaaaaggtttaagaaagaaaacaaaaccaacagttagtggagtcaaagcccagacactgtaaatagaaccccctccaccaccccccgccgcccagcatcctacctggactgcggtgctacgagggcctgcgggcctttgctgtgtgccaccctccctgtaagtctatttaaaaacatcgacgatacattgaaatgtgtgaacgttttgaaaagctacagcttccagcagccaaaagcaactgttgttttggcaagacggtcctgatgtacaagcttgattgaaattcactgctcacttgatacgttattcagaaacccaaggaatggctgtccccatcctcatgtggctgtgtggagctcagctgtgttgtgtggcagtttattaaactgtcccccagatcgacacgcaaaaaaaaaaaaaaaaaaaaaaaaaaaaaaaaaaaaaaaaaaaaaaaaaaaaaaaaaaaaaaaaaaaaaaaaaaaaaaaaaaaaaaaaaaa

SEQ ID NO: 2317 - DNA, 2654 bp, Homo sapiens
caggtgtccgttctccttggcagggccggccagaagcaataggtccgggagctccagggctggactggaggctgccacccccatggtgacctcgttggcaacttctcccaaccgagtcacctggggccagaggtcagaggtcggggcaggatagatgtcggggcagactgtacgaagttgctctcaaagatggggaagtcccgaaactggtcgaattcgccgctctggaggtagcgttggagccgtctgggacggcccgtgggagaggctgccatcccacctggttccacctcgccagctccacccagggccggcttagggccgcgatcccgcctcattgcaatgtccccgtccgacgggagcggacggaggagcagagggagaaagcgagggggcgggactacgcgcactgtgacgtcatgatgcggagcgggctttatgacgtcacacaagagcgggctcctgatttgtgatgacgtccctggagggggcggctcctggagatcaggccaaaggggcggccccatcctgctgacgtcaggccccaggtgcggacgggtgccagtgcgcaggtgccggggcccagcgcaggcgcacgggcgtcaggatgcggcctgttcctcccggcgtgctccgcggctcttggctcacagccgtcccttcgctggtgggaagaagccgagatggcggcagccagcgctggggcaacccggctgctcctgctcttgctgatggcggtagcagcgcccagtcgagcccggggcagcggctgccgggccgggactggtgcgcgaggggctggggcggaaggtcgagagggcgaggcctgtggcacggtggggctgctgctggagcactcatttgagatcgatgacagtgccaacttccggaagcggggctcactgctctggaaccagcaggatggtaccttgtccctgtcacagcggcagctcagcgaggaggagcggggccgactccgggatgtggcagccctgaatggcctgtaccgggtccggatcccaaggcgacccggggccctggatggcctggaagctggtggctatgtctcctcctttgtccctgcgtgctccctggtggagtcgcacctgtcggaccagctgaccctgcacgtggatgtggccggcaacgtggtgggcgtgtcggtggtgacgcaccccgggggctgccggggccatgaggtggaggacgtggacctggagctgttcaacacctcggtgcagctgcagccgcccaccacagccccaggccctgagacggcggccttcattgagcgcctggagatggaacaggcccagaaggccaagaacccccaggagcagaagtccttcttcgccaaatactggatgtacatcattcccgtcgtcctgttcctcatgatgtcaggagcgccagacaccgggggccagggtgggggtgggggtgggggtggtggtgggggtagtggccggtgagggcccaggctggtcagcgtcccgtcttgcacacccaggggcctccctttctgctggagtcccctgtgtcctcagccatcccaagaagggtttgctggtccctcctttccccccgtcccacgaggccacctgggccagccccttgtcctctgccttctgctggcagaggagcagctggactggggcctttggcacagcagccggtgtctcctgcgcccgcctcccccatggccccatgcagccccaggggcttcccccctgcccatggagtagagcccgagatcctggccactatgccagttctgacctcgcatccccctaccccgagcccatgcagtctgggaacatgccgccttctctccagcctctgtgcctttgttccaggtggtctcaccctcctgtccctggctgggctaggtggtcctgtccaggctcctgcagcgcccccctcactttgacactggactaggatgcagcctcccttctgtgtccccttgagggtaccctgggtcccctcatcaggggcagaggcatgaaagagtcggggctggatggccgggggcttctgggcccgacgcctagtgcagcccctggggtcgtggtttgacatttgtctgcctggtgcaaacaaggaatccttgcctttaaggtgacaggccctccacaggcttccagacttgaaggaaaaggtttaagaaagaaaacaaaaccaacagttagtggagtcaaagcccagacactgtaaatagaaccccctccaccaccccccgccgcccagcatcctacctggactgcggtgctacgagggcctgcgggcctttgctgtgtgccaccctccctgtaagtctatttaaaaacatcgacgatacattgaaatgtgtgaacgttttgaaaagctacagcttccagcagccaaaagcaactgttgttttggcaagacggtcctgatgtacaagcttgattgaaattcactgctcacttgatacgttattcagaaacccaaggaatggctgtccccatcctcatgtggctgtgtggagctcagctgtgttgtgtggcagtttattaaactgtcccccagatcgacacgcaaaaaaaaaaaaaaaaaaaaaaaaaaaaaaaaaaaaaaaaaaaaaaaaaaaaaaaaaaaaaaaaaaaaaaaaaaaaaaaaaaaaaaaaaaa

SEQ ID NO: 2318 - DNA, 2809 bp, Homo sapiens
gagaggcgcacccgggcggccagctgggctcggagcggaacggggtcaggatggacgaggacgtgctaaccaccctgaagatcctcatcatcggcgagagtggggtgggcaagtccagcctgctcttgaggttcacagatgatacgtttgatccagaacttgcagcaacaataggtgttgactttaaggtgaaaacaatttcagtggatggaaataaggctaaacttgcaatatgggatactgctggtcaagagaggtttagaacattaactcccagctattatagaggtgcacagggtgttatattagtttatgatgtcacaagaagagatacatttgttaaactggataattggttaaatgaattggaaacatactgtacaagaaatgacatagtaaacatgctagttggaaataaaatcgataaggaaaatcgtgaagtcgatagaaatgaaggcctgaaatttgcacgaaagcattccatgttatttatagaggcaagtgcaaaaacctgtgatggtgtacaatgtgcctttgaagaacttgttgaaaagatcattcagacccctggactgtgggaaagtgagaaccagaataaaggagtcaaactgtcacacagggaagaaggccaaggaggaggagcctgtggtggttattgctctgtgttataaactctgggaaattccatctcttgcatatttgatcagatagtgacatctttctgtatataaactctttaactgctattttagggaccttgcagtttgcacataattgttttatatcatagcagtaaatatttgcaagaaatcccactcatcgaccccgggtaaaatgttatggtaagcatgcacagtttgcagtctacagtttttttatgtagcacaaaataggtgtacctttataagtacattcaattttatgatttacatttatcatgtaatttttaaaaaaatccatctatctaggatatgttgatacaaagtctgcttttgctattctttttgcttaaatactcctatcattttctgaattacttggtatttagaactcctagcaccacggggaagaatagaggtatcatcaaacgtggcaaattttctttcaggaataataaagagcatgattccacagcttttctgggatgtttgagattcttttttagtactaagcaaaattctcatcacagaatgtagcccaggccaatttataactaaatctctatttgttcggatgatgcttctaaaacagcattgataggttaaagaagcttggtatttttaatttacttcaatgattagctcagttgcttaactggagttttaatcctgtgatatgtacattggattcatgactgtgcagcatttttagttatgtggtgtttggcagaatgacaataaggttttcccccattttggtttcaggaggacatgaatagtgtgtttattgtaactcctcatacacttttaaaaccaacatcttttttcataaatgttggtagtgtttgtccaggtaccttaactgtagcttgtgtaatgttgatgaatatctgtatcttacggcttccataatggctagttgatattcaaaaacctatttctgtgttttgaggggtggggaaaaaaaacactaagtgataatttgaaaaaggcatattgcttccagattctgatgtgtgagggaaaatactgtcacaatgaaaatcttgacaatttacttaacaagtaaccagtagttcatcaaaaccaacttgtacagactaataaatctttttcacagtattcagttttctcacctcttgctattgtatattgtagatttttttcattcatgtgttatttaatttacactgatctctgctattttaaccccccaaataagttatttgtcctttaaggttggttactataatacccctcagtaagattccagtattaatttctgggcagtttgttctctgtatacaattgcaaatgataagcatttttgtgagtgaccacctttgcaatatgtttgttaatttacttcatgttgggttctttctgaaatgtacatctttacatataaaaacctcacattctacttgatttacacttcctagtctacattacatgtggttgaaggttttatacattctatatgcttttactaaatatacaagatttactactagaaatttggagaaagaacactaacacatgtacttgtgatttgttcatgttatattaaaacttgagatttgtgtatttatgtagagtctgtattgacaagactgttgttttttgctccttgagctatataataatctgtgtattggattgttgtcttgatttggtctaaatttgaatatatatgagttacttgaatataacaaaaatgaattttgtttgatagatttatattgtaacctttttctagttcttgaataaatatagcctgctttccctagatgcatttgtgtaggaagtatatacatttccctattactctcatcagctgaagaatatgtactattgtgttactcaaattatgtggctttcattttgttgttttgttgcaagcttagtgttttgtagtggaggttttgtaaatgaaacagttgtaatatctaaggtcaggcacctagtaacagggttttgttaattcttttcagaatcattgaagcagtcttaaagggtcttttgcagatggtacaaattagaacaattagaatatagtattttgagttctagtagtactgagattgacccaaacaaataaaaaactattcaatttctgagtaatagttaaaaaaaaaaaaaaaaaaaaa

SEQ ID NO: 2319 - DNA, 4255 bp, Homo sapiens
agaggtgaaggggcgggcacccggcggccaggagagagagggagggcgccacgcaccggactgcgggccgagagcgcgcacgccgcgctccgcccctgctgccgcccccgtcgccgccgccgccgccgccgcagcttgggaggtgctgccaccacaggtacctgcacatgttgttctttgtcagtgctgtcaagtgtgtgccagggtgatccatggtcactttccgggatggcagcaaggtgacttcggctgaggatgaccctgactgaaaggctgcgtgagaagatatctcgggccttctacaaccatgggctcctctgtgcatcctatcccatccccatcatcctcttcacagggttctgcatcttagcctgctgctacccactgctgaaactccccttgccaggaacaggacctgtggaattcaccacccctgtgaaggattactcgcccccacctgtggactctgaccgcaaacaaggagagcctactgagcagcctgagtggtatgtgggtgccccggtggcttatgtccagcagatatttgtgaagtcctcagtgtttccctggcacaagaacctcctggcagtagatgtatttcgttcacctttgtcccgggcattccaactggtggaggagatccggaaccacgtgctgagagacagctctgggatcaggagcttggaggagttgtgtctgcaagtgaccgacctgctgccaggccttaggaagctcaggaacctactccctgagcatggatgcctgctgctgtcccctgggaacttctggcagaatgactgggaacgcttccatgctgatcctgacatcattgggaccatccaccagcacgagcctaaaaccctgcagacttcagccacactcaaagacttgttatttggtgttcctgggaagtacagcggggtgagcctctacaccaggaagaggatggtctcctacaccatcaccctggtcttccagcactaccatgccaagttcctgggcagcctgcgtgcccgcctgatgcttctgcaccccagccccaactgcagccttcgggcggagagcctggtccacgtgcacttcaaggaggagattggtgtcgctgagctcatcccccttgtgaccacctacatcatcttgtttgcctacatctacttctccacgcggaagatcgacatggtcaagtccaagtgggggctggccctggctgccgtggtcacagtgctcagctcgctgctcatgtctgtgggactctgcacactcttcggcctgacgcccaccctcaatggcggcgagattttcccctaccttgtggtggttattgggttagagaatgtgttggtgctcaccaagtctgtggtctcaaccccggtagacctggaggtgaagctgcggatcgcccaaggcctaagcagcgagagctggtccatcatgaagaacatggccacggagctgggcatcatcctcatcggctacttcaccctagtgcccgccatccaggagttctgtctctttgctgtcgtggggctggtgtctgacttcttccttcagatgctgtttttcaccactgtcctgtccattgacattcgccggatggagctagcagacctgaacaagcgactgccccctgaggcctgcctgccctcagccaagccagtgggacagccaacgcgctacgagcggcagctggctgtgaggccgtccacaccccacaccatcacgttgcagccgtcttccttccgaaacctgcggctccccaagaggctgcgtgttgtctacttcctggcccgcacccgcctggcacagcgcctcatcatggctggcaccgttgtctggattggcatcctggtatacacagacccagcagggctgcgcaactacctcgctgcccaggtgacggaacagagcccattgggtgagggagccctggctcccatgcccgtgcctagtggcatgctgccccccagccacccggaccctgccttctccatcttcccacctgatgcccctaagctacctgagaaccagacgtcgccaggcgagtcacctgagcgtggaggtccagcagaggttgtccatgacagcccagtcccagaggtaacctgggggcctgaggatgaggaactttggaggaaattgtccttccgccactggccgacgctcttcagctattacaacatcacactggccaagaggtacatcagcctgctgcccgtcatcccagtcacgctccgcctgaacccgagggaggctctggagggccggcaccctcaggacggccgcagtgcctggcccccaccggggcccatacctgctgggcactgggaagcaggacccaagggcccaggtggggtgcaggcccatggagacgtcacgctgtacaaggtggcggcgctgggcctggccaccggcatcgtcttggtgctgctgctgctctgcctctaccgcgtgctatgcccgcgcaactacgggcagctgggtggtgggcccgggcggcggaggcgcggggagctgccctgcgacgactacggctatgcgccacccgagacggagatcgtgccgcttgtgctgcgcggccacctcatggacatcgagtgcctggccagcgacggcatgctgctggtgagctgctgcctggcaggccacgtctgcgtgtgggacgcgcagaccggggattgcctaacgcgcattccgcgcccaggcaggcagcgccgggacagtggcgtgggcagcgggcttgaggctcaggagagctgggaacgactttcagatggtgggaaggctggtccagaggagcctggggacagccctcccctgagacaccgcccccggggccctccgccgccttccctcttcggggaccagcctgacctcacctgcttaattgacaccaacttttcagcgcagcctcggtcctcacagcccactcagcccgagccccggcaccgggcggtctgtggccgctctcgggactccccaggctatgacttcagctgcctggtgcagcgggtgtaccaggaggaggggctggcggccgtctgcacaccagccctgcgcccaccctcgcctgggccggtgctgtcccaggcccctgaggacgagggtggctcccccgagaaaggctccccttccctcgcctgggcccccagtgccgagggttccatctggagcttggagctgcagggcaacctcatcgtggtggggcggagcagcggccggctggaggtgtgggacgccattgaaggggtgctgtgctgcagcagcgaggaggtctcctcaggcattaccgctctggtgttcttggacaaaaggattgtggctgcacggctcaacggttcccttgatttcttctccttggagacccacactgccctcagccccctgcagtttagagggaccccagggcggggcagttcccctgcctctccagtgtacagcagcagcgacacagtggcctgtcacctgacccacacagtgccctgtgcacaccaaaaacccatcacagccctgaaagccgctgctgggcgcttggtgactgggagccaagaccacacactgagagtgttccgtctggaggactcgtgctgcctcttcacccttcagggccactcaggggccatcacgaccgtgtacattgaccagaccatggtgctggccagtggaggacaagatggggccatctgcctgtgggatgtactgactggcagccgggtcagccatgtgtttgctcaccgtggggatgtcacctcccttacctgtaccacctcctgtgtcatcagcagtggcctggatgacctcatcagcatctgggaccgcagcacaggcatcaagttctactccattcagcaggacctgggctgtggtgcaagcttgggtgtcatctcagacaacctgctggtgactggcggccagggctgtgtctccttttgggacctaaactacggggacctgttacagacagtctacctggggaagaacagtgaggcccagcctgcccgccagatcctggtgctggacaacgctgccattgtctgcaactttggcagtgagctcagcctggtgtatgtgccctctgtgctggagaagctggactgagcgcagggcctccttgcccaggcaggaggctggggtgctgtgtgggggccaatgcactgaacctggacttgggggaaagagccgagtatcttccagccgctgcctcctgactgtaataatattaaacttttttaaaaaaccatatcatcatctgtcaggc

SEQ ID NO: 2320 - DNA, 3087 bp, Homo sapiens
ccgggcgggagtagctggtggaccccgttgagctgccgaacttccgggactcccccgcgaccccttcccagcttcccgtccgctccgccgcagcgattgtctcggtgggttgattcggcacaaaccgcccgacccaggggccggtgcgcgtgtggaaggggaagcactcccctcgtggtcgcctggaggtgcgctggaggagggggtgacataaccagggactcgaggtccgccgtgggaatgatccacgaactgctcttggctctgagcgggtaccctgggtccattttcacctggaacaagcggagtggcctgcaggtatcgcaggacttccctttcctccaccccagtgagaccagtgtcctgaatcgactctgccggctcggcacagactatattcgcttcactgagttcattgaacagtacacgggccatgtgcaacagcaggatcaccatccatctcaacagggccaaggtgggttacatggaatctacctgcgggccttctgcacagggctggattctgttttgcagccttatcgccaagcactgcttgatttggaacaagagttcctgggtgatccccatctctccatatcacatgtcaactacttcctagaccagttccagcttctttttccctctgtgatggttgtagtagaacaaattaaaagtcaaaagattcatggttgtcaaatcctggaaacagtctacaaacacagctgtggggggttgcctcctgttcgaagtgcactggaaaaaatcctggccgtttgtcatggggtcatgtataaacagctctcagcctggatgctccatggactcctcttggaccagcatgaagaattctttatcaaacaggggccatcttctggtaatgtcagtgcccagccagaagaggacgaggaggatctgggcattgggggactgacaggaaaacaactgagagaactgcaggacttgcgcctgattgaggaagagaacatgctggcaccatctctgaagcagttttccctacgagtggagattttgccatcctacattccagtgagggttgctgaaaaaatcctatttgttggagaatctgtccagatgtttgagaatcaaaatgtgaacctgactagaaaaggatccattttgaaaaaccaggaagacacttttgctgcagagctgcaccgtctcaagcagcagccactcttcagcttggtggactttgaacaggtggtggatcgcattcgcagcactgtggctgagcatctctggaagttgatggtagaagaatccgatttactgggtcagctgaagatcattaaagacttttaccttctgggacgtggagaactgtttcaggccttcattgacacagctcaacacatgttgaaaacaccacccactgcagtaactgagcatgatgtgaatgtggcctttcaacagtcagcacacaaggtattgctagatgatgacaaccttctccctctgttgcacttgacaatcgagtatcacggaaaggagcacaaagatgctactcaggcaagagaagggccttctcgggaaacttctccccgggaagcccctgcatctggctgggcagccctaggtctttcctacaaagtacagtggccactacatattctcttcaccccagctgtcctggaaaagtacaatgttgtttttaagtacttactgagtgtgcgccgggtgcaagctgagctgcagcactgctgggccctacaaatgcagcgcaagcacctcaagtcgaaccagactgatgcaatcaagtggcgcctaagaaatcacatggcatttttggtggataatcttcagtactatctccaggtagatgtgttggagtctcagttctcccagctgcttcatcagatcaattctacccgagactttgaaagcatccgattggctcatgaccacttcctgagcaatttgctggctcaatcctttatcctattgaaacctgtgtttcactgcctgaatgaaatcctagatctctgtcacagtttttgttcgctggtcagtcagaacctaggcccactggatgagcgtggagccgcccagctgagcattctcgtgaagggctttagccgccagtcttcactcctgttcaagattctctccagtgttcggaatcatcagatcaactcagatttggctcaactactgttacgactagattataacaaatactatacccaggctggtggaactctgggcagtttcgggatgtgaaaatttctggctcataaattgaaataacagccacgttcccaaggttgtaacagaagattcaaaacatcccattctagccacacacaaataaatatctgcggcttagtgataggactctaccttttctcctagaagcagttactgaacatccaggagtacaactccttcccatcattcccatgtggaagggtctctcccatcaaggagaacatgtggcatctctgatcctttacattgagaacatttgttggatatgttcatttattcaatagtcatttattgagcacctactacgtaccttggtactgttcaagctgtgggagatacagcggtaaacaaacaatatagagcagaaagttaaatattttatggttcatatgtgaaaaagtaattatgtttataaatagactaactgctggatgttaccaccaagtaagaaagcaacaggtaagataggctttctctctccctataccaagtaatttatacctacacagattgggcaattctagctaatgaaaatatacttaaaagtatttcttaggccgggcatggtggctcacacctgtaatcccagcactttgggaggccgaggcgggcggatcacctgaagtcaggagtttgagaccagcctgaccaacatgatgaaacctcgattctactaaaaatacaaaaattagccaggtgtggtggcatgtgcctgtaatcccagctactcaggaggctgagacaggagaattgcttgaacctgggaagcagacgctgcagtgagctgagattgtgccattgcattccagcccgggcaacaagagcgaaattccgtctcaaaaaaaaaaaaaaaaaaaa

SEQ ID NO: 2321 - DNA, 2952 bp, Homo sapiens
cagaagtctttgggaggcggccccacgcctcaggcgactggttgttaccgaggaagatggcggcgccagacccgaggcgctagggaagatcgcaccgcggacgcccgctgagcttggcgcacgggccgaccaggagctggtgactgccctcatgtgtgatttgcggcggccagcggcaggtgggatgatggacttggcctacgtctgtgagtgggagaaatggtccaagagcacccactgcccatcggtgcccctggcctgcgcctggtcctgccgaaatctcatcgccttcaccatggacctgcgcagcgatgaccaggacctgacccgcatgatccacatcctggacacggagcacccctgggacctgcactcgatcccctcagagcaccacgaggccatcacctgcctggagtgggaccagtcaggctcccggctcctgtcagcagatgccgacgggcagatcaagtgctggagcatggcggaccacctggctaatagctgggagagctcagtgggcagcctagtggagggggaccccattgtggccctgtcctggctgcacaatggtgtgaaactggccctgcacgtggagaagtcgggcgcctccagcttcggggagaagttctcccgagtcaagttctcaccgtcgctcacgctgttcggcggcaagcccatggagggctggatcgcggtgacggtcagcggcctggtcaccgtgtccctgctgaagcccagcgggcaggtgctgacgtccaccgagagcctgtgccggctgcgcggccgcgtggccctggccgacatcgccttcaccggcggcggcaacatcgtggtggccacggcggacggcagcagcgcgtcgcccgtgcagttctacaaggtgtgcgtgagcgtggtgagcgagaagtgccgtatcgacacggagatcctgccctccctgttcatgcgctgcaccaccgacctcaaccgcaaggacaagtttcccgccatcacccacctcaagttcctggcccgggacatgtcggagcaggtgcttttgtgcgcgtccagccagaccagcagcatcgtggagtgctggtccctgcgcaaggagggactccccgtgaacaacatcttccagcagatctcccccgtggttggcgacaaacagcccacaattctcaaatggcggatcctatcggccaccaacgatctggaccgtgtgtcggccgtggcgctgcccaagctgcccatctcgctcaccaacaccgacctcaaggtggccagcgacacacagttctaccctggcctcgggctggccctggccttccacgacggcagcgtccacatcgtgcaccggctctcactgcagaccatggccgtcttctacagctccgcggccccgaggcctgtggatgagccggccatgaagcgcccccgcaccgcgggccccgccgtccacttaaaggctatgcagctatcgtggacgtcactggccctggtggggattgacagccacgggaagctgagcgtgctccgcctctcaccttccatgggccacccgctggaggtggggctggcgctgcggcacctgctcttcctgctggagtactgcatggtgaccggctacgactggtgggacatcctgctgcacgtgcagcccagtatggtacagagcctggtggagaagctgcacgaggagtacacgcgccagaccgctgccctgcagcaggtcctctccacccggatcctggccatgaaggcctcgctctgcaagctgtcgccctgcacggtgacccgcgtgtgcgactaccacaccaagctcttcctcatcgccatcagctccaccctgaagtcgctgctgcgcccccactttctcaacacgcctgacaagagccccggcgaccggctgaccgagatctgcaccaagatcaccgacgtcgacattgacaaggtcatgatcaacctcaagacggaggaatttgtgctggacatgaacacactgcaggcgctgcagcagctcttgcagtgggtgggcgacttcgtgctgtacctgctggccagcctacccaaccagggttccctgctgaggccgggccacagctttctgcgggacggcacctcgctgggcatgcttcgggaattgatggtggtcatccgcatctggggccttctgaagcccagctgcctgcccgtgtatacggccacctcggatacccaggacagcatgtccctgctcttccgcctgctcaccaagctctggatctgctgtcgcgatgagggcccagcgagcgagccggacgaggcgctggtggatgaatgctgcctgctgcccagccagctgcttatccccagcctggactggctgccagccagcgacggcctggttagccgcctgcagcccaagcagccccttcgtctgcagtttggccgggcgcccacgctgcctggcagtgctgccaccctgcagctcgacggcctcgccagggccccaggccagcccaagatcgaccacctgcggaggctgcaccttggcgcttgccccacggaggaatgcaaggcctgcaccaggtgcggctgtgtcaccatgctcaagtcgcccaacagaaccacggcggtgaagcagtgggagcagcgctggatcaagaactgcctggctgttgaaggccgtgggccggacgcctgcgtgaccagcagagcttctgaggaagcccctgcctttgtccagctgggcccgcagtccacacaccactctcccaggacccccagatccctggaccatctgcatccagaggaccgtccgtgacggccgggggtccaggcggaccttgtggtgacccggctcgggcgtctcctcggtttccttgcctcacccgcggagagcgctgaacctggacaagcagcggctgggaaggacaggtccaataaacgccctctgcgcccagaaaaaaaaaaaaaaaaaaaaaaaaaaaa

SEQ ID NO: 2322 - DNA, 8220 bp, Homo sapiens
gcctggaaactacaaaggattgtgttaattttgtgtttaggaagaaagaggtaatgggtaggaatcaatgtaaacttattcataggccacaccaaaccaggaattcttgtcgtgattgcacttggtagagttaacacacgtgcacattacggaaacgttggtgaccaacaggcgtttcagcgagctttcgcacacctcatgggcctttgtgggctgctggagagatgttggctgcaccatgacccagatggagttttaacattgaatgcggagaacactaattatgcctatcaagttccaaacttccataaatgtgaaatctgtctactatcttttccaaaagaatcccagtttcaacgccacatgagggatcacgagcgaaatgacaagccacatcgatgtgaccagtgcccccaaacatttaatgttgaattcaacctgacacttcataaatgcacccacagcggggaagatcctacctgccctgtgtgtaacaagaaattctccagagtggctagtctcaaagcgcatattatgctacatgaaaaggaagagaatctcatctgttctgagtgtggggatgagtttactctgcagagtcagctggccgtgcacatggaggagcaccgccaggagctggctggaacccggcagcatgcctgcaaggcctgcaagaaagagttcgagacctcctcggagctgaaggaacacatgaagactcattacaaaattagggtatcaagtacaaggtcttataaccggaatatcgacagaagtggattcacgtattcgtgtccgcactgtggaaagacgtttcaaaagccaagccagttaacgcgacacattaggatacacacaggtgaaaggccgttcaaatgtagtgaatgtggaaaggcttttaaccagaagggggcactgcagacccacatgatcaagcacacaggtgaaaaaccccatgcctgtgccttctgtcctgccgccttctctcagaaagggaatcttcagtcgcacgtgcagcgagtccactcagaggtcaagaatggtcctacctataactgtacagaatgtagttgtgtatttaaaagtttaggcagcttaaacacgcatatcagcaagatgcatatgggtgggccacagaattcaacaagttctacagagactgctcatgttttaacggccacactttttcagacgttacctcttcaacagacggaagcccaagccacgtcggcctcaagccagccgagctcccaggcggtgagcgacgtcatccagcagctcctggagctctcagagccggcgccggtggagtcggggcagtccccgcagcctgggcagcagctgagcatcacagtgggcatcaaccaggacattttacagcaagccttagaaaacagtgggctgtcttcaattccagctgcagcacatcctaatgactcctgccatgccaagacctctgcaccacacgctcaaaacccagatgtttccagcgtttcaaatgagcagacggaccccacagacgcagagcaagaaaaagaacaggaaagcccggagaaactggataaaaaagaaaaaaaaatgataaagaagaagtcaccgtttctacctggctccatccgcgaggagaacggcgtgcgctggcatgtgtgtccctactgcgccaaggagttccgcaagcccagcgacctggtccgccacatccgcatccacacccacgagaagcccttcaagtgcccgcagtgcttccgcgccttcgccgtgaagagcacgctgacagcgcacatcaagacgcacaccggcatcaaggcgttcaagtgccagtactgcatgaagagcttctccacctctggcagcctcaaggtgcacattcgcctgcacacaggagttagaccttttgcttgtcctcactgtgacaaaaaatttcgaacctcaggccataggaagactcacattgcttcccactttaaacatacggaattaaggaaaatgaggcaccagcgtaaacctgcaaaggtccgtgttggcaagacgaatgttccagtccctgatattcctttgcaggaaccaatcctcataactgacttaggtctcatccagcccattccaaaaaaccagtttttccaaagctatttcaataataattttgtcaatgaagcagatagaccatacaagtgtttttactgtcatcgtgcatataaaaaatcttgccaccttaaacaacacatcagatcccatacaggtgaaaaaccttttaaatgttctcagtgtggaagaggctttgtttctgcaggcgtgctcaaagcacacatcagaacacacacaggactgaaatctttcaagtgtctgatatgtaatggggctttcactactggtggcagcttacggcgacacatgggtatccacaacgaccttcgtccctatatgtgtccctattgccaaaaaacatttaagacttcactaaattgcaaaaagcacatgaaaacccacagatatgagcttgcccagcagctccaacagcatcagcaggcagcctcgatagatgacagcactgtagaccagcagagcatgcaggcctccactcaaatgcaggtggagatcgagagcgacgagctgccgcagacggcagaggtggtcgcagcgaaccccgaggccatgctggacctggagcctcagcatgtggtgggcacggaggaagcagggctgggccagcagttggcagatcagcccctggaagcagatgaagatgggtttgtggctccacaggaccctctgcgagggcacgtagaccagtttgaagagcagagccctgcgcaacagtccttcgaaccagcagggctaccccaaggttttacagtgactgatacgtaccatcagcagcctcagtttccacctgtccaacagctacaggattccagcacacttgagtctcaggccctctccacaagcttccaccagcagagcttgctgcaggctcccagctctgatgggatgaatgtaacaactcgcttgattcaggagtcatcccaagaggaactggacctgcaggcacaaggttcccagtttctggaggacaacgaggaccagagcaggcgctcttacaggtgtgactattgcaacaaaggctttaagaagtccagccacctgaagcagcatgtgcggtcgcacaccggggaaaagccctacaagtgcaagctctgtggacgcggctttgtttcctctggggtcctcaagtcccacgagaagacacacacaggagtgaaggcgttcagctgcagtgtgtgcaatgcttccttcaccaccaatggcagcctcacccggcacatggccacacatatgagcatgaagccttataagtgtccgttttgtgaggagggtttccgaactacagtgcattgtaaaaagcacatgaagagacaccaaacagtcccctctgctgtgtcagccactggagagacagaaggaggagacatttgtatggaggaagaggaagaacattctgacagaaatgcatcacggaagtctcgtcctgaggtcatcactttcacggaggaggagacagcccagttagccaagatccggccgcaggagagcgccacggtgtcagagaaggtcctggtgcagtccgcggcagaaaaggaccgcatcagtgagctgagggacaagcaggcggagctgcaggacgagcccaagcacgccaactgctgcacatactgccccaagagcttcaagaaacctagcgacctggtgaggcatgttcgaatccatactggagaaaagccatacaaatgtgatgaatgtggaaagagttttactgtgaaatccactctcgattgtcatgtgaagactcacacaggtcagaagctcttcagctgtcacgtctgcagcaacgccttctccacgaagggaagtctgaaggtccacatgcgcctgcacacgggagccaagcccttcaaatgcccgcattgcgagctgcgtttccgtacctcgggtagaagaaagacacacatgcagtttcattataaaccagacccaaagaaggccagaaagcctatgactcgaagctcatcggaaggactgcagcctgtaaacctcctcaactcctcctctactgacccaaacgtgtttatcatgaacaactctgttctaacaggacagtttgatcagaatctgctgcaaccaggactggtgggccaagctattctccctgcctctgtgtcagctgggggtgacctgaccgtgtctctgacagatgggagcctggctaccctagaaggcatccagttacagttggctgctaacttggttggaccaaatgtacagatttctggaatcgatgctgccagcattaataacattacgttgcagattgatccaagcattctgcagcagacgctacagcagggcaacctattggctcagcagctcacgggggagcctggcctggccccacagaacagctctctccagacatcggacagcacggtccctgccagtgttgtcatccagcccatctcaggcctgtccttacagcccacagtgacctctgcgaacctgaccataggcccgctgtctgagcaggattcagtgctgaccactaacagcagtgggacccaagacctcactcaagtgatgacttcgcaaggtctagtgtccccctccggcggtccccacgagatcaccctgaccattaacaactccagcctgagccaggtcctggcacaggccgctgggcccactgccacgtcttcctcggggtctccacaggaaattaccctgactatctccggttccaggtctgtgcagcacagtgtgggaccccaggagtgtggatctgtggaggcattgtatttggagaactccagcgacaaaacttaacactacaagcggaagccttccttcaacaacaccgacgtctccatcggccatctcgactcagaacctggtcatgtcctcgtcgggcgtgggaggtgacgctagtgtcacgctgacgctggccgatactcagggtatgctatctggaggcctggacactgtcacactcaacatcacctctcagggtcagcagttcccagcgctcctcacggatccctctctctcgggccagggtggagcaggctcgccgcaagtcatactagtgagccacacgccacagtcagcgtctgctgcttgtgaagaaatagcctaccaggtagctggcgtctctgggaacctggccccgggcaaccagccagagaaggagggccgggcgcaccagtgcctggagtgtgaccgcgccttctcatcggcggcggtgctcatgcaccacagcaaggaggtgcatggccgggagcgcatccacggctgccccgtgtgcaggaaggccttcaagcgcgccacgcacctcaaggagcacatgcagacacaccaggccggcccctctttgagctcccagaagccaagagtgtttaaatgtgacacttgtgagaaggcatttgccaaaccaagccagctggagcgccacagccgcatacacacaggggagcggccgttccattgcacgctttgtgagaaagccttcaaccagaagagtgcgctgcaggtgcacatgaagaagcacacgggggagcggccctacaagtgtgcctactgcgtcatgggcttcacgcagaagagcaacatgaagctgcacatgaagcgggcgcacagctatgctggagctctgcaggagtctgcaggtcacccggagcaggatggggaggagctgagccggaccctccacctggaggaggtggtgcaggaggctgccggcgagtggcaggccctcacccacgtcttctgatgcgagttggaagtacacctttaagaatgtttctgaagttacgttttgtgaagagcaaagcacttggaatctctgttttaaagcttcaagtgttaaaaatgctacaatagttttttatctataaaattatctaaagaatcattgtctttcagagactcataggaaaaaaaaactgggaaaagtgtcaccgcattgttctcttttgtctacaaatcactgaactcaggtactactgtaggcagtttcctcctcagtctcctccgtggctagtgtgtctagttcacgaagcaattaactgggtcttactatcattgtagtgtgatttctttgtattagcaaagacaaaaacgctaacatggaaaaagtatgtcagattttccttcatgtttctggttataagaagcatagcttacaaagcaagcgtaagattgaggcatgaagttcagaaaaaaaagtgttataacacacagggaagttttttccactcttttctctgtgcattttgaaaattagtcaaaatggactcttttcagtctaccataagttaatataactgataccttgagagatggctggaccaattctctccatgacatgtttaatcattagttacaagaatgcagtatctggggcgtcaacatggggactcgagtaaacctgacccaccaataaggattcagctgtccacacgggctggcgacacacttaccgcatcaatctgtgttcaggtccagggttacataattgcagaagcacaagccatacatcgcaggtaggaaaccacagaaccgtctgcaaggagcaagcaacggtggccctgtccaccccagcaaataagaagcatatctgtagcttaaggccacgaatccgtaaaaaccccatgactttctcttcgtgcataaacagatgtatttttgatttcagggaattctttagtatcgtcaatggtgccacataaaacatgtcccaaaccaaatcccacccgtgctgggcagagtgcgtgcacgccattcctacagcattccaaagatggaaggttctttacttcatgttaatttttcctttgaaattatttatatgttctatatataaatacatatgtacatagatatatgggcctctgtgtggctgaacagtatattttgtaaatataagtactagtcctaattgcagaaagagcgtcagtttcacctccccacgagcacttcagatcagtattgtattcattttattcataaatggatatctttttcattgtcatataaagctgggttttatttttttttcctgaaaaataattgcctttattttctctcgttgcctccttggtttcagaagagagtagttttattataaatattgtatggactttgtatattaagagaggagctcatttcagattcctaaagaaatagacattttactgttattttgaaagggcatcttttgatttttttgttgttgttgttcacttttggcatatgtatataagtaatattgacggtgatatgaaaacttttgttatgtgaagatatttaagtcagaaaattgttaaataatattacttcttttccaaactgctttgtgtattgtatatttttttaagaaaaagaaaagccttatttgacttatgcttgtgatactggacttcttaccaatccggaggtttccttccttgaatgtcagtgtgtaaacctggctgtagccgcatatgcagaataactgtaattgtgctagagttttaaaggttctgcttttaatgcactttttattttataattttgtattgaaatattttagaaatgttgattaattttggtgaaaaaatatccccaaagtggaaattattggaattttaaacttttgttcttgctgggttatttattttgattttagcattaaatgtcatctcaggatatctctaaaaggggttgtttaattcctaattgtatagaaagctagtttggtgaattgtattggttaattgactgtttaaggccttaacaggtgaatctagagcctacttttattttggttaaagaaaaagaaaatatcaataattcaattttgtgtcttttctcaatttattagcaaacacaagacattttatgtattatttcgatttacttcctaattataaaagctgcttttttgcagaacattccttgaaaatataaggttttgaaaagacataattttacttgaatctttgtggggtacaggttgatctttatattttactggttgttttaaaaattctagaaaagagatttctaggcctcatgtataaccagggttttgaggataaagaactgtatttttagaactatctcatcatagcatatctgctttggaataactataaataaaagatgaagttaggaaaaaaaaaaaaaaaaaaa

SEQ ID NO: 2323 - DNA, 2618 bp, Homo sapiens
gggagtgtggcgttctgtgaagagttcggtgctaacctccctcacgcggcggtggctgccgggaccctagcaggtttcagctggagcggcggcggcggcaacatggcagagaccgcggccggagtgggccgcttcaagaccaactatgctgtggagcgcaaaattgagcctttctacaagggcggaaaagcacagctggaccagactggccagcacctcttctgcgtctgtggcaccagagtcaacattctggaagtggcctcgggggccgtgctgcggagtctggagcaggaggaccaggaggacatcactgcctttgacctcagccctgacaacgaggtgctggtgacagccagtcgggcattgctgctggctcagtgggcctggcaagagggcagcgttacccgcctgtggaaggcgatacacacggcccccgtggccaccatggccttcgaccccacctccactctgctagccacaggtggctgtgatggggccgtgcgcgtctgggacatcgtgcggcactacgggacacaccacttccgaggctcgcccggtgtcgtgcacctagtggccttccacccggaccctacacgcctgctgctcttctcctcggccacggatgccgccatccgcgtgtggtcactgcaggaccggtcatgcctggctgtgctgactgcccactacagcgccgtcacctcactggccttcagcgccgacggccacaccatgctcagctccggccgtgacaagatatgtatcatctgggaccttcagagctgccaggccacgaggaccgtgcctgtgtttgagagcgtggaggctgctgtgctgttgccagaggagccagtgtcccagctgggtgtgaagtccccagggctgtactttctgacagctggcgaccaaggcactctgcgcgtgtgggaggcagcttctgggcagtgtgtgtacacgcaggcccagccgccgggccctgggcaggagctgacccactgcaccctggcacacaccgccggcgtggtcctcaccgccaccgccgaccacaacctgttgctctacgaggctcgctccctgcggctgcagaaacagttcgctggctacagtgaggaggttttggatgtccggtttcttgggcccgaggactcccacgttgtcgtggcctccaatagcccctgcctaaaagtgtttgagctgcagacgtcagcctgccagatcctccacggccacacggatatcgtcctggccctggatgtgttccggaaggggtggctctttgccagctgtgccaaggatcagagcgtccgtatctggagaatgaacaaggctggccaggtgatgtgcgtggctcagggttccggtcacacacacagtgtgggcaccgtctgctgctctaggctgaaggagtccttcctggtgacaggcagccaggactgcactgtgaagctgtggcctcttcccaaagccttgctgtccaagaacacagccccagacaacggccctatcctcctgcaggcccagaccactcagcgctgccatgataaggacatcaacagcgtggctattgcccccaacgacaagctgctggccacaggctcacaggaccgcacggccaagctctgggccctgccacagtgccagctgctgggtgtcttctcaggccaccggcgtggcctctggtgcgtccagttctctcccatggaccaggtgctggccacggcctcagctgatggcaccatcaagctctgggcactccaggacttcagctgtctcaagacatttgaggggcacgatgcttctgtgctgaaggtggcctttgtgagccgtggcacgcagctgctgtccagcggttcggatggcctcgtgaagctctggaccatcaagaacaacgagtgtgtgcggacgctggatgcccacgaggacaaggtctgggggctgcactgcagccggctggacgaccacgccctcactggggccagtgactcccgagtcatcctctggaaggatgtgaccgaggcggagcaggcagaggagcaggccaggcaagaggagcaggtggtcaggcagcaagagctggacaacctgctgcatgagaagcggtacctgcgggcgctgggcctggccatctccctggatcggccccacaccgtgctgactgtcatccaggccatccggagggaccctgaggcctgcgagaagctggaagccaccatgctccgactgcggcgcgaccagaaagaggccctgctgcgcttctgcgtcacgtggaacaccaactcgcggcactgccacgaggcccaggccgtgctgggtgtgctcttgaggcgagaggcccccgaggagctgctggcctacgaaggcgtgcgggcagcgcttgaggccctgctgccctacactgagcggcactttcagcggctcagcaggaccctccaggccgccgctttcttggacttcctgtggcacaacatgaagctccctgtgccggccgccgcccccaccccctgggaaacccataaaggcgcactgccctagccggtccggcctctctccagtccatcctgaacccctggaaaacccataaaggccgctctcctggcaaaaaaaaaaaaaaaaaaaaaaaa

SEQ ID NO: 2324 - DNA, 2316 bp, Homo sapiens
ctactccgagaggccccgggtccctctgccacaacttctgtcgctctgccgcctgcaccgtgacccgcactattcacgggagccctagagaggacaccgggacacccagaagccggggaatgatgtttcaggattcagtggcctttgaggatgtggctgtcagcttcacccaggaggagtgggctttgctggatccttcccagaagaatctctacagggatgtgatgcaggaaaccttcaagaacctgacctctgtaggaaaaacatggaaagttcagaacattgaagatgagtacaaaaatcccaggagaaatctaagtcttatgagagagaaactctgtgaaagtaaagaaagtcatcactgtggagaaagcttcaaccagattgcagatgacatgctgaacaggaaaactcttcctggaataacaccatgtgaaagcagtgtgtgtggagaagttggcacgggtcattcatctcttaatacgcatatcagagctgacactggacacaagtcatctgagtatcaggaatatggagagaatccatatagaaataaggaatgtaagaaagccttcagttatcttgactcctttcaatcacatgataaagcttgcactaaagagaaactctatgatggtaaagaatgtacagaaaccttcatttcccattcatgcattcaaagacacagggtaatgcacagtggagatggaccttataaatgtaagttttgtgggaaagccttctattttctcaatttatgtcttatccatgaacgaattcacactggtgtgaaaccatataagtgtaaacaatgtggtaaggcctttactcgttccactacccttccagtacatgaaagaactcacacaggagtgaatgccgatgaatgtaaagaatgtgggaatgcattcagttttcctagtgaaatccgtagacataaaaggtctcacactggagaaaaaccctatgagtgtaagcaatgtgggaaagtcttcatttctttcagttccattcagtatcataagatgactcacactggagagaaaccctatgaatgtaagcagtgtgggaaagcctttagatgtggctcacaccttcaaaagcatggaaggactcacactggagagaaaccctatgaatgtaggcaatgtggtaaagccttcagatgtacctcggaccttcaaaggcatgaaaagacacacactgaggataaaccctatggatgtaagcagtgtgggaaaggctttagatgtgcttcacaacttcaaattcatgaaaggacgcacagtggagagaaaccccatgaatgtaaggaatgtggaaaagtattcaagtatttttcttccttgcgtatacatgaaaggacgcacactggagagaagccccgtgaatgtaagcaatgtggaaaagcattcaggtatttctcttccttgcatatacatgaaaggacacacactggagataagccatatgagtgtaaggtatgtggcaaagccttcacttgttccagttccattcgatatcatgaaaggactcacactggagagaaaccctatgaatgtaagcactgtggtaaggcctttatttccaattacattcgatatcatgaaaggactcacactggagagaaaccctatcaatgcaagcaatgtggcaaagcctttattctgccagttcatgtcgagaacatgaaagaactcataccattaatagatgagaaatccttttagtggaagcaatgggagaagctttctgttgtcccacttcctttgaaacacaagaaaagagagtggtgaaagaacctctggataactgctttttgaattgagaagagagacttgcgataggacaataaaatctagaagaacttggatggtttcgtaatacaattcacctatagccaatcttgcatgagatttcaaaggcacagaaaaggaaggcatcagtcacatattagaggccccacacagggagagaggtgtgtggctacccgcttccagcccattttcctgattctttggcttgttaatcgagaatatcccccaaatcacttgtctctgttcctcagagttgtaggtctccagatatgtccccagtgctccacattaaagatacatgcccactttgctgtttcttcagaaatgttaaaatgtttaccagagaactaataaatgttgttatggctggaaatactcactgatgcccaactcttctatagattgagttggtttaagaggtctactttgtattgcaagcattgttgtttctacggattagcgagcctgttcttgattaaaccaactagatgggagcttg

SEQ ID NO: 2325 - DNA, 1759 bp, Homo sapiens
ctcaggcctgacggtccgagtggagctgcgggacagcccgaacctccaggtcagccccgcggccctccatggcgctggtgcgcgcactcgtctgctgcctgctgactgcctggcactgccgctccggcctcgggctgcccgtggcgcccgcaggcggcaggaatcctcctccggcgataggacagttttggcatgtgactgacttacacttagaccctacttaccacatcacagatgaccacacaaaagtgtgtgcttcatctaaaggtgcaaatgcctccaaccctggcccttttggagatgttctgtgtgattctccatatcaacttattttgtcagcatttgattttattaaaaattctggacaagaagcatctttcatgatatggacaggggatagcccacctcatgttcctgtacctgaactctcaacagacactgttataaatgtgatcactaatatgacaaccaccatccagagtctctttccaaatctccaggttttccctgcgctgggtaatcatgactattggccacaggatcaactgcctgtagtcaccagtaaagtgtacaatgcagtagcaaacctctggaaaccatggctagatgaagaagctattagtactttaaggaaaggtggtttttattcacagaaagttacaactaatccaaaccttaggatcatcagtctaaacacaaacttgtactacggcccaaatataatgacactgaacaagactgacccagccaaccagtttgaatggctagaaagtacattgaacaactctcagcagaataaggagaaggtgtatatcatagcacatgttccagtggggtatctgccatcttcacagaacatcacagcaatgagagaatactataatgagaaattgatagatatttttcaaaaatacagtgatgtcattgcaggacaattttatggacacactcacagagacagcattatggttctttcagataaaaaaggaagtccagtaaattctttgtttgtggctcctgctgttacaccagtgaagagtgttttagaaaaacagaccaacaatcctggtatcagactgtttcagtatgatcctcgtgattataaattattggatatgttgcagtattacttgaatctgacagaggcgaatctaaagggagagtccatctggaagctggagtatatcctgacccagacctacgacattgaagatttgcagccggaaagtttatatggattagctaaacaatttacaatcctagacagtaagcagtttataaaatactacaattacttctttgtgagttatgacagcagtgtaacatgtgataagacatgtaaggcctttcagatttgtgcaattatgaatcttgataatatttcctatgcagattgcctcaaacagctttatataaagcacaattactagtatttcacagtttttgctaatagaaaatgctgattctgattctgagatcaatttgtgggaattttacataaatctttgttaattactgagtgggcaagtagacttcctgtctttgctttcttttttttttctttttgatgccttaatgtagatatctttatcattctgaattgtattatatatttaaagtgctcattaatagaatgatggatgtaaattggatgtaaatattcagtttatataattatatctaatttgtacccttgttgaaattgtcatttatacaataaagcgaattctttatctctaaaaaaaaaaaaaaaaaaaaa

SEQ ID NO: 2326 - DNA, 3022 bp, Homo sapiens
cggagtcagaaaggcgaggggcgccgggaactggcgtgtgggactccagacaggagaggctgcgccttccccgcaccgggaccttcgcgacacaccagatcctcgcccctggctcgcgcgaacgcacaggatgaccaccaccctcgtgtctgccaccatcttcgacttgagcgaagttttatgcaagggtaacaagatgctcaactatagtgctcccagtgcagggggttgcctgctggacagaaaggcagtgggcacccctgctggtgggggcttccctcggaggcactcagtcaccctgcccagctccaagttccaccagaaccagctcctcagcagcctcaagggtgagccagcccccgctctgagctcgcgagacagccgcttccgagaccgctccttctcggaagggggcgagcggctgctgcccacccagaagcagcccgggggcggccaggtcaactccagccgctacaagacggagctgtgccgcccctttgaggaaaacggtgcctgtaagtacggggacaagtgccagttcgcacacggcatccacgagctccgcagcctgacccgccaccccaagtacaagacggagctgtgccgcaccttccacaccatcggcttttgcccctacgggccccgctgccacttcatccacaacgctgaagagcgccgtgccctggccggggcccgggacctctccgctgaccgtccccgcctccagcatagctttagctttgctgggtttcccagtgccgctgccaccgccgctgccaccgggctgctggacagccccacgtccatcaccccaccccctattctgagcgccgatgacctcctgggctcacctaccctgcccgatggcaccaataacccttttgccttctccagccaggagctggcaagcctctttgcccctagcatggggctgcccgggggtggctccccgaccaccttcctcttccggcccatgtccgagtcccctcacatgtttgactctccccccagccctcaggattctctctcggaccaggagggctacctgagcagctccagcagcagccacagtggctcagactccccgaccttggacaactcaagacgcctgcccatcttcagcagactttccatctcagatgactaagccagggtagggagggacctcctgcctactccagcccctaccctgcacccacatcccataccctcttctccctacccatcccattccccacaggccctacattaacaaggttaagctcaacccctttcccccagcacctcagaatgtgccctccctctccccctcataaccccacctaacataaggacaagtcaatttgtcagtagcttcttctggcttgaaaccccctccctggattttatagcccacttaccatgcataacagacaagtcccatattttgtcagtagatgcctttttttttccggcttaagccttaagtgccaaatcacaagagaaaaagcagtaacagtttacagaagcaacttagtgccttgtaatctaactttgtcactgtgactacattacctcttcagcgccagagggcacccgtgggcctcccggagcctctgcccatggcggggtggagacccggaaccagcagccccctccactggcgacacaactgcaccttccctcatttcagtctcccgcacacttattcctcctcccctcttcccggtggcacctctccacctgtacccgcccccccaccccccccacccctgccccttggaagagttgttgccagaccagggttttgggggaaacctgtcttgacattcaaaacctttttcttcccgatctgaacccctgttgactaatcttgcctgggtttgtgtaggtctgcaggaaggaaggctgaaaaagcggacgaagattttgacttaagtgggactttgtgatttaattttttcttttttttaagtggggaggaaggggaagctagatggactaggagagacttgattttggtgctaaagttccccagttcatatgtgacatctttttaaaaaaaataacaacaaaaaaaaaatgagagaaaagctaaaaaaaaaaaagtaaggggtgagcagttaatggtattcattccacatacaatatctgtgtaaaacgatttcctgtagaagtagctttaatggtttttgctctagaataccgtaggtctatccttagagcactcacgccatgctttcttccctgggttttaaacttcatataactttcagaaattggagagcaaaaattttgcttgtcactgcacatcaatataaaaaagcttatttaacttatcaaaacgtatttattgccaaactatgcttttttttgttaattttgttcatatttatcgggatgacaaatccatagaatatattcttttatgttaaattatgatcttcatattaatcttaaaattttgtgacgtgtctttttcctttttttccacagttttaatatattattcttcaacgacattttttgtaactttacacttttttggttattttattttaaaaaaatgaaaaattaatttaaaaaaatgcaaaaaactgttggattatttattttagaaattcccccctttgtgttggactgcaaattgagtttctttctctttaggcctttcacaactaggactgagaatgtatgtaaaagttctgtgacagtacagaaggaaaacaactttttatgtatagcttctaaaaggggaaaaaaaaaaaaagagaaaccctttgacttccacgtgcccatctcaagacattccactcacagatttgaggttctggattccaggtctggagttttccaatgttaatgtaaacagaactggcacacacacattaagatgaatgtaattattattcctcttgctggtcactaccgtcgctttctatttctctttctttgtgtgaatttatttaaaagaaaaaaaaactttttgtaacgactatttgcagtttaaaaatcaataaaccccgttttttcaagaaacatt

SEQ ID NO: 2327 - DNA, 1477 bp, Homo sapiens
ggccacagtgcgcatgtgtgcggctgtgctttggctcttcgggtaaagatggcggagcgcgggtacagcttttcgctgactacattcagcccgtctggtaaacttgtccagattgaatatgctttggctgctgtagctggaggagccccgtccgtgggaattaaagctgcaaatggtgtggtattagcaactgagaaaaaacagaaatccattctgtatgatgagcgaagtgtacacaaagtagaaccaattaccaagcatataggtttggtgtacagtggcatgggccccgattacagagtgcttgtgcacagagctcgaaaactagctcaacaatactatcttgtgtaccaagaacccattcctacagctcagctggtacagagagtagcttctgtgatgcaagaatatactcagtcaggtggtgttcgtccatttggagtttctttacttatttgtggttggaatgagggacgaccatatttatttcagtcagatccatctggagcttactttgcctggaaagctacagcaatgggaaagaactatgtgaatgggaagactttccttgagaaaagatataatgaagatctggaacttgaagatgccattcatacagccatcttaaccctaaaggaaagctttgaagggcaaatgacagaggataacatagaagttggaatctgcaatgaagctggatttaggaggcttactccaactgaagttaaggattacttggctgccatagcataacaatgaagtgactgaaaaatccagaatttcagataatctatctacttaaacatgtttaaagtatgttttgttttgcagactttttgcatacttatttctacatggtttaaatcgactgtttttaaaatgacacttataaatcctaataaactgttaaacccaccttccagccttttaggagttgctaaaattttaacagttatttcctgctttttatcacagttgatttctgaagactacattgccaagcagaatgatgaaatgactttttcgttgtcaggcaattttggttaagtcaaatcttaatgccctcttcgctatcagatgttgcctgtgtttccataaagcaaaatgctgattttggtaaaaaacatgactgcttctagagctgggaggatctgcagactttcacggattcatggaacaagaaaagaagcataggtacttttaggtgccattaggtattgatcagtgaaatcctagggtgctctatgagattgtactaggcctatgaagagtggtaagccaaataggtctccatgggagatacattatgtaaataaataaacaatggtttgctggttcctgttggtgtctccacaagtaggtaaacatgtttaaaggaacccgggttcttagattttgttagactttttaaactcaaggatgagcataagtgcttgaaataaaatgctaatacttaagtgtcaaaaaaaaaaaaaaa

SEQ ID NO: 2328 - DNA, 2158 bp, Homo sapiens
agttctgcatttctgcagagacagaaagaaacgcagctcttgacttcttttttgtaaacattactgtaagagttgtgataactttttattctactatgtatatgtatggaatagtattaataaatgaactagggaaggatgtaataaattagacatctcttcattttagagagaagatggaaacaacattgcttttcttttctcaaataaatatgtgtgaatcaaaagaaaaaacttttttcaagttaatacatggttcaggaaaagaagaaacaagcaaagaagccaaaatcagagctaaggaaaaaagaaatagactaagtcttcttgtgcagaaacctgagtttcatgaagacacccgctccagtagatctgggcacttggccaaagaaacaagagtctcccctgaagaggcagtgaaatggggtgaatcatttgacaaactgctttcccatagagatggactagaggcttttaccagatttcttaaaactgaattcagtgaagaaaatattgaattttggatagcctgtgaagatttcaagaaaagcaagggacctcaacaaattcaccttaaagcaaaagcaatatatgagaaatttatacagactgatgccccaaaagaggttaaccttgattttcacacaaaagaagtcattacaaacagcatcactcaacctaccctccacagttttgatgctgcacaaagcagagtgtatcagctcatggaacaagacagttatacacgttttctgaaatctgacatctatttagacttgatggaaggaagacctcagagaccaacaaatcttaggagacgatcacgctcatttacctgcaatgaattccaagatgtacaatcagatgttgccatttggttataaagaaaattgattttgctcatttttatgacaaacttatacatctgcttctaacatatcgcatgtttatgttaagatttggtcccatcctttaaactgaaatatgtcatgtgaaattattttaaaaatgtaaaaacaaaactttctgctaacaaaatacatacagtatctgccagtatattctgtaaaaccttctatttgatgtcattccatttataatcagaaaaaaaacttatttcttaatcaaaaggcagtacaaaaaaagtaataatgttttataagattgtagagttaagtaaaagttaagcttttgcaaagttgtcaaaagttcaaacaaaagtctagttgggattttttaccaaagcagcataatatgtgttatataaacataataatactcagatatccaaatgttcagatagcatttttcataatgaatgttctcttttttttggtaatagtgtagaagtgatctggttcttacaatgggagatgaagaacatttattattgggttactactaaccctgtcccaagaatagtaatatcacctctagttataagccagcaacaggaacttttgtgaagacacattcatctctacagaacttcagattaaatataatctagattaatgactgagaataagatccacatttgaactcattcctaagtgaacatggacgtacccagttatacaaagtacttctgttggtcacagaaacatgaccagattttgcatatctccaggtagggaactaagtagactaccttatcaccggctaagaaaacttgctactaaactattaggccatcaatggcttgaataaaaaccagagaaggtttttcccaggacgtctcatgtttggccctttagaattggggtagaaatcagaaatgagatgaggggaagaagcaaggagtctaaggccctagcgatttgggcatctgccacattggttcatattcagaaagtgttatctcattgattatattcttgttaagcaaatctccttaagtaattattattcaaataagattatactcatacatctatatgtcactgttttaaagagatatttaatttttaatgtgtgttacatggtctgtaaatatttgtatttaaaaatgccatgcattaggctttggaaatttaatgttagttgaaatgtaaaatgtgaaaactttagatcatttgtagtaataaatatttttaacttcattcatacagttaagtttatctgacaataaaagctctgactgaaaaaaaaaaaaaaa

SEQ ID NO: 2329 - DNA, 3568 bp, Homo sapiens
ccggtcctgagacacgctgtgtggctgaaaagtgaaggcaagagctcatttggcctctgtgctcccctccgcaagggatcgtttctccagaagagctggatattctttcgcccagttatggcagacaagttaacgagaattgctattgtcaaccatgacaaatgtaaacctaagaaatgtcgacaggaatgcaaaaagagttgtcctgtagttcgaatgggaaaattatgcatagaggttacaccccagagcaaaatagcatggatttccgaaactctttgtattggttgtggtatctgtattaagaaatgcccctttggcgccttatcaattgtcaatctaccaagcaacttggaaaaagaaaccacacatcgatattgtgccaatgccttcaaacttcacaggttgcctatccctcgtccaggtgaagttttgggattagttggaactaatggtattggaaagtcagctgctttaaaaattttagcaggaaaacaaaagccaaaccttggaaagtacgatgatcctcctgactggcaggagattttgacttatttccgtggatctgaattacaaaattactttacaaagattctagaagatgacctaaaagccatcatcaaacctcaatatgtagccagattcctaaggctggcaaaggggacagtgggatctattttggaccgaaaagatgaaacaaagacacaggcaattgtatgtcagcagcttgatttaacccacctaaaagaacgaaatgttgaagatctttcaggaggagagttgcagagatttgcttgtgctgtcgtttgcatacagaaagctgatattttcatgtttgatgagccttctagttacctagatgtcaagcagcgtttaaaggctgctattactatacgatctctaataaatccagatagatatatcattgtggtggaacatgatctaagtgtattagactatctctccgacttcatctgctgtttatatggtgtaccaagcgcctatggagttgtcactatgccttttagtgtaagagaaggcataaacatttttttggatggctatgttccaacagaaaacttgagattcagagatgcatcacttgtttttaaagtggctgagacagcaaatgaagaagaagttaaaaagatgtgtatgtataaatatccaggaatgaagaaaaaaatgggagaatttgagctagcaattgtagctggagagtttacagattctgaaattatggtgatgctgggggaaaatggaacgggtaaaacgacatttatcagaatgcttgctggaagacttaaacctgatgaaggaggagaagtaccagttctaaatgtcagttataagccacagaaaattagtcccaaatcaactggaagtgttcgccagttactacatgaaaagataagagatgcttatactcacccacaatttgtgaccgatgtaatgaagcctctgcaaattgaaaacatcattgatcaagaggtgcagacattatctggtggtgaactacagcgagtacgtttacgcctttgcttgggcaaacctgctgatgtctatttaattgatgaaccatctgcatatttggattctgagcaaagactgatggcagctcgagttgtcaaacgtttcatactccatgcaaaaaagacagcctttgttgtggaacatgacttcatcatggccacctatctagcggatcgcgtcatcgtttttgatggtgttccatctaagaacacagttgcaaacagtcctcaaacccttttggctggcatgaataaatttttgtctcagcttgaaattacattcagaagagatccaaacaactataggccacgaataaacaaacttaattcaattaaggatgtagaacaaaagaagagtggaaactactttttcttggatgattagactgactctgagaatattgataagccatttattaaaaggagtatttactagaattttttgtcatataaaacttgaatcaggattttatgccccacatactctggaacttgaagtataatatacttaatataacataaaaagccagttgggttctaaattgtagttgaaacacagaaaatgccacttttctgttcctgaagaggctcttttgtgcataatattctaaaatgaagacatttcaagctatacaaattacttccaagttttcatgatgtatgggaagattttcagtaggtgtattatattcacggtaccaaatgctgaccagtgttgctccattttttaaatcttgaaaagggtttctgtacttacctggtttgccaagtatgccagtgtaatgaaactgcccttattttaaaagccagtcaaagattccactgattgacatttgataaataaacatcaggattatgtttattgtttgttttcagtctttgcactatattaccagtatatggtttccgaggaagattatctactgcaaaacaccactgttggaaaaataggtatttttaaattgtttttaatccttttttggtgcttttaaacatgtttaagcaaaaaccaattcagtccattccccgcaaaaaacccctaactttactctgaactttttttgtttttgcattccatgaggttctgtattcagtcattctctaggtaatgtcatttttgtacacatatatttatataatcactgattgagatttaggaaaaagcatttctaaagaatatttgcttcccttagaactacagactcgaaatctttaaagatggtgcctaagcatctatgtattttttttaagttccacagatttttctgttgggcaggccaaggattataaaccacttccctaaaggcaacattaatgcaaaagtccccagatggcaatacaaagtatcccctggtaccacatatattcatttgtgagtttggatatagagcacattatctaaaccattttgtagttccaaaaacccatctaaatttcttgagttcctgaattttgaacaggattacctggagcctggagccactttaagttgtacttctgactaaactggaattatgagtgaggaagagtgtttactaaataaatgactggggcaagcaaaattgaggaggaaattagaaactgtttgacaaactttaagagctacttgaaataacagaagtcttgattaatatgcaaataatggctagaaagtatggtttaactggaccctattatgccttttaaaaataatttcagtaacccataaatacatgttgtaaaaaattcaaatatacagaatggaataaaaaaatgatctccctttattaccctcccaaaggttaccagcgtttgaatttaataatgtatattctttcatgcttttttctgtgcacttacctaagtgtgaatatgtaaagggtttgttttgtatacaaatgggattatactaaaataagtaatgcctatttttaaggataggttaaatttgtgaatgatcatttcaaatatattgaataaaataagcaaaagctattgttatttactgatcctgaaaaaaaaaaaaaaaaaaaaaaaaaaaaaaaaaaaaaaaaaaa

SEQ ID NO: 2330 - DNA, 2032 bp, Homo sapiens
gttactttttaaatggacaaaagtggctctcaatccagcacatgcacattgaagcaagttaaaggatttaatatgaagcacagaagcagatagtgccaaatagcaagcagtagttgttacacatttctggaaaagcagtgtccgtgttgttatgtacacctccaaaaaaagttcaaatgtgtaggggaattgttgtgtaaagtaaactgaactgcagggtagcagtattttaatagctattatagacctgtatttactgtatttaaatgagtaaaggaacaagcagtgacacatcactaggaagggtgagcagggcagcatttccttctcccactgctgctgagatggcagaaattagtcgaattcagtacgaaatggaatatactgaaggcattagtcagcgaatgagggtcccagaaaagttaaaagtagcaccgccaaacgctgacctggaacaaggattccaagaaggagttccaaatgctagtgtgataatgcaagttccggagaggattgttgtagcaggaaataatgaagatgtttcattttcaagaccagcagatcttgaccttattcagtcaactccctttaaacccctggcactgaaaacaccacctcgtgtacttacgctgagtgaaagaccactagattttctggatttagaaagacctcctacaacccctcaaaatgaagaaatccgagcagttggcagactaaaaagagagcggtctatgagtgaaaatgctgttcgccaaaatggacagctggtcagaaatgattctctgtggcacagatcagattctgccccaagaaataaaatttcaaggttccaggcaccgatttctgcaccggagtacactgtgacaccatcgccacaacaggctcgggtctgtcctccccatatgttacctgaagatggagctaatctttcctctgctcgtggcattttgtcgcttatccagtcttctactcgtagggcataccagcagatcttggatgtgctggatgaaaatcgcagacctgtgttgcgtggtgggtctgctgccgccacttctaatcctcatcatgacaacgtcaggtatggcatttcaaatatagatacaaccattgaaggaacgtcagatgacctgactgttgtagatgcagcttcactaagacgacagataatcaaactaaatagacgtctacaacttctggaagaggagaacaaagaacgtgctaaaagagaaatggtcatgtattcaattactgtagctttctggctgcttaatagctggctctggtttcgccgctagaggtaacatcagccctcaaaaatactgtctcaacagctggaaatataaaagatttgcaaacttctttgtttctgtctctgcattgtatgccattttatagtccacaccctgaaaatgtatttcttccagaaagtctggaggaaggacctatatttgtagaagtaaaggtatattctgtcactcagctgtattcacgtctgagcagttctgcagtaacacctgcttaaaattctccctttgcatgttttgtaaataggctccagttttgttttttaaaaggaatttattttttgcctcatcagtccacccaactgattctgaatgggagagagtctgtagagaattgattcagaaaagtgtctgtgaaagaaaaacaattattttgtcctgtttctcaaacagtgttaagcagttttgttaatagacatttttgcatcgacacttcaacattaacactttgaaagtcatggtctggtgccagatttaagaaactcgaaccacctaatatttcataaccttcttcattaggtacttgtacagattaatttctaacattgcagcagtttcatatgtgtgcaatatgtgcattctttcattttagttttgcacttggttttctataaagtacgtttttactcagttcatgcgtgaacaatttaaaaaacgacagaataaggtacaaatgtagtgtatttaataaactgtcaaccaaagaaaaaaaaaaaaaaaaaaaaaaa

SEQ ID NO: 2331 - DNA, 1690 bp, Homo sapiens
aacgccagcgcctgcgcactgagggcggcctggtcgtcgtctgcggcggcggcggcggctgaggagcccggctgaggcgccagtacccggcccggtccgcatttcgccttccggcttcggtttccctcggcccagcacgccccggccccgccccagccctcctgatccctcgcagcccggctccggccgcccgcctctgccgccgcaatgatgatgatggcgctgagcaagaccttcgggcagaagcccgtgaagttccagctggaggacgacggcgagttctacatgatcggctccgaggtgggaaactacctccgtatgttccgaggttctctgtacaagagatacccctcactctggaggcgactagccactgtggaagagaggaagaaaatagttgcatcgtcacatgatcacggatacacgactctagccaccagtgtgaccctgttaaaagcctcggaagtggaagagattctggatggcaacgatgagaagtacaaggctgtgtccatcagcacagagccccccacctacctcagggaacagaaggccaagaggaacagccagtgggtacccaccctgcccaacagctcccaccacttagatgccgtgccatgctccacaaccatcaacaggaaccgcatgggccgagacaagaagagaaccttccccctttgctttgatgaccatgacccagctgtgatccatgagaacgcatctcagcccgaggtgctggtccccatccggctggacatggagatcgatgggcagaagctgcgagacgccttcacctggaacatgaatgagaagttgatgacgcctgagatgttttcagaaatcctctgtgacgatctggatttgaacccgctgacgtttgtgccagccatcgcctctgccatcagacagcagatcgagtcctaccccacggacagcatcctggaggaccagtcagaccagcgcgtcatcatcaagctgaacatccatgtgggaaacatttccctggtggaccagtttgagtgggacatgtcagagaaggagaactcaccagagaagtttgccctgaagctgtgctcggagctggggttgggcggggagtttgtcaccaccatcgcatacagcatccggggacagctgagctggcatcagaagacctacgccttcagcgagaaccctctgcccacagtggagattgccatccggaacacgggcgatgcggaccagtggtgcccactgctggagactctgacagacgctgagatggagaagaagatccgcgaccaggacaggaacacgaggcggatgaggcgtcttgccaacacggccccggcctggtaaccagcccatcagcacacggctcccacggagcatctcagaagattgggccgcctctcctccatcttctggcaaggacagaggcgaggggacagcccagcgccatcctgaggatcgggtgggggtggagtgggggcttccaggtggcccttcccggcacacattccatttgttgagccccagtcctgccccccaccccaccctccctacccctccccagtctctggggtcaggaagaaaccttattttaggttgtgttttgtttttgtataggagccccaggcagggctagtaacagtttttaaataaaaggcaacaggtcatgttcaatttcttcaacaaaaaaaaaaaaaaa

SEQ ID NO: 2332 - DNA, 1717 bp, Homo sapiens
aacgccagcgcctgcgcactgagggcggcctggtcgtcgtctgcggcggcggcggcggctgaggagcccggctgaggcgccagtacccggcccggtccgcatttcgccttccggcttcggtttccctcggcccagcacgccccggccccgccccagccctcctgatccctcgcagcccggctccggccgcccgcctctgccgccgcaatgatgatgatggcgctgagcaagaccttcgggcagaagcccgtgaagttccagctggaggacgacggcgagttctacatgatcggctccgaggtgggaaactacctccgtatgttccgaggttctctgtacaagagatacccctcactctggaggcgactagccactgtggaagagaggaagaaaatagttgcatcgtcacatggtaaaaaaacaaaacctaacactaaggatcacggatacacgactctagccaccagtgtgaccctgttaaaagcctcggaagtggaagagattctggatggcaacgatgagaagtacaaggctgtgtccatcagcacagagccccccacctacctcagggaacagaaggccaagaggaacagccagtgggtacccaccctgcccaacagctcccaccacttagatgccgtgccatgctccacaaccatcaacaggaaccgcatgggccgagacaagaagagaaccttccccctttgctttgatgaccatgacccagctgtgatccatgagaacgcatctcagcccgaggtgctggtccccatccggctggacatggagatcgatgggcagaagctgcgagacgccttcacctggaacatgaatgagaagttgatgacgcctgagatgttttcagaaatcctctgtgacgatctggatttgaacccgctgacgtttgtgccagccatcgcctctgccatcagacagcagatcgagtcctaccccacggacagcatcctggaggaccagtcagaccagcgcgtcatcatcaagctgaacatccatgtgggaaacatttccctggtggaccagtttgagtgggacatgtcagagaaggagaactcaccagagaagtttgccctgaagctgtgctcggagctggggttgggcggggagtttgtcaccaccatcgcatacagcatccggggacagctgagctggcatcagaagacctacgccttcagcgagaaccctctgcccacagtggagattgccatccggaacacgggcgatgcggaccagtggtgcccactgctggagactctgacagacgctgagatggagaagaagatccgcgaccaggacaggaacacgaggcggatgaggcgtcttgccaacacggccccggcctggtaaccagcccatcagcacacggctcccacggagcatctcagaagattgggccgcctctcctccatcttctggcaaggacagaggcgaggggacagcccagcgccatcctgaggatcgggtgggggtggagtgggggcttccaggtggcccttcccggcacacattccatttgttgagccccagtcctgccccccaccccaccctccctacccctccccagtctctggggtcaggaagaaaccttattttaggttgtgttttgtttttgtataggagccccaggcagggctagtaacagtttttaaataaaaggcaacaggtcatgttcaatttcttcaacaaaaaaaaaaaaaaa

SEQ ID NO: 2333 - DNA, 1854 bp, Homo sapiens
ggagcctctagaactatgagcccgaggccttcccctctcccagagcgcagaggctttgaaggctacctctgggaagccgctcaccgtcggaagctgcgggagctgaaactgcgccatcgtcactgtcggcggccatgacaccgctcgtctcccgcctgagtcgtctgtgggccatcatgaggaagccacgagcagccgtgggaagtggtcacaggaagcaggcagccagccaggaagggaggcagaagcatgctaagaacaacagtcaggccaagccttctgcctgtgatgggatgattgctgagtgtcctggggccccagcaggcctggccaggcagccggaagaggtggtattgcaggcctctgtctcctcataccatctattcagagacgtagctgaagtcacagccttccgagggagcctgctaagctggtacgaccaagagaaacgggacctaccatggagaagacgggcagaagatgagatggacctggacaggcgggcatatgctgtgtgggtctcagaggtcatgctgcagcagacccaggttgccactgtgatcaactactataccggatggatgcagaagtggcctacactgcaggacctggccagtgcttccctggaggaggtgaatcaactctgggctggcctgggctactattctcgtggccggcggctgcaggagggagctcggaaggtggtagaggagctagggggccacatgccacgtacagcagagaccctgcagcagctcctgcctggcgtggggcgctacacagctggggccattgcctctatcgcctttggccaggcaaccggtgtggtggatggcaacgtagcacgggtgctgtgccgtgtccgagccattggtgctgatcccagcagcacccttgtttcccagcagctctggggtctagcccagcagctggtggacccagcccggccaggagatttcaaccaagcagccatggagctaggggccacagtgtgtaccccacagcgcccactgtgcagccagtgccctgtggagagcctgtgccgggcacgccagagagtggagcaggaacagctcttagcctcagggagcctgtcgggcagtcctgacgtggaggagtgtgctcccaacactggacagtgccacctgtgcctgcctccctcggagccctgggaccagaccctgggagtggtcaacttccccagaaaggccagccgcaagccccccagggaggagagctctgccacctgtgttctggaacagcctggggcccttggggcccaaattctgctggtgcagaggcccaactcaggtctgctggcaggactgtgggagttcccgtccgtgacctgggagccctcagagcagcttcagcgcaaggccctgctgcaggaactacagcgttgggctgggcccctcccagccacgcacctccggcaccttggggaggttgtccacaccttctctcacatcaagctgacatatcaagtatatgggctggccttggaagggcagaccccagtgaccaccgtaccaccaggtgctcgctggctgacgcaggaggaatttcacaccgcagctgtttccaccgccatgaaaaaggttttccgtgtgtatcagggccaacagccagggacctgtatgggttccaaaaggtcccaggtgtcctctccgtgcagtcggaaaaagccccgcatgggccagcaagtcctggataatttctttcggtctcacatctccactgatgcacacagcctcaacagtgcagcccagtgacacctctgaaagcccccattccctgagaatcctgttgttagtaaagtgcttatttttgtagttaaaaaaaaaaaaaaaa

SEQ ID NO: 2334 - DNA, 3748 bp, Homo sapiens
ggctgaggcggaggagccgccgcttctgacctcgctctggctccggtgcgcgcggctgagcgcgtgcgaggccccgcgcgtcgggcaggggcggcggcggccactgcgcgccgccctgaggagcgccccagcggcggcgcgactgcggctgaggagagagccggctccgggcctccgcgtcctcctgctcccccggccccccgcctcctcgggggggcggcggcggcgatgttctcggtcctctcgtacgggcggctggtggcccgcgccgtgctcggcggcctctcgcagaccgaccccagggccggcggcggcggcggcggcgactacggactggtgacggccggctgcggcttcgggaaggacttccgtaagggcctcctcaagaagggcgcgtgctacggggacgacgcgtgcttcgtggcccggcaccgttccgcggacgtgctcggggttgcagatggtgtaggaggctggagagactatggagttgatccatctcaattctcagggactttaatgcggacgtgtgaacgtttagtaaaagaaggacggttcgtacctagtaatcccattggaattctcaccacaagctactgtgagttgctgcaaaataaagtccctttgctcggtagcagcaccgcctgcattgtggtgctggacagaaccagccaccgcttacacacagcaaacctgggcgattcaggcttcctggttgtcaggggtggtgaagtcgtgcaccgatcagatgagcagcagcattacttcaacactccattccagctctcaatcgctccccctgaagccgagggagtcgtcttgagcgacagtccggatgctgctgatagcacgtctttcgatgtccagctaggagacattatcctgacggcaacagatggactctttgacaacatgcctgattatatgattcttcaggagctaaaaaagttaaagaattcaaattatgagagtatacaacagactgccagaagcattgctgagcaagctcatgagctggcctatgacccaaattatatgtcaccttttgcacagtttgcatgtgacaatggattgaatgtgagaggtggaaagccagatgacatcaccgtccttctttcaatagtggctgagtatacagactagctgaggtgtcaagtcctgcctttcctttcatcatcccaaatttcccctgccatgtgtgctgatcctgctggcaggaccacatttctttgccactgatctcaatggccagtgatgtaagtcttttgcctgtcttcttgagactcgttgagatctttgttgagaaccactactatcattcactagctcatatctgccggcagcaattgaagagatccaatatttgaagattggccttcatttctcgatgttctttccatgatggggatggaggtgttcagtgccaccgtggctgttacttttcaaagtagttgaagtattgaaaatgagtaatgttggtaaagtgaattcaaaatcctagtatgctaaagggatggtacaagtctaacacaaattgtacgtaatgatacatctactagaaacatacattattcatcaaaagaaatgttacatgtgtactccacaggcatagtctttgttatgatgattggtgtggctttatgtctttgttataaactcctatttttcaggggcttatgattctgctctaaaacattgctctgggttatacagttttgatcccaaaagcttttttgttacaaatcgggagaaaaatccattttagttctatggatggaaatatttcatgcttttaaaaagatgtttgtgttcctgtggttaaagttttggcagtttattgattagtccaaatcacaggctaaggcctgatctccaggaggggtaggggagacactttaccagtatttttttatggaaataatactcaaggttgtaaaacccctcaaagcctagaaatttaattgttatggctgaaattcctcctagttgtctgatagaatgcccctgaatgggaactctaggtcccaaggcctgaagggttgagaacagacagctgtaactttgaattttgttggctttcagtggtcatgctacctacccatactcgtactctcagaccttttattagtagccttgctttctatagagcatgcaccaaatccagtgagtccatgtggagagagcactgtgtgcgcagcggcagcagcacagacgtccatgaggaaaactcccagtgatgatctgacatttacaattaccccacatggaaatttaggggtttctgaatcaagcttaatgtttacagtttccaaatagccattttgcagtgtatagtttccttacaaaactaccccgcattcagttttcacattatctgcaagctgaaacttatttttaagttttgtgtacaagttgactgctgtaaagatatatatttttgggtcagtttttttccttcattaacttggtggtagaaaaaaatatatacttagaaatccttaaattaaagccatgttttatatataagtcaggtaacattggtgtatagatgagaatgcaattaaacctgatgagaatctacttgagaatatagaaagtctttctctaaaggagatactgactccctggtttattgcattaaaatttatgtttgaggttacctcaacttgttttaaaagattttgttttgtgaatttgtactgtatatttgagtaactgtcaggcttttatttaaaattgtttaacatgtaccatgtacatgtcattactatatttcaatgcatcatgcttgtaacaggcatttcatttataataagaatgagttattcatttgtaagccgttcagtaatttatctactattcctaaattggcataatgttagataatctattttgaatcacctttaattacatgtcagaatgccttaactaccctaacttgacaaaacagaattctttggtagacgcggtgggggcggggtggggggtctggacggagtctctatttaaggagaaatcatcatgctatgataaaacacagaagcatgagtggcaagtggcggggtatttattttgcacaaactatttgcagtctctgtgtatttaaaaagtaaagaaagttgcatccagaagggttttgttagaatgaatacatttatattaggactgacaacttcagctcttttgtttaggttttcaattatttttggtaagagtatgtagccttatgatctggatatattttgcattcattttccaacgcctacatttaattcctggtaagagcagtgctcgtcaagtttctggtttttctctgctctcatttaacccgtcaaacacaatctttgtaaagctagattggtggtgttttatacaacttatttactcagcttacctttttgagaaacgattgttagaaattgacgatgtgtttgttccagtgatactgaaagtagtgggggcaagaattgagtttcacagtggaattggctttggatctggcctatagattagtgacataaaatattttctctattttcccctgttctttttgtgttatgcacttaattttatgactgccgggggggtcagctggagtgctgcttaacaagtatctctcctactctcagtggtcagaggctgtgttggacccatagtagaattttccaggtcacagacccaagcttccatgggttgttactgtgctgtaccacttggtgggtctgattctgaacctgatgtgtgtgtt

SEQ ID NO: 2335 - DNA, 1628 bp, Homo sapiens
gcaggaccgtcattgacgccatgagcgcgctgctgcggctgctgcgcacgggtgccccagccgctgcgtgcctgcggttggggaccagtgcagggaccgggtcgcgccgtgctatggccctgtaccacactgaggagcgcggccagccctgctcgcagaattaccgcctcttctttaagaatgtaactggtcactacatttccccctttcatgatattcctctgaaggtgaactctaaagaggaaaatggcattcctatgaagaaagcacgaaatgatgaatatgagattgccaccaaggagccaatgaatcccattaaacaatatgtaaaggatggaaagctacgctatgtggcgaatatcttcccttacaagggttatatatggaattatggtaccctccctcagacttgggaagatccccatgaaaaagataagagcacgaactgctttggagataatgatcctattgatgtttgcgaaataggctcaaagattctttcttgtggagaagttattcatgtgaagatccttggaattttggctcttattgatgaaggtgaaacagattggaaattaattgctatcaatgcgaatgatcctgaagcctcaaagtttcatgatattgatgatgttaagaagttcaaaccgggttacctggaagctactcttaattggtttagattatataaggtaccagatggaaaaccagaaaaccagtttgcttttaatggagaattcaaaaacaaggcttttgctcttgaagttattaaatccactcatcaatgttggaaagcattgcttatgaagaagtgtaatggaggagctataaattgcacaaacgtgcagatatctgatagccctttccgttgcactcaagaggaagcaagatcattagttgaatcggtatcatcttcaccaaataaagaaagtaatgaagaagagcaagtgtggcacttccttggcaagtgattgaaacatctgaaattctgctgtcaagattcccatctctaaggactccaagtgctagagacaagggggtctatgagcatttactgacttcctgttaaaacttcattttttcaaactttttgagctatgcaatatataaataaacagtaagaattttaaattactctcctttggacatttattgatataaaaagaagattttggccaggcacggtggctcatgcctgtaatttcagcactttgggaggccgaggtgggcagatcacaaggtcaggagttcaagaccagcctggccagtatgttgaaaccccatctctattaaaaatacaaaaattagccaggcgtggtggtgcatgcctgtagacccagctactcaggaggctgaggcagaagaactgcttgagcccaggaggcagaggttgcagtgagcagagattgtgccactgcactccagcctaggcgacagagagagactccgtctcaaaaaaaaaaaaaagattttgtttcatttcatagcacaaatttagaggcattgagttgaccatttctagtttctatacctgaaggaacccattgattttaccagtttttatttctgtagattggatgtaaaaatcacagattcaataaattaataaactttgtgtaaaaaaaaaa

SEQ ID NO: 2336 - DNA, 1617 bp, Homo sapiens
gcaggaccgtcattgacgccatgagcgcgctgctgcggctgctgcgcacgggtgccccagccgctgcgtgcctgcggttggggaccagtgcagggaccgggtcgcgccgtgctatggccctgtaccacactgaggagcgcggccagccctgctcgcagaattaccgcctcttctttagaaaatggcattcctatgaagaaagcacgaaatgatgaatatgagaatctgtttaatatgattgtagaaatacctcggtggacaaatgctaaaatggagattgccaccaaggagccaatgaatcccattaaacaatatgtaaaggatggaaagctacgctatgtggcgaatatcttcccttacaagggttatatatggaattatggtaccctccctcagacttgggaagatccccatgaaaaagataagagcacgaactgctttggagataatgatcctattgatgtttgcgaaataggctcaaagattctttcttgtggagaagttattcatgtgaagatccttggaattttggctcttattgatgaaggtgaaacagattggaaattaattgctatcaatgcgaatgatcctgaagcctcaaagtttcatgatattgatgatgttaagaagttcaaaccgggttacctggaagctactcttaattggtttagattatataaggtaccagatggaaaaccagaaaaccagtttgcttttaatggagaattcaaaaacaaggcttttgctcttgaagttattaaatccactcatcaatgttggaaagcattgcttatgaagaagtgtaatggaggagctataaattgcacaaacgtgcagatatctgatagccctttccgttgcactcaagaggaagcaagatcattagttgaatcggtatcatcttcaccaaataaagaaagtaatgaagaagagcaagtgtggcacttccttggcaagtgattgaaacatctgaaattctgctgtcaagattcccatctctaaggactccaagtgctagagacaagggggtctatgagcatttactgacttcctgttaaaacttcattttttcaaactttttgagctatgcaatatataaataaacagtaagaattttaaattactctcctttggacatttattgatataaaaagaagattttggccaggcacggtggctcatgcctgtaatttcagcactttgggaggccgaggtgggcagatcacaaggtcaggagttcaagaccagcctggccagtatgttgaaaccccatctctattaaaaatacaaaaattagccaggcgtggtggtgcatgcctgtagacccagctactcaggaggctgaggcagaagaactgcttgagcccaggaggcagaggttgcagtgagcagagattgtgccactgcactccagcctaggcgacagagagagactccgtctcaaaaaaaaaaaaaagattttgtttcatttcatagcacaaatttagaggcattgagttgaccatttctagtttctatacctgaaggaacccattgattttaccagtttttatttctgtagattggatgtaaaaatcacagattcaataaattaataaactttgtgtaaaaaaaaaa

SEQ ID NO: 2337 - DNA, 1572 bp, Homo sapiens
gcaggaccgtcattgacgccatgagcgcgctgctgcggctgctgcgcacgggtgccccagccgctgcgtgcctgcggttggggaccagtgcagggaccgggtcgcgccgtgctatggccctgtaccacactgaggagcgcggccagccctgctcgcagaattaccgcctcttctttaaatctgtttaatatgattgtagaaatacctcggtggacaaatgctaaaatggagattgccaccaaggagccaatgaatcccattaaacaatatgtaaaggatggaaagctacgctatgtggcgaatatcttcccttacaagggttatatatggaattatggtaccctccctcagacttgggaagatccccatgaaaaagataagagcacgaactgctttggagataatgatcctattgatgtttgcgaaataggctcaaagattctttcttgtggagaagttattcatgtgaagatccttggaattttggctcttattgatgaaggtgaaacagattggaaattaattgctatcaatgcgaatgatcctgaagcctcaaagtttcatgatattgatgatgttaagaagttcaaaccgggttacctggaagctactcttaattggtttagattatataaggtaccagatggaaaaccagaaaaccagtttgcttttaatggagaattcaaaaacaaggcttttgctcttgaagttattaaatccactcatcaatgttggaaagcattgcttatgaagaagtgtaatggaggagctataaattgcacaaacgtgcagatatctgatagccctttccgttgcactcaagaggaagcaagatcattagttgaatcggtatcatcttcaccaaataaagaaagtaatgaagaagagcaagtgtggcacttccttggcaagtgattgaaacatctgaaattctgctgtcaagattcccatctctaaggactccaagtgctagagacaagggggtctatgagcatttactgacttcctgttaaaacttcattttttcaaactttttgagctatgcaatatataaataaacagtaagaattttaaattactctcctttggacatttattgatataaaaagaagattttggccaggcacggtggctcatgcctgtaatttcagcactttgggaggccgaggtgggcagatcacaaggtcaggagttcaagaccagcctggccagtatgttgaaaccccatctctattaaaaatacaaaaattagccaggcgtggtggtgcatgcctgtagacccagctactcaggaggctgaggcagaagaactgcttgagcccaggaggcagaggttgcagtgagcagagattgtgccactgcactccagcctaggcgacagagagagactccgtctcaaaaaaaaaaaaaagattttgtttcatttcatagcacaaatttagaggcattgagttgaccatttctagtttctatacctgaaggaacccattgattttaccagtttttatttctgtagattggatgtaaaaatcacagattcaataaattaataaactttgtgtaaaaaaaaaa

SEQ ID NO: 2338 - DNA, 1595 bp, Homo sapiens
gcaggaccgtcattgacgccatgagcgcgctgctgcggctgctgcgcacgggtgccccagccgctgcgtgcctgcggttggggaccagtgcagggaccgggtcgcgccgtgctatggccctgtaccacactgaggagcgcggccagccctgctcgcagaattaccgcctcttctttaagaatgtaactggtcactacatttccccctttcatgatattcctctgaaggtgaactctaaagaggaaaatggcattcctatgaagaaagcacgaaatgatgaatatgagaatctgtttaatatgattgtagaaatacctcggtggacaaatgctaaaatggagattgccaccaaggagccaatgaatcccattaaacaatatgtaaaggatggaaagctacgctatgtggcgaatatcttcccttacaagggttatatatggaattatggtaccctccctcagattctttcttgtggagaagttattcatgtgaagatccttggaattttggctcttattgatgaaggtgaaacagattggaaattaattgctatcaatgcgaatgatcctgaagcctcaaagtttcatgatattgatgatgttaagaagttcaaaccgggttacctggaagctactcttaattggtttagattatataaggtaccagatggaaaaccagaaaaccagtttgcttttaatggagaattcaaaaacaaggcttttgctcttgaagttattaaatccactcatcaatgttggaaagcattgcttatgaagaagtgtaatggaggagctataaattgcacaaacgtgcagatatctgatagccctttccgttgcactcaagaggaagcaagatcattagttgaatcggtatcatcttcaccaaataaagaaagtaatgaagaagagcaagtgtggcacttccttggcaagtgattgaaacatctgaaattctgctgtcaagattcccatctctaaggactccaagtgctagagacaagggggtctatgagcatttactgacttcctgttaaaacttcattttttcaaactttttgagctatgcaatatataaataaacagtaagaattttaaattactctcctttggacatttattgatataaaaagaagattttggccaggcacggtggctcatgcctgtaatttcagcactttgggaggccgaggtgggcagatcacaaggtcaggagttcaagaccagcctggccagtatgttgaaaccccatctctattaaaaatacaaaaattagccaggcgtggtggtgcatgcctgtagacccagctactcaggaggctgaggcagaagaactgcttgagcccaggaggcagaggttgcagtgagcagagattgtgccactgcactccagcctaggcgacagagagagactccgtctcaaaaaaaaaaaaaagattttgtttcatttcatagcacaaatttagaggcattgagttgaccatttctagtttctatacctgaaggaacccattgattttaccagtttttatttctgtagattggatgtaaaaatcacagattcaataaattaataaactttgtgtaaaaaaaaaa

SEQ ID NO: 2339 - DNA, 1376 bp, Homo sapiens
gcaggaccgtcattgacgccatgagcgcgctgctgcggctgctgcgcacgggtgccccagccgctgcgtgcctgcggttggggaccagtgcagggaccgggtcgcgccgtgctatggccctgtaccacactgaggagcgcggccagccctgctcgcagaattaccgcctcttctttaagaatgtaactggtcactacatttccccctttcatgatattcctctgaaggtgaactctaaagagattctttcttgtggagaagttattcatgtgaagatccttggaattttggctcttattgatgaaggtgaaacagattggaaattaattgctatcaatgcgaatgatcctgaagcctcaaagtttcatgatattgatgatgttaagaagttcaaaccgggttacctggaagctactcttaattggtttagattatataaggtaccagatggaaaaccagaaaaccagtttgcttttaatggagaattcaaaaacaaggcttttgctcttgaagttattaaatccactcatcaatgttggaaagcattgcttatgaagaagtgtaatggaggagctataaattgcacaaacgtgcagatatctgatagccctttccgttgcactcaagaggaagcaagatcattagttgaatcggtatcatcttcaccaaataaagaaagtaatgaagaagagcaagtgtggcacttccttggcaagtgattgaaacatctgaaattctgctgtcaagattcccatctctaaggactccaagtgctagagacaagggggtctatgagcatttactgacttcctgttaaaacttcattttttcaaactttttgagctatgcaatatataaataaacagtaagaattttaaattactctcctttggacatttattgatataaaaagaagattttggccaggcacggtggctcatgcctgtaatttcagcactttgggaggccgaggtgggcagatcacaaggtcaggagttcaagaccagcctggccagtatgttgaaaccccatctctattaaaaatacaaaaattagccaggcgtggtggtgcatgcctgtagacccagctactcaggaggctgaggcagaagaactgcttgagcccaggaggcagaggttgcagtgagcagagattgtgccactgcactccagcctaggcgacagagagagactccgtctcaaaaaaaaaaaaaagattttgtttcatttcatagcacaaatttagaggcattgagttgaccatttctagtttctatacctgaaggaacccattgattttaccagtttttatttctgtagattggatgtaaaaatcacagattcaataaattaataaactttgtgtaaaaaaaaaa

SEQ ID NO: 2340 - DNA, 1184 bp, Homo sapiens
gcaggaccgtcattgacgccatgagcgcgctgctgcggctgctgcgcacgggtgccccagccgctgcgtgcctgcggttggggaccagtgcagggaccgggtcgcgccgtgctatggccctgtaccacactgaggagcgcggccagccctgctcgcagaattaccgcctcttctttaatattgatgatgttaagaagttcaaaccgggttacctggaagctactcttaattggtttagattatataaggtaccagatggaaaaccagaaaaccagtttgcttttaatggagaattcaaaaacaaggcttttgctcttgaagttattaaatccactcatcaatgttggaaagcattgcttatgaagaagtgtaatggaggagctataaattgcacaaacgtgcagatatctgatagccctttccgttgcactcaagaggaagcaagatcattagttgaatcggtatcatcttcaccaaataaagaaagtaatgaagaagagcaagtgtggcacttccttggcaagtgattgaaacatctgaaattctgctgtcaagattcccatctctaaggactccaagtgctagagacaagggggtctatgagcatttactgacttcctgttaaaacttcattttttcaaactttttgagctatgcaatatataaataaacagtaagaattttaaattactctcctttggacatttattgatataaaaagaagattttggccaggcacggtggctcatgcctgtaatttcagcactttgggaggccgaggtgggcagatcacaaggtcaggagttcaagaccagcctggccagtatgttgaaaccccatctctattaaaaatacaaaaattagccaggcgtggtggtgcatgcctgtagacccagctactcaggaggctgaggcagaagaactgcttgagcccaggaggcagaggttgcagtgagcagagattgtgccactgcactccagcctaggcgacagagagagactccgtctcaaaaaaaaaaaaaagattttgtttcatttcatagcacaaatttagaggcattgagttgaccatttctagtttctatacctgaaggaacccattgattttaccagtttttatttctgtagattggatgtaaaaatcacagattcaataaattaataaactttgtgtaaaaaaaaaa

SEQ ID NO: 2341 - DNA, 1682 bp, Homo sapiens
gcaggaccgtcattgacgccatgagcgcgctgctgcggctgctgcgcacgggtgccccagccgctgcgtgcctgcggttggggaccagtgcagggaccgggtcgcgccgtgctatggccctgtaccacactgaggagcgcggccagccctgctcgcagaattaccgcctcttctttaagaatgtaactggtcactacatttccccctttcatgatattcctctgaaggtgaactctaaagaggaaaatggcattcctatgaagaaagcacgaaatgatgaatatgagaatctgtttaatatgattgtagaaatacctcggtggacaaatgctaaaatggagattgccaccaaggagccaatgaatcccattaaacaatatgtaaaggatggaaagctacgctatgtggcgaatatcttcccttacaagggttatatatggaattatggtaccctccctcagacttgggaagatccccatgaaaaagataagagcacgaactgctttggagataatgatcctattgatgtttgcgaaataggctcaaagattctttcttgtggagaagttattcatgtgaagatccttggaattttggctcttattgatgaaggtgaaacagattggaaattaattgctatcaatgcgaatgatcctgaagcctcaaagtttcatgatattgatgatgttaagaagttcaaaccgggttacctggaagctactcttaattggtttagattatataaggtaccagatggaaaaccagaaaaccagtttgcttttaatggagaattcaaaaacaaggcttttgctcttgaagttattaaatccactcatcaatgttggaaagcattgcttatgaagaagtgtaatggaggagctataaattgcacaaacgtgcagatatctgatagccctttccgttgcactcaagaggaagcaagatcattagttgaatcggtatcatcttcaccaaataaagaaagtaatgaagaagagcaagtgtggcacttccttggcaagtgattgaaacatctgaaattctgctgtcaagattcccatctctaaggactccaagtgctagagacaagggggtctatgagcatttactgacttcctgttaaaacttcattttttcaaactttttgagctatgcaatatataaataaacagtaagaattttaaattactctcctttggacatttattgatataaaaagaagattttggccaggcacggtggctcatgcctgtaatttcagcactttgggaggccgaggtgggcagatcacaaggtcaggagttcaagaccagcctggccagtatgttgaaaccccatctctattaaaaatacaaaaattagccaggcgtggtggtgcatgcctgtagacccagctactcaggaggctgaggcagaagaactgcttgagcccaggaggcagaggttgcagtgagcagagattgtgccactgcactccagcctaggcgacagagagagactccgtctcaaaaaaaaaaaaaagattttgtttcatttcatagcacaaatttagaggcattgagttgaccatttctagtttctatacctgaaggaacccattgattttaccagtttttatttctgtagattggatgtaaaaatcacagattcaataaattaataaactttgtgtaaaaaaaaaa

SEQ ID NO: 2342 - DNA, 1404 bp, Homo sapiens
ggcagtgcagctgtgggaacctctccacgcgcacgaactcagccaacgatttctgatagatttttgggagtttgaccagagatgcaaggggtgaaggagcgcttcctaccgttagggaactctggggacagagcgccccggccgcctgatggccgaggcagggtgcgacccaggacccaggacggcgtcgggaaccataccatggcccggatccccaagaccctaaagttcgtcgtcgtcatcgtcgcggtcctgctgccagtcctagcttactctgccaccactgcccggcaggaggaagttccccagcagacagtggccccacagcaacagaggcacagcttcaagggggaggagtgtccagcaggatctcatagatcagaacatactggagcctgtaacccgtgcacagagggtgtggattacaccaacgcttccaacaatgaaccttcttgcttcccatgtacagtttgtaaatcagatcaaaaacataaaagttcctgcaccatgaccagagacacagtgtgtcagtgtaaagaaggcaccttccggaatgaaaactccccagagatgtgccggaagtgtagcaggtgccctagtggggaagtccaagtcagtaattgtacgtcctgggatgatatccagtgtgttgaagaatttggtgccaatgccactgtggaaaccccagctgctgaagagacaatgaacaccagcccggggactcctgccccagctgctgaagagacaatgaacaccagcccagggactcctgccccagctgctgaagagacaatgaccaccagcccggggactcctgccccagctgctgaagagacaatgaccaccagcccggggactcctgccccagctgctgaagagacaatgaccaccagcccggggactcctgcctcttctcattacctctcatgcaccatcgtagggatcatagttctaattgtgcttctgattgtgtttgtttgaaagacttcactgtggaagaaattccttccttacctgaaaggttcaggtaggcgctggctgagggcggggggcgctggacactctctgccctgcctccctctgctgtgttcccacagacagaaacgcctgcccctgccccaagtcctggtgtctccagcctggctctatcttcctccttgtgatcgtcccatccccacatcccgtgcaccccccaggaccctggtctcatcagtccctctcctggagctgggggtccacacatctcccagccaagtccaagagggcagggccagttcctcccatcttcaggcccagccaggcagggggcagtcggctcctcaactgggtgacaagggtgaggatgagaagtggtcacgggatttattcagccttggtcagagcagaaaaaaaaaaaaaaaaaaa

SEQ ID NO: 2343 - DNA, 2137 bp, Homo sapiens
aaaaaaggccgcgctgtactgcggcttgtgccgcttccgcaagaaggtttcctggcctgttgcagccatggtgcattgcagttgcgtgttgttcagaaagtacggaaatttcatcgataagctaagactcttcaccaggggaggatccggtggaatgggttatcctcgtttaggtggagaaggtggaaaaggtggtgatgtctgggttgtagcccagaacagaatgactttaaaacaacttaaagacaggtatcctcggaaacggtttgtggctggagtaggagcaaacagcaaaattagtgcactgaaaggctccaaaggaaaagactgggaaatccctgtgcctgtgggtatttcagtaactgatgaaaatggtaaaattataggagaactcaataaagaaaatgacagaattttggtagctcaaggaggtcttggtggtaaattacttacaaatttcttaccattgaaaggccagaaacgaataattcaccttgatctaaaacttatagctgatgtaggcctagtaggattcccaaatgctggaaaatcctctttgctaagttgtgtttctcatgcaaaacctgcaattgcagattacgcatttacaacattaaagcctgaacttggaaagataatgtacagtgatttcaaacagatatcagtagctgatcttccgggtttaatagaaggagcacatatgaacaaaggaatgggccacaaattcctcaagcatatagaaagaactagacaactactttttgttgttgatatttctggatttcagctttcttctcacactcaatacaggacagcttttgaaaccataatactgcttacaaaagagttggaattgtacaaagaggaacttcagacaaaacctgcactcttggcagttaataaaatggacttgccagatgcccaagataagttccatgaattgatgagccagctccagaatcctaaagattttctgcatttatttgaaaaaaacatgattccagagaggactgtagagttccaacatatcatccccatatctgcagttactggagaaggaatcgaagaattaaagaattgtataagaaagtcactggatgaacaggccaaccaggaaaatgatgcacttcataagaaacagttgcttaatttgtggatttctgatacaatgtcttctactgagccaccatcaaagcatgctgttactacttccaaaatggatataatttaaatatattaaaaatggtattgatggaacagtatttaatgcttaaaaacaaggaaatcctttcatctgtgacaacctggaggacatgttaagtaaaataagccaggcttagaaagacaaatgctgcataatctcactgtggaatcttaagttgaactcatagaaggagagaatagaatggtggttatcaagggctggtggggcagtggaggattgaggagatattggtcaaaatttacaaaatttcagttagacaaggcaactgagttcaagagatctgttgtacagcttggtgactgtaattaacaacaatgtattttgaaagtcactgagtaaattttaagtggtttttccaaaaaagcacataaggtaatgcacgttaattagctatattgagccattccacaatgtatagatatttcaaaacatgttacacatgataaatccagtttttctacgtcattttttaaaattatatttaatttttttattttgaaagttttttcacagatcttttttttagtattattaccttctgatatatgtgtcattattgaagaaccataccttttaaagttattattttgtaattaagtatgtcaacagtaaaaaataaccagtggccaggcatggtggctcatgcctgtaatcccagcacttttcggaggccgaggagggcagatcacttgaggtcaggagttcaagaccagcctggccaacatggcgaaaccccgtctctactaaaaatataaaaaattagccaggcatagtggcgcatgcctgttgtagccccagctactcaagaggctgaggcaggagaattgcttgaacgcgggaggtggaggatacaatgaacccgaggtcgcgccactgcacttcagcctgggtgacagagctagactccatctc

SEQ ID NO: 2344 - DNA, 4488 bp, Homo sapiens
aaaaggaaaacgaggcaccgagaagttaaggaacttgctcaaggtcacagagtttgaactcaggctacagatgctgcagcaactggagaaagtcctcatcgccccatatcacccaccaccgacccccagcaggacgtgacccccgccaggacggaggccggcagctggggggctggagcatgggacccagaacacggactcaggcttgcgcagcctcctggcttctaggcgggagcctagaaaggcgccagcccctttcgcgtgctgctgagactccaggggtggggttcactctcaggggcgcacaaaggcatgaaaaccttggcttcagcctctgagatgcggaactgaccgacctattgtcttgggacccaccagtgcgcttgggtgcaccagcccccttaacgttggtgccggctccctcccggctcctccccatcccagagggtcccctcgccccaggccctgagcctgcgtcctggggtcctgggccgcacgtgcctctggcagctcgaagaagctgtcggggcttgcaggagagcgtgcaaactgaaaccaaaacaggccgactcgaggaacatccgggtgggaccgcagactcaccggagcgcagcgcctgggccagggcctgggaccctgctccgccccgcgctcccctgcaccccttccccacgctgctcccctcttcctaagcggccccccctctcccgggcagcagaagaaggggtgggacccgggcgggctccgggagggggccctggaggaatggatggtggcggaagggcggagcaggggcggggcccgcggagactccacggggcgccccgggcgtgaggcacccactctgggagcacagagagctcaggtagcctgcctagatggcggcgcgcaccctgggccgcggcgtcgggaggctgctgggcagcctgcgagggctctcggggcagcccgcgcggccgccgtgcggggtgagcgcgccgcgcagggcggcctcgggaccctcgggcagcgctcccgcagttgcagcagcagcagcacagccaggctcgtatcccgcgctgagtgcacaggcagcccgggagccggccgccttctgggggcctctggcgcgggacactctcgtgtgggacaccccctaccacaccgtctgggactgcgacttcagcactggcaagatcggctggttcctgggaggccagttaaatgtctctgtcaactgcttggaccagcatgttcggaagtcccccgagagcgttgctttgatctgggagcgcgatgagcctggaacggaagtgaggatcacctacagggaactactggagaccacgtgccgcctggccaacacgctgaagaggcatggagtccaccgtggggaccgtgttgccatctacatgcccgtgtccccattggctgtggcagcaatgctggcctgtgccaggatcggagctgtccacacagtcatctttgctggcttcagtgcagagtccttggctgggaggatcaatgatgccaagtgcaaggtggttatcaccttcaaccaaggactccggggtgggcgcgtggtggagctgaagaaaatagtggatgaggctgtgaagcactgccccaccgtgcagcatgtcctggtggctcacaggacagacaacaaggtccacatgggggatctggacgtcccgctggagcaggaaatggccaaggaggaccctgtttgcgccccagagagcatgggcagtgaggacatgctcttcatgctgtacacctcagggagcaccggaatgcccaagggcatcgtccatacccaggcaggctacctgctctatgccgccctgactcacaagcttgtgtttgaccaccagccaggtgacatctttggctgtgtggccgacatcggttggattacaggacacagctacgtggtgtatgggcctctctgcaatggtgccaccagcgtcctttttgagagcaccccagtttatcccaatgctggtcggtactgggagacagtagagaggttgaagatcaatcagttctatggcgccccaacggctgtccggctgttgctgaaatacggtgatgcctgggtgaagaagtatgatcgctcctccctgcggaccctggggtcagtgggagagcccatcaactgtgaggcctgggagtggcttcacagggtggtgggggacagcaggtgcacgctggtggacacctggtggcagacagaaacaggtggcatctgcatcgcaccacggccctcggaagaaggggcggaaatcctccctgccatggcgatgaggcccttctttggcatcgtccccgtcctcatggatgagaagggcagcgtcgtggagggcagcaacgtctccggggccctgtgcatctcccaggcctggccgggcatggccaggaccatctatggcgaccaccagcgatttgtggacgcctacttcaaggcctacccaggctattacttcactggagacggggcttaccgaactgagggcggctattaccagatcacagggcggatggatgatgtcatcaacatcagtggccaccggctggggaccgcagagattgaggacgccatcgccgaccaccctgcagtaccagaaagtgctgtcattggctacccccacgacatcaaaggagaagctgcctttgccttcattgtggtgaaagatagtgcgggtgactcagatgtggtggtgcaggagctcaagtccatggtggccaccaagatcgccaaatatgctgtgcctgatgagatcctggtggtgaaacgtcttccaaaaaccaggtctgggaaggtcatgcggcggctcctgaggaagatcatcactagtgaggcccaggagctgggagacactaccaccttggaggaccccagcatcatcgcagagatcctgagtgtctaccagaagtgcaaggacaagcaggctgctgctaagtgagctggcaccttgtggggctcttgggatgggcgggcacccaagccctggcttgtccttcccagaaggtacccctgaggttggcgtcttcctacgtcccagaagcagcccccaccccacacatgacccacaccgccctcacgtgaagctgggctgagagccctttctcccatccattggaggtcccaggagtgtcacccatggagaggctatgcgacatggctagggctggttctgccatctgagtttggtttcctggaatgaaaaggcattgccatctccattcctctgccctcttgagccagcacaggaaggtgaggccctgggatagcgcgcctgctcagataacacagagctagttagctagtagcaaccgtgttttctccagatctgtctagatacaaaggtcagaaatcttatttttatacttttatattgtggaagaacagcatgcaacactcacatgtagtgtgtggatttacttgaacatgttctttttaacatgtagttatgaaaatctccttttttgcctctactggtgaggaaacatgaggatcagaggccacatttttaattattgttagtgtatttggaagtctgaattggagatgtttgtacctctgtctaaacagttcccttgagaacttccaagcctccggcatcttttcctggtgagtgtttctcctgtgcttggttgtgtataatggagctaactcctaagcggtggggtgaatgtggccgccttagttctgaagctactccagttatgttctgtttcttcaagctgtgatccagaaagatttttgtgcccccagatgcctcttgataggagaggcaacatactccaaatagttgggttcttcagggaagctattagaaactcaggtgacttgttagagcactaacttggtcagagccaaatcctggcaaacgctgcctgaccttcactctgtggttggggcggtgagaaccactgaggtccaatgatgagacttggaggtctggatccagtctctctttgttttaatgtgacttaggtgctgtcaacattagcaagataatggaaatcacgacgccagtgggtgcttacctccctgctaggcatgcaggggctggcggttggcaggggaaggaggcccagtgagccgggtcccttaggggagggagagtttgtcctctttgccccacagtctacccttcagggccttgtggcagtgccagtgttcggggggtgtctgggccactgagtacccactcggtcgtggttgtgctggcctcttgggtgagtgaacctgtgaagcccaggaggtggtgttggctgcagggtacacaaatactgagtggtggtcttttgttacaggcttagcaacaaagctgtgccctgggcatggggggctgtagtgtagctacagttgtgcgtttgtgaaatggcttagctttccatgttgctgagaggaacctggacatggtcccgggcatctgaatgatctgtaggggagggagttcaaataaagctttattttgttcaaaaaaaaaaaaaaaa

SEQ ID NO: 2345 - DNA, 1895 bp, Homo sapiens
ggcacagggctgtgactagcgggccggcccgggccaggacagcgggcggcgggcggcgcgggcctggccccgggatggctatgttccgcagcctggtggcctcggctcagcagcggcagccgccggccgggccggcgggcggcgacagcggcctggaggcgcagtacacctgccccatctgcctggaggtctatcaccggcccgtggccatcggcagctgcggccacacgttctgcggggagtgtctccagccctgcctgcaggtgccatccccgctgtgcccactgtgccgcctgcccttcgaccccaagaaggtggacaaggccacccacgtggagaagcagctctcatcctacaaagcgccctgtcgaggctgcaacaaaaaggtgaccctggcaaagatgagagtgcacatttcgtcctgcctgaaggtccaggagcagatggccaactgccccaagttcgtccccgtggtgcccacatcacagcctatccccagcaacatccccaacaggtccaccttcgcctgcccgtactgtggtgcccgcaacctggaccagcaggagctggtgaagcactgtgtggaaagccaccgcagcgaccccaaccgcgtggtgtgccccatctgctcggcaatgccctggggggaccccagctacaagagcgccaacttcctgcagcacctgcttcaccgacacaagttctcctacgacacctttgtggactacagtattgacgaggaggccgccttccaggctgctctggccctgtctctctctgagaactgaagggaagcgcagccacccgcctgcgtctggggtcagggatgtccccgctcctgtgtcgcacctggcacctgctcgggagcgcacctcaccggactgagctcacaggaggagcctgcacccgcgcagaaggggagccggggccgagcctccgggcctgaatacgggccagccgccgaggccgccagagcagggccgcctggtcccaccggcgtcgctgggttcttcggtgcttctggccgagcaggcggcctacttgggcagggctggacgctgggacctggagctgccgccgtctcttcaaagccatgataccccctcgtgggaagaagggaccgacgcgcgagtcgcgctccgcagtcgagccgggaggaacccaggctgctgccctgcccagcccgaccctgccccggccccgcttccaccttgcgcatttggtactggcttttgtgatacttaggaaccctggcatcttttctatattatccagtgtgataatcttttcacgttttatagagcaaagacagagcagttactcttcatattgcaatatctgtgtttgactaggaataatagtatttttatggaacatttacaaaattatattttttaagaaaacaatcaaaacaagcattgggggattggggcaaggatggaaggagcagtggggcagctgccagagctcaggcgagccatggggtctgctgtggggtctgccctggccacccactgtgtgtctgggtccttgaggtttgtacgtttctctttgatgaccaggaagaaatcccagcaccccagccacaggctgtggctgctcccagcagaggtggggccggcagagaaggggcctcctccacccagagtcctggccttggcccgctgtcaccttcaaagctgactgtgccccgctgcgggaggggacggcaccccagtggtggcagagcttgggggcctgggcaggggcccgcttggcgggccgggcaacacgtcaacattcttttctgttcttggcattaattattgctgtctttttttaaaaaaaaaaagtttaaataaaatgtctcagagcaaaaaaaaaaaaaaaaaaaaaaaaaaaaaaaaaaaaaaaaa

SEQ ID NO: 2346 - DNA, 2538 bp, Homo sapiens
gctggagcatcccgctctggtgccgctgcagccggcagagatggttgagctcatgttcccgctgttgctcctccttctgcccttccttctgtatatggctgcgccccaaatcaggaaaatgctgtccagtggggtgtgtacatcaactgttcagcttcctgggaaagtagttgtggtcacaggagctaatacaggtatcgggaaggagacagccaaagagctggctcagagaggagctcgagtatatttagcttgccgggatgtggaaaagggggaattggtggccaaagagatccagaccacgacagggaaccagcaggtgttggtgcggaaactggacctgtctgatactaagtctattcgagcttttgctaagggcttcttagctgaggaaaagcacctccacgttttgatcaacaatgcaggagtgatgatgtgtccgtactcgaagacagcagatggctttgagatgcacataggagtcaaccacttgggtcacttcctcctaacccatctgctgctagagaaactaaaggaatcagccccatcaaggatagtaaatgtgtcttccctcgcacatcacctgggaaggatccacttccataacctgcagggcgagaaattctacaatgcaggcctggcctactgtcacagcaagctagccaacatcctcttcacccaggaactggcccggagactaaaaggctctggcgttacgacgtattctgtacaccctggcacagtccaatctgaactggttcggcactcatctttcatgagatggatgtggtggcttttctcctttttcatcaagactcctcagcagggagcccagaccagcctgcactgtgccttaacagaaggtcttgagattctaagtgggaatcatttcagtgactgtcatgtggcatgggtgtctgtccaagctcgtaatgagactatagcaaggcggctgtgggacgtcagttgtgacctgctgggcctcccaatagactaacaggcagtgccagttggacccaagagaagactgcagcagactacacagtacttcttgtcaaaatgattctccttcaaggttttcaaaacctttagcacaaagagagcaaaaccttccagccttgcctgcttggtgtccagttaaaactcagtgtactgccagattcgtctaaatgtctgtcatgtccagatttactttgcttctgttactgccagagttactagagatatcataataggataagaagaccctcatatgacctgcacagctcattttccttctgaaagaaactactacctaggagaatctaagctatagcagggatgatttatgcaaatttgaactagcttctttgttcacaattcagttcctcccaaccaaccagtcttcacttcaagagggccacactgcaacctcagcttaacatgaataacaaagactggctcaggagcagggcttgcccaggcatggtggatcaccggaggtcagtagttcaagaccagcctggccaacatggtgaaaccccacctctactaaaaattgtgtatatctttgtgtgtcttcctgtttatgtgtgccaagggagtattttcacaaagttcaaaacagccacaataatcagagatggagcaaaccagtgccatccagtctttatgcaaatgaaatgctgcaaagggaagcagattctgtatatgttggtaactacccaccaagagcacatgggtagcagggaagaagtaaaaaaagagaaggagaatactggaagataatgcacaaaatgaagggactagttaaggattaactagccctttaaggattaactagttaaggattaatagcaaaagatattaaatatgctaacatagctatggaggaattgagggcaagcacccaggactgatgaggtcttaacaaaaaccagtgtggcaaaaaaaaaaaaaaaaaaaaaaaaaaaaaatcctaaaaacaaacaaacaaaaaaaacaattcttcattcagaaaaattatcttagggactgatattggtaattatggtcaatttaataatattttggggcatttccttacattgtcttgacaagattaaaatgtctgtgccaaaattttgtattttatttggagacttcttatcaaaagtaatgctgccaaaggaagtctaaggaattagtagtgttcccatcacttgtttggagtgtgctattctaaaagattttgatttcctggaatgacaattatattttaactttggtgggggaaagagttataggaccacagtcttcacttctgatacttgtaaattaatcttttattgcacttgttttgaccattaagctatatgtttagaaatggtcattttacggaaaaattagaaaaattctgataatagtgcagaataaatgaattaatgttttacttaatttatattgaactgtcaatgacaaataaaaattctttttgattattttttgttttcatttaccagaataaaaactaagaattaaaagtttgattacagtcaaaaaaaaaaaaaaaaaaaaaaa

SEQ ID NO: 2347 - DNA, 2050 bp, Homo sapiens
gtgttgacagcggcggcggtggaaccgggcgggcggcgggagtcggcgcctcgggttcctacctcgcgtccctaggcggcggcggccgggcgtcccgggatggccttcatggagaagccgccagccggcaaggtgctgctggacgacacggtgccgctgacagcagccatcgaggcgagccagagcctgcagtcccacacggaatatattattcgagtgcaaagaggaatttctgtggaaaacagctggcagattgttagaagatacagtgactttgatttgcttaacaacagcttacagattgcaggcctaagtctacctcttcctcccaaaaaattgattggtaacatggatcgtgaattcatagctgaaaggcagaaaggtcttcagaactatctcaacgtgatcacaacaaatcatatcttgtctaattgtgagctggttaagaagtttttagatccaaacaactattccgcaaactatactgagattgccttgcaacaggtttccatgttcttccgatcagaaccaaagtgggaggtggtggaacctttgaaagacataggttggagaataaggaagaaatatttcttgatgaagattaaaaatcagccaaaggaacggctagtgttaagctgggctgaccttggcccagacaagtatttgtcagataaagattttcagtgtctaatcaaacttctgccttcttgtttgcacccttacatctatcgggttacctttgccacagctaatgaatcctcagcgttgctaattaggatgtttaacgaaaagggaacattgaaggatctgatctacaaggcaaaaccaaaagacccatttctaaagaagtactgcaaccctaagaagattcagggcctggaactccagcaaataaaaacatatggacggcaaatattagaggtactgaagtttcttcatgacaagggattcccttatgggcatcttcacgcctccaatgtgatgctcgatggggacacttgccggctgctggaccttgagaattccttattgggcctgccttccttctaccgatcttatttttcacaattcaggaaaatcaatacattggaaagtgtggatgtccactgctttggccacttactgtatgaaatgacttatggacgaccgccagactcggtgcctgtggactccttccctcctgccccgtccatggctgtggtggccgtgttggagtctacgctgtcttgtgaagcctgtaaaaatggcatgcctaccatctcccggctcttacagatgccattattcagcgatgttttactaaccacttctgaaaaaccacagtttaagatccctacaaagttaaaagaggcattgagaattgccaaagaatgtatagagaagagactaattgaggaacagaaacagattcaccagcatcgaagactgacaagagctcagtcccaccatggatctgaggaggaaagaaaaaaaagaaagattttagctcgaaagaagtcaaaacgatctgctcttgaaaatagtgaagagcattcagcgaagtacagcaactccaataattcagcaggatctggggccagctcacctctcacgtccccgtcatcgccaactccaccctctacatcagggatatctgcattacctccacctcctccacctccaccaccaccagcagctcccttgcctcctgcgagcaccgaggcacctgcccagctctcgtctcaggctgtgaatggcatgagccgaggggccttgctcagctccatccagaatttccaaaaaggaactttgaggaaagccaaaacctgtgatcacagtgctccgaagatcggctgaagcttcctgtttacacttggagggaaaagttcttttttattcctactcacccctaccccccaaactaccctcttcctgggaaagtaattgctgagccagtacagccacaaacagtactattttgcagatgctcatgtaagcagcttttcgagagaaataattctttaagcagaataaagttaggctggcatgcaaaaaaaaaaaaaaaaaaaaa

SEQ ID NO: 2348 - DNA, 1361 bp, Homo sapiens
acttgagggagtagggggccgggtttgggccctcagttgctaagggctacccgagtgggaagcggttcaagagatggggtgaagggtggttcaccggttcttcaagtcctcagccttctggcccgcggaagttaagcaaccaagaggcgggcctaagaccggaagcaggaaggagggcgcaggaagcagggcgccgcagcctgtcgtacggtccttctgtgggtctgtcggtgccgagggcaggatggagaagctgcggctcctgggcctccgctaccaggagtacgtgactcgtcacccggccgccacggcccagctggagacagcagtgcggggcttcagttacctgctggcaggtcgattcgccgattcgcacgagctgtcagagctggtgtactctgcctctaacctgcttgtgctgctcaatgacgggatcctacggaaggagcttcggaaaaagttgcctgtgtcgctgtcccagcagaagctgctgacatggctgagcgtgctggagtgcgtggaggtgttcatggagatgggagctgccaaggtgtggggtgaagtgggccgctggcttgtcatcgccctcatccagctggccaaggctgtactgcggatgctcctgctgctctggttcaaggctggcctccagacttcaccccctatcgttccactggacagagagacccaggcacagcccccggatggtgaccacagccctggcaaccatgagcagtcctacgtggggaagcggtcaaaccgggtggtgcgaaccctccagaacacgccgtccctgcactccaggcactggggagctccccagcagcgggagggacggcagcagcagcatcacgaggagctgagtgcgacccccacccccctggggctgcaggagaccatcgcagagtttttgtacattgcccggccgctgctgcacttgctcagcctgggcctgtggggtcagaggtcgtggaaaccctggctcttggctggtgttgtggacgtgaccagcctgagcctcctgagtgacagaaagggcctgacccggagggagcggcgggagctgcggcgccggaccatcctgctgctctactacctgctgcgctctcctttctacgaccgcttctccgaggccaggatcctcttcctgctccagttgctggccgaccacgtccctggcgttggcctggtcacaaggccgctcatggattacttgcccacctggcagaaaatctacttctacagttggggctgacagacctcccggaaggagggtgtggggaggggtggggcagggagcccctcttccctaataaaactgactccggcagcgtcaaaaaaaaaaaaaaaaaaaaaaaaaa

SEQ ID NO: 2349 - DNA, 1726 bp, Homo sapiens
acttgagggagtagggggccgggtttgggccctcagttgctaagggctacccgagtgggaagcggttcaagagatggggtgaagggtggttcaccggttcttcaagtcctcagccttctggcccgcggaagttaagcaaccaagaggcgggcctaagaccggaagcaggaaggagggcgcaggaagcagggcgccgcagcctgtcgtacggtccttctgtgggtctgtcggtgccgagggcaggatggagaagctgcggctcctgggcctccgctaccaggagtacgtgactcgtcacccggccgccacggcccagctggagacagcagtgcggggcttcagttacctgctggcaggtcgattcgccgattcgcacgagctgtcagagctggtgtactctgcctctaacctgcttgtgctgctcaatgacgggatcctacggaaggagcttcggaaaaagttgcctgtgtcgctgtcccagcagaagctgctgacatggctgagcgtgctggagtgcgtggaggtgttcatggagatgggagctgccaaggtgtggggtgaagtgggccgctggcttgtcatcgccctcatccagctggccaaggctgtactgcggatgctcctgctgctctggttcaaggctggcctccagacttcaccccctatcgttccactggacagagagacccaggcacagcccccggatggtgaccacagccctggcaaccatgagcagtcctacgtggggaagcggtcaaaccgggtggtgcgaaccctccagaacacgccgtccctgcactccaggcactggggagctccccagcagcgggagggacggcagcagcagcatcacgaggagctgagtgcgacccccacccccctggggctgcaggagaccatcgcagagtttttgtacattgcccggccgctgctgcacttgctcagcctgggcctgtggggtcagaggtcgtggaaaccctggctcttggctggtgttgtggacgtgaccagcctgagcctcctgagtgacagaaagggcctgacccggagggagcggcgggagctgcggcgccggaccatcctgctgctctactacctgctgcgctctcctttctacgaccgcttctccgaggccaggatcctcttcctgctccagttgctggccgaccacgtccctggcgttggcctggtcacaacgtcccagcgtgcggcctctccgtgcctaccggccaggccccacacacagccctggtcgccaccagcgttcctcccaggacacccttgactgcgctctcctgtgacgatgccactgcagcccgcaccttgtcactgctgggccaagaagccttcactaggagtgggatccaggctcctctcccacagaaagcggtgacttcacctcatggagcccgggaagctgcttgcctcggcagccataggagcgaacactgctgctctctcgctggcccctggtgaggacaggaagcctgaacccgggtgatggctgaacgctgcccagcgtgtcttctggctggggccctccgtctgccccttctccgcagggccctgtggctctggcagccccaggccatggcgttgccagcctccctgtgacagagcctggtgaacagtgagcctggctcccacgcaagtggcactttaagccctgcatcctcggttgagagtaaaaggcttttctcccttaaaaaaaaaaaaaaaaaaaaaa

SEQ ID NO: 2350 - DNA, 4357 bp, Homo sapiens
atagtcaccagaagctggaagagtcaaaggacacattctcccctcaagccccagtgggagcacggcccagctggattttggacttctggcctccagaactagacagggcctcactgtgtcacccagggtggaatacagtggtgtgatcatagctcactgcagcctggaattcctgggctcaagcaaccctgccacctcagccttccaagtagctaggactacagaacatccatgatagcagtcttctgtaaatcgaacttttcaagaattctctgaaggaaccaagtaggatattcttacatcatgacttaatgtgaatgcaagaacaagaaataggttttatctctaaatataatgaagggctgtgtgtaaacactgaccctgtctcaattctaacaagcattttagacatgagtttacatcggcaaatgggttcagatcgagatcttcagtcctctgcttcatctgtgagcttgccttcagtcaaaaaggcacccaaaaaaagaagaatttcaataggctccctgtttcggaggaaaaaagataacaaacgtaaatcaagggagctaaatggcggggtggatggaattgcaagtattgaaagtatacattctgaaatgtgtactgataagaactccattttctctacaaatacctcttctgacaatggattaacttccatcagcaaacaaattggagacttcatagagtgccctttgtgccttttgcggcattctaaagacagatttcctgatataatgacttgtcatcacagatcttgtgtggattgcttacgacaatatttaaggatagaaatctctgaaagcagagttaatattagttgcccagaatgtactgaacggtttaatccccatgatattcgcttgatattaagtgatgatgtcttgatggaaaaatacgaagaatttatgcttagacggtggcttgttgcagatcctgattgtaggtggtgtccagctccagactgtggatatgctgtgatagcatttggatgtgccagctgtccaaaattaacttgtgggcgagagggctgtggaacagagttttgctaccactgtaaacagatttggcaccccaaccagacctgtgatgctgctcgacaagagagagcccagagcttacgtttgagaactatacgttcttcatccattagttatagtcaagagtctggagcagcagctgatgatataaagccatgtccacgatgtgctgcttatataataaagatgaatgatgggagctgcaatcacatgacatgtgctgtttgtggttgtgagttttgttggttgtgtatgaaagaaatctcagatttgcattatctaagtccatcaggatgtactttttgggggaagaaaccctggagccgaaagaagaaaatattgtggcaactgggaacactggttggtgctcctgtcggaatcgctttaatagctggcattgctattcctgcaatgattattggcattcctgtgtatgtgggccgcaagattcacaatcgctatgaaggcaaggatgtttcaaagcacaaacggaatttggccatagcaggtggtgtaacgttgtctgtaatcgtgtctccagtagtagctgcagtgactgtaggtatcggtgttcctattatgttagcttatgtctatggcgtagttccaatttctctttgtcgaagcggaggttgtggagtctcagcaggcaatggaaaaggagttaggattgaatttgatgatgaaaatgatataaatgttggtggaactaacacagctgtagacacaacatcagtagcagaagcaagacacaacccaagcataggggagggaagtgttggtgggctgactggcagtttgagtgcaagtggaagccacatggatcgaataggagccatccgagacaacctgagtgaaacggccagcaccatggcactagctggagccagtataacggggagtctgtcaggaagtgccatggtaaactgttttaacaggttggaagtacaagcagatgtacagaaagaacggtacagtctaagtggagaatctggcacagtcagcttgggaacagttagtgataatgccagcaccaaagcaatggcaggatccattctgaattcctacatcccattggacaaagaaggcaacagtatggaggtgcaagtagatattgagtcaaagccatccaaattcaggcacaacagtggaagcagtagtgtggatgatggcagtgccacccgaagtcatgctggcggttcatccagtggcttgcctgaaggtaaatctagtgccaccaagtggtccaaagaagcaacagcagggaaaaaatcaaaaagtggtaaactgaggaaaaagggtaacatgaagataaatgagacgagagaggacatggatgcacagttgttagaacaacaaagcacgaactcaagtgaatttgaggctccatccctcagtgacagtatgccttctgtagcagattctcactctagtcatttttctgaatttagttgttctgacctagaaagcatgaaaacttcttgtagtcatggttccagtgattatcacacccgctttgctactgttaacattcttcctgaggtagaaaatgaccgtctggaaaattccccacatcagtgtagcatttctgtggttacccaaactgcttcctgttcagaagtttcacagttgaatcatattgctgaagaacatggtaacaatggaataaaacctaatgttgatttatattttggcgatgcactaaaagaaacaaataacaaccactcacatcagacaatggaattaaaagttgcaattcagactgaaatttaggcccataaatgctgcagaataattaccactgtacaaccgtgtttggagctggttgaactacatgtgactacttaagtttcaggttaccagcaaaagccgggtttcattatcataatgcagatacattttctgtgttcagcaaggcattgtgtgtcatgtggatcttagttaccaaactatgaagtgaaggctttaaaagtgcattattttaaggataataaatttgaagagcaaagcatgttttgtgtgtttgccacaaaacattgcttgaagcacatacttagatagaaattggtcttaatttatataatcaatataaaatactaatgcaattctacagcattcaaatgaagaaaacttgaggctttagggataagtggttagtgatattttattgaaaccactaaagagataagtttaaaagaactgcataggttactctcagtatatgatactctgtaacatttctatttatatcggcataaatttcattttttttcttcatatgcaatgtggttatataaagcttaatgcagctcatttgctaccatttggatacttagacactttgagcaagattgtggcagtttttgcacaactttgaaatagaaatacctggtactctatcttgtttattgttgatgccatcttagaggaaaaaatgtaaaggtaagtaattaagcatatgacagcaacaaataagatacataaaactacaaaataaagtcccattaggttataagtattacaaaaaatccacctttctctaaggggaagtttgtaccccattgattcttggtgcctttgggatcgactgggttttaatggcctagttatttgaggattttgctgtgttgttttccatgtcttctctggtcaccttggattatatataaaaatacaggaaatagataaacatgaatgtgattaataatgctgaaaaagtattagcctaccaaagacacactcaggctttagtgaataactttacataacctcagtttttaacacatgcatatcttctccaaccatgaaatcaaagcacggtgcagaacttgtaccaagtacaaaaggtccatgtatgattagcattattttcttttgcttttgtttatggacaatgttcagctgacataagcagaagttggccaaaatactgcctgtactgttaatttcctgtataattcacttaaataaaagcaggttaacctcaatgatagcagttaaaatgttctatcttatgtatttcttttaagtattaccattatggtgctactgagcgttttcttttggtaaaaagaaaaatgccatgggctgcagtcttcttccatcacttttccctaccaggtccattaatatgcttataacactagtgccagttattttatttgataatgcttatggtatttgtatatttgtttgcattccaattttgtttaataatgagtgtgtaaactgcatacgttaaataaatgtaaatactaatgtactgctgcaaaaaaaaaaaaaaaaaaaaaaaaaaa

SEQ ID NO: 2351 - DNA, 4366 bp, Homo sapiens
ggtagttgcggcgctggttcccgggagcagccgtcgagccacaactgcggaggaggagttcgggaaagcggccgtcgggactcctcccctccgtcgtctccgccccggttgagaggcgcctcggcgcatcggagggaccctcccccgcgcttcctcaggctgctgtcgccgctgctgggagatgggcctactcgcccgccaccctgcgctgccgccgctctgaggagttaaagaacatccatgatagcagtcttctgtaaatcgaacttttcaagaattctctgaaggaaccaagtaggatattcttacatcatgacttaatgtgaatgcaagaacaagaaataggttttatctctaaatataatgaagggctgtgtgtaaacactgaccctgtctcaattctaacaagcattttagacatgagtttacatcggcaaatgggttcagatcgagatcttcagtcctctgcttcatctgtgagcttgccttcagtcaaaaaggcacccaaaaaaagaagaatttcaataggctccctgtttcggaggaaaaaagataacaaacgtaaatcaagggagctaaatggcggggtggatggaattgcaagtattgaaagtatacattctgaaatgtgtactgataagaactccattttctctacaaatacctcttctgacaatggattaacttccatcagcaaacaaattggagacttcatagagtgccctttgtgccttttgcggcattctaaagacagatttcctgatataatgacttgtcatcacagatcttgtgtggattgcttacgacaatatttaaggatagaaatctctgaaagcagagttaatattagttgcccagaatgtactgaacggtttaatccccatgatattcgcttgatattaagtgatgatgtcttgatggaaaaatacgaagaatttatgcttagacggtggcttgttgcagatcctgattgtaggtggtgtccagctccagactgtggatatgctgtgatagcatttggatgtgccagctgtccaaaattaacttgtgggcgagagggctgtggaacagagttttgctaccactgtaaacagatttggcaccccaaccagacctgtgatgctgctcgacaagagagagcccagagcttacgtttgagaactatacgttcttcatccattagttatagtcaagagtctggagcagcagctgatgatataaagccatgtccacgatgtgctgcttatataataaagatgaatgatgggagctgcaatcacatgacatgtgctgtttgtggttgtgagttttgttggttgtgtatgaaagaaatctcagatttgcattatctaagtccatcaggatgtactttttgggggaagaaaccctggagccgaaagaagaaaatattgtggcaactgggaacactggttggtgctcctgtcggaatcgctttaatagctggcattgctattcctgcaatgattattggcattcctgtgtatgtgggccgcaagattcacaatcgctatgaaggcaaggatgtttcaaagcacaaacggaatttggccatagcaggtggtgtaacgttgtctgtaatcgtgtctccagtagtagctgcagtgactgtaggtatcggtgttcctattatgttagcttatgtctatggcgtagttccaatttctctttgtcgaagcggaggttgtggagtctcagcaggcaatggaaaaggagttaggattgaatttgatgatgaaaatgatataaatgttggtggaactaacacagctgtagacacaacatcagtagcagaagcaagacacaacccaagcataggggagggaagtgttggtgggctgactggcagtttgagtgcaagtggaagccacatggatcgaataggagccatccgagacaacctgagtgaaacggccagcaccatggcactagctggagccagtataacggggagtctgtcaggaagtgccatggtaaactgttttaacaggttggaagtacaagcagatgtacagaaagaacggtacagtctaagtggagaatctggcacagtcagcttgggaacagttagtgataatgccagcaccaaagcaatggcaggatccattctgaattcctacatcccattggacaaagaaggcaacagtatggaggtgcaagtagatattgagtcaaagccatccaaattcaggcacaacagtggaagcagtagtgtggatgatggcagtgccacccgaagtcatgctggcggttcatccagtggcttgcctgaaggtaaatctagtgccaccaagtggtccaaagaagcaacagcagggaaaaaatcaaaaagtggtaaactgaggaaaaagggtaacatgaagataaatgagacgagagaggacatggatgcacagttgttagaacaacaaagcacgaactcaagtgaatttgaggctccatccctcagtgacagtatgccttctgtagcagattctcactctagtcatttttctgaatttagttgttctgacctagaaagcatgaaaacttcttgtagtcatggttccagtgattatcacacccgctttgctactgttaacattcttcctgaggtagaaaatgaccgtctggaaaattccccacatcagtgtagcatttctgtggttacccaaactgcttcctgttcagaagtttcacagttgaatcatattgctgaagaacatggtaacaatggaataaaacctaatgttgatttatattttggcgatgcactaaaagaaacaaataacaaccactcacatcagacaatggaattaaaagttgcaattcagactgaaatttaggcccataaatgctgcagaataattaccactgtacaaccgtgtttggagctggttgaactacatgtgactacttaagtttcaggttaccagcaaaagccgggtttcattatcataatgcagatacattttctgtgttcagcaaggcattgtgtgtcatgtggatcttagttaccaaactatgaagtgaaggctttaaaagtgcattattttaaggataataaatttgaagagcaaagcatgttttgtgtgtttgccacaaaacattgcttgaagcacatacttagatagaaattggtcttaatttatataatcaatataaaatactaatgcaattctacagcattcaaatgaagaaaacttgaggctttagggataagtggttagtgatattttattgaaaccactaaagagataagtttaaaagaactgcataggttactctcagtatatgatactctgtaacatttctatttatatcggcataaatttcattttttttcttcatatgcaatgtggttatataaagcttaatgcagctcatttgctaccatttggatacttagacactttgagcaagattgtggcagtttttgcacaactttgaaatagaaatacctggtactctatcttgtttattgttgatgccatcttagaggaaaaaatgtaaaggtaagtaattaagcatatgacagcaacaaataagatacataaaactacaaaataaagtcccattaggttataagtattacaaaaaatccacctttctctaaggggaagtttgtaccccattgattcttggtgcctttgggatcgactgggttttaatggcctagttatttgaggattttgctgtgttgttttccatgtcttctctggtcaccttggattatatataaaaatacaggaaatagataaacatgaatgtgattaataatgctgaaaaagtattagcctaccaaagacacactcaggctttagtgaataactttacataacctcagtttttaacacatgcatatcttctccaaccatgaaatcaaagcacggtgcagaacttgtaccaagtacaaaaggtccatgtatgattagcattattttcttttgcttttgtttatggacaatgttcagctgacataagcagaagttggccaaaatactgcctgtactgttaatttcctgtataattcacttaaataaaagcaggttaacctcaatgatagcagttaaaatgttctatcttatgtatttcttttaagtattaccattatggtgctactgagcgttttcttttggtaaaaagaaaaatgccatgggctgcagtcttcttccatcacttttccctaccaggtccattaatatgcttataacactagtgccagttattttatttgataatgcttatggtatttgtatatttgtttgcattccaattttgtttaataatgagtgtgtaaactgcatacgttaaataaatgtaaatactaatgtactgctgcaaaaaaaaaaaaaaaaaaaaaaaaaaa

SEQ ID NO: 2352 - DNA, 2477 bp, Homo sapiens
ggcggagggaaccatgcgaggttctgagaattgcggcgagggtcgcctcgagagacggtttctgaggaattctgaaatccccaccacttcctccctccgggggatttgatcccctatggccaccgctaacagcatcatcgtgctggatgatgatgacgaagatgaagcagctgctcagccagggccctcccacccactccccaatgcggcctcacctggggcagaagcccctagctcctctgagcctcatggggccagaggaagcagtagttcgggcggcaagaaatgctacaagctggagaatgagaagctgttcgaagagttccttgaactttgtaagatgcagacagcagaccaccctgaggtggtcccattcctctataaccggcagcaacgtgcccactctctgtttttggcctcggcggagttctgcaacatcctctctagggtcctgtctcgggcccggagccggccagccaagctctatgtctacatcaatgagctctgcactgttctcaaggcccactcagccaaaaagaagctgaacttggcccctgccgccaccacctccaatgagccctctgggaataaccctcccacacacctctccttggaccccacaaatgctgaaaacactgcctctcagtctccaaggacccgtggttcccggcggcagatccagcgtttggagcagctgctggcgctctatgtggcagagatccggcggctgcaggaaaaggagttggatctctcagaattggatgacccagactccgcatacctgcaggaggcacggttgaagcgtaagctgatccgcctctttgggcgactatgtgagctgaaagactgctcttcactgaccggccgtgtcatagagcagcgcatcccctaccgtggcacccgctacccagaggttaacaggcgcattgagcggctcatcaacaagccagggcctgataccttccctgactatggggatgtgcttcgggctgtagagaaggcagctgcccgacacagccttggcctcccccgacagcagctccagctcatggctcaggatgccttccgagatgtgggcatcaggttacaggagcgacgtcacctcgatctcatctacaactttggctgccacctcacagatgactataggccaggcgttgaccctgcactatcagatcctgtgttggcccggcgccttcgggaaaaccggagtttggccatgagtcggctggatgaggtcatctccaaatatgcaatgttgcaagacaaaagtgaggagggcgagagaaaaaagagaagagctcggctccaaggcacctcttcccactctgcagacacccccgaagcctccttggattctggtgagggccctagtggaatggcatcccaggggtgcccttctgcctccagagctgagacagatgacgaagacgatgaggagagtgatgaggaagaggaggaggaggaggaagaagaagaggaggaggccacagattctgaagaggaggaggatctggaacagatgcaggagggtcaggaggatgatgaagaggaggacgaagaggaagaagcagcagcaggtaaagatggagacaagagccccatgtcctcactacagatctccaatgaaaagaacctggaacctggcaaacagatcagcagatcttcaggggagcagcaaaacaaaggacgcatagtgtcaccatcgttactgtcagaagaacccctggccccctccagcatagatgctgaaagcaatggagaacagcctgaggagctgaccctggaggaagaaagccctgtgtctcagctctttgagctagagattgaagctttgcccctggataccccttcctctgtggagacggacatttcctcttccaggaagcaatcagaggagcccttcaccactgtcttagagaatggagcaggcatggtctcttctacttccttcaatggaggcgtctctcctcacaactggggagattctggtcccccctgcaaaaaatctcggaaggagaagaagcaaacaggatcagggccattaggaaacagctatgtggaaaggcaaaggtcagtgcatgagaagaatgggaaaaagatatgtaccctgcccagcccaccttcccccttggcttccttggccccagttgctgattcctccacgagggtggactctcccagccatggcctggtgaccagctccctctgcatcccttctccagcccggctgtcccaaaccccccattcacagcctcctcggcctggtacttgcaagacaagtgtggccacacaatgcgatccagaagagatcatcgtgctctcagactctgattagctgcctccccttctccctgcctccagaatgttctgggataacatttggaggaaggtgggaagcagatgactgaggaagggatggactaagctaatccccttttggtggtgtttctttaaaaaaaaaaaaaaaaaaaaaa

SEQ ID NO: 2353 - DNA, 3755 bp, Homo sapiens
gaattcggcacgagttctaactcagtggcgtttgccctgattcccggggcctggctttcagcgtagcaatgctgccggcgaagaaggtgagcgcagtgctgtgtggcagcagagctccttaggacgaggagcagcgggacgaggaagggcagactggtgaaatcgcaaactgggcgtctgttccggcgccggacccctatttgcaaaggtccatggctaatgaaacacagaaggttggtgccatccattttccttttcccttcacaccctattccatccaggaagacttcatggcagagctgtaccgggttttggaggctggcaagagtgggatatttgagagtccaactggcactgggaagtccttaagtcttatttgtggggccctctcttggctccgtgactttgaacagaagaagcgtgaagaagaggcacgactccttgaaactggaactggccccttacatgatgagaaagatgaatccctgtgtctgtcttcttcctgcgaaggggctgcaggcaccccgaggcctgctggagaaccggcctgggttactcagtttgtgcagaagaaagaagagagggacctggtggaccgactaaaggcggagcaggccaggaggaagcagcgagaagaacgcctgcagcagctgcagcacagggtgcagctcaagtatgcagccaagcgcctgaggcaggaagaagaagaaagagagaatctcctccgcctcagcagggagatgctagagacaggcccggaggctgagcggctggagcagctggagtctggggaggaggagctggtcctcgccgaatacgagagtgatgaggagaaaaaggtggcgagcagagtggatgaggatgaggatgacctggaggaagaacacataactaagatttattactgtagtcggacacactcccagctggcccagtttgtgcatgaggtgaagaagagcccctttggcaaggatgttcggctggtctcccttggctcccggcagaacctttgtgtaaatgaagacgtgaaaagcctaggttctgtgcagcttatcaacgaccgctgtgtggacatgcagagaagcaggcacgagaagaagaaaggagctgaggaggagaagccaaagaggaggaggcaggagaagcaggcagcctgccccttctacaaccacgagcagatgggccttctccgggatgaggccctggcagaggtgaaggacatggagcagctgctggcccttgggaaggaggcccgggcctgtccctattacgggagccgccttgccatccctgcagcccagctggtggtgctgccctatcagatgctgctgcatgcggccactcggcaggccgcgggcatccggctgcaggaccaggtggtgatcatcgacgaggcgcacaacctgatcgacaccatcacgggcatgcacagcgtggaggtcagcggctcccagctctgccaggcccattcccagctgctgcagtacgtggagcgatacgggaagcgtttgaaggccaagaacctgatgtacctgaagcagatcctgtatttgctggagaaattcgtggctgtgctaggggggaacattaagcaaaatcccaatacacagagtctgtcacagacagggacggagctgaagaccatcaacgactttctcttccagagccagatcgacaacatcaacctgttcaaggtgcagcgatactgtgagaagagcatgatcagcagaaagctctttggattcactgaacggtacggagcagtgttctcatcccgggagcagcccaaactggctgggtttcagcaattcctgcagagcctgcagcccaggacgactgaagctcttgcagcccctgcagacgagagtcaggccagcaccctgcgaccagcttctccactgatgcacatccaaggcttcctggcagctctcactacggccaaccaggacggcagggtcatcctgagccgccaaggcagcctcagtcagagcaccctgaagtttttgctcctgaatccagctgtgcactttgcccaagtggtgaaggaatgccgggcagtggtcattgcggggggtaccatgcagccggtgtctgacttccggcagcagctgctggcctgtgccggggtggaagctgagcgcggtggtggagttttctgtggtcacgtgatccctccagacaacatcctgcccctcgtcatctgcagcgggatctccaaccagccgctggaattcacgttccagaaaagagagctgcctcagatgatattccaggaacctaagagcgcacaccaggtggagcaggtgctgctggcatattccaggtgcatccaggcctgtggccaggagagaggccaggtgacaggggccctgctcctctctgtggttggaggaaagatgagtgaagggatcaacttctctgacaacctaggccggtgtgtggtgatggtgggcatgcccttccccaacatcaggtctgcagagctgcaggagaagatggcctacttggatcaaaccctccccagagcccccggccaggcacccccagggaaggctctggtggagaacctgtgcatgaaggccgtcaaccagtccataggcagggccatcaggcaccagaaggattttgccagcgtagtgctcctggaccagcgatatgcccggccccctgtcctggccaagctgccggcctggatccgagcccgtgtggaggtcaaagctacctttggccccgccattgctgctgtgcagaagtttcaccgggagaagtcggcctcttcctgatgggcaaccacaccactgcctggcgccgtgcccttcctttgtcctgcccgctggagacagtgtttgtcgtgggcgtggtctgcggggatcctgttacaaaggtgaaacccaggaggagagtgtggagtccagagtgctgccaggacccaggcacaggcgttagctcccgtaggagaaaatgggggaatcctgaatgaacagtgggtcctggctgtccttggggcgttccagggcagctcccctcctggaatagaatctttctttccatcctgcatggctgagagccaggcttccttcctggtctccgcaggaggctgtggcagctgtggcatccactgtggcatctccgtcctgcccaccttcttaagaggcgagatggagcaggcccatctgcctctgccctttctagccaaggttatagctgccctggactgctcactctctggtctcaatttaaaatgatccatggccacaggctcctgcccaggggcttgtcaccttcccctcctccttcctgagtcactccttcagtagaaggccctgctccctatcctgtcccacagccctgcctggatttgtatccttggcttcgtgccagttcctccaagtctatggcacctccctccctctcaaccacttgagcaaactccaagacaccttctaccccaacaccagcaattatgccaagggccgttaggctctcaacatgactatagagaccccgtgtcatcacggagacctttgttcctgtgggaaaatatccctcccacctgcaacagctgcccctgctgactgcgcctgtcttctccctctgaccccagagaaaggggctgtggtcagctgggatcttctgccaccatcagggacaaacgggggcaggaggaaagtcactgatgcccagatgtttgcatcctgcacagctataggtccttaaataaaagtgtgctgttggttaaaaaaaaaaaaaaaaaa

SEQ ID NO: 2354 - DNA, 3875 bp, Homo sapiens
ccctgattcccggggcctggctttcagcgtacgaattctgccggcgaagaaggtgagcgcagtgctgtgtggcagcagagctccttaggacgaggagcagcgggacgaggaagggcagactggtgaaatcgcaaactgggcgtctgttccggcgccggacccctatttgcaaaggtccatggctaatgaaacacagaaggttggtgccatccattttccttttcccttcacaccctattccatccaggaagacttcatggcagagctgtaccgggttttggaggctggcaagattgggatatttgagagtccaactggcactgggaagtccttaagtcttatttgtggggccctctcttggctccgtgactttgaacagaagaagcgtgaagaagaggcacgactccttgaaactggaactggccccttacatgatgagaaagatgaatccctgtgtctgtcttcttcctgcgaaggggctgcaggcaccccgaggcctgctggagaaccggcctgggttactcagtttgtgcagaagaaagaagagagggacctggtggaccgactaaaggcggagcaggccaggaggaagcagcgagaagaacgcctgcagcagctgcagcacagggtgcagctcaagtatgcagccaagcgcctgaggcaggaagaagaagaaagagagaatctcctccgcctcagcagggagatgctagagacaggcccggaggctgagcggctggagcagctggagtctggggaggaggagctggtcctcgccgaatacgagagtgatgaggagaaaaaggtggcgagcagagtggatgaggatgaggatgacctggaggaagaacacataactaagatttattactgtagtcggacacactcccagctggcccagtttgtgcatgaggtgaagaagagcccctttggcaaggatgttcggctggtctcccttggctcccggcagaacctttgtgtaaatgaagacgtgaaaagcctaggttctgtgcagcttatcaacgaccgctgcgtggacatgcagagaagcaggcatgagaagaagaaaggagctgaggaggagaagccaaagaggaggaggcaggagaagcaggcagcctgccccttctacaaccacgagcagatgggccttctccgggatgaggccctggcagaggtgaaggacatggagcagctgctggcccttgggaaggaggcccgggcctgtccctattacgggagccgccttgccatccctgcagcccagctggtggtgctgccctatcagatgctgctgcatgcggccactcggcaggccgcgggcatccggctgcaggaccaggtggtgatcatcgacgaggcgcacaacctgatcgacaccatcacgggcatgcacagcgtggaggtcagcggctcccagctctgccaggcccattcccagctgctgcagtacgtggagcgatacgggaagcgtttgaaggccaagaacctgatgtacctgaagcagatcctgtatttgctggagaaattcgtggctgtgctaggggggaacattaagcaaaatcccaatacacagagtctgtcacagacagggacggagctgaagaccatcaacgactttctcttccagagccagatcgacaacatcaacctgttcaaggtgcagcgatactgtgagaagagcatgatcagcagaaagctctttggattcactgaacggtacggagcagtgttctcatcccgggagcagcccaaactggctgggtttcagcaattcctgcagagcctgcagcccaggacgactgaagctcttgcagcccctgcagacgagagtcaggccagcaccctgcgaccagcttctccactgatgcacattgaaggcttcctggcagctctcactacggccaaccaggacggcagggtcatcctgagccgccaaggcagcctcagtcagagcaccctgaagtttttgctcctgaatccagctgtgcactttgcccaagtggtgaaggaatgccgggcagtggtcattgcggggggtaccatgcagccggtgtctgacttccggcagcagctgctggcctgtgccggggtggaagctgagcgcgtggtggagttttcctgtggtcacgtgatccctccagacaacatcctgccccttgtcatctgcagcgggatctccaaccagccgctggaattcacgttccagaaaagagagctgcctcagatgatggacgaggtgggtcgcattctctgtaacctgtgcggtgtggttcctggaggggtggtctgtttcttcccctcctacgagtacctgcgccaggtccatgcccactgggagaagggtggcctgctgggccgtctggctgccaggaagaagatattccaggaacctaagagcgcacaccaggtggagcaggtgctgctggcatattccaggtgcatccaggcctgtggccaggagagaggccaggtgacaggggccctgctcctctctgtggttggaggaaagatgagtgaagggatcaacttctctgacaacctaggccggtgtgtggtgatggtgggcatgcccttccccaacatcaggtctgcagagctgcaggagaagatggcctacttggatcaaaccctccccagagcccccggccaggcacccccagggaaggctctggtggagaacctgtgcatgaaggccgtcaaccagtccataggcagggccatcaggcaccagaaggattttgccagcatagtgctcctggaccagcgatatgcccggccccctgtcctggccaagctgccggcctggatccgagcccgtgtggaggtcaaagctacctttggccccgccattgctgctgtgcagaagtttcaccgggagaagtcggcctcttcctgatgggcaaccacaccactgcctggcgccgtgcccttcctttgtcctgcccgctggagacagtgtttgtcgtgggcgtggtctgcggggatcctgttacaaaggtgaaacccaggaggagagtgtggagtccagagcgctgccaggacccaggcacaggcgttagctcccgtaggagaaaatgggggaatcctgaatgaacagtgggtcctggctgtccttggggcgttccagggcagctcccctcctggaatagaatctttctttccatcctgcatggctgagagccaggcttccttcctggtctccgcaggaggctgtggcagctgtggcatccactgtggcatctccgtcctgcccaccttcttaagaggcgagatggagcaggcccatctgcctctgccctttctagccaaggttatagctgccctggactgctcactctctggtctcaatttaaaatgatccatggccacagggctcctgcccaggggcttgtcaccttcccctcctccttcctgagtcactccttcagtagaaggccctgctccctatcctgccccacagccctgcctggatttgtatccttggcttcgtgccagttcctccaagtctatggcacctccctccctctcaaccacttgagcaaactccaagacaccttctaccccaacaccagcaattatgccaagggccattaggctctcaacatgactatagagaccccgtgtcatcacggagacctttgttcctgtgggaaaatatccctcccacctgcaacagctgcccctgctgactgcgcctgtcttctccctctgaccccagagaaaggggctgtggtcagctgggatcttctgccaccatcagggacaaacgggggcaggaggaaagtcactgatgcccagatgtttgcatcctgcacagctacaggtccttaaataaaagtgtgctgttggttaaaaaaaaaaaaaaaaaaaaa

SEQ ID NO: 2355 - DNA, 4203 bp, Homo sapiens
ttcactgaggggacccgccagtttcaaactcagtggcgtttgccctgattcccggggcctggctttcagcgtagcaattctgccggcgaagaaggtgagcgcagtgctgtgtggcagcagagctccttaggacgaggagcagcgggacgaggaagggcagactggtgaaatcgcaaactgggcgtctgttccggcgccggacccctatttgcaaaggtccatggctaatgaaacacagaaggttggtgccatccattttccttttcccttcacaccctattccatccaggaagacttcatggcagagctgtaccgggttttggaggctggcaagattgggatatttgagagtccaactggcactgggaagtccttaagtcttatttgtggggccctctcttggctccgtgactttgaacagaagaagcgtgaagaagaggcacgactccttgaaactggaactggccccttacatgatgagaaagatgaatccctgtgtctgtcttcttcctgcgaaggggctgcaggcaccccgaggcctgctggagaaccggcctgggttactcagtttgtgcagaagaaagaagagagggacctggtggaccgactaaaggcggagcaggccaggaggaagcagcgagaagaacgcctgcagcagctgcagcacagggtgcagctcaagtatgcagccaagcgcctgaggcaggaagaagaagaaagagagaatctcctccgcctcagcagggagatgctagagacaggcccggaggctgagcggctggagcagctggagtctggggaggaggagctggtcctcgccgaatacgagagtgatgaggagaaaaaggtggcgagcagggcgccttctgatgccacctccagccgccatccaccagacgccagcttccccgctgccctgaacttcctccagcgcaccaggccttcctctgtcctgtctgaggatttgctcatgcaacgtgctgtggccaaacaccctgccctcctcccttggcagatgtcttcctctcctttaaggcctggctcagagtggatgaggatgaggatgacctggaggaagaacacataactaagatttattactgtagtcggacacactcccagctggcccagtttgtgcatgaggtgaagaagagcccctttggcaaggatgttcggctggtctcccttggctcccggcagaacctttgtgtaaatgaagacgtgaaaagcctaggttctgtgcagcttatcaacgaccgctgcgtggacatgcagagaagcagagaagaagaaaggagctgaggaggagaagccaaagaggaggaggcaggagaagcaggcagcctgccccttctacaaccacgagcagatgggccttctccgggatgaggccctggcagaggtgaaggacatggagcagctgctggcccttgggaaggaggcccgggcctgtccctattacgggagccgccttgccatccctgcagcccagctggtggtgctgccctatcagatgctgctgcatgcggccactcggcaggccgcgggcatccggctgcaggaccaggtggtgatcatcgacgaggcgcacaacctgatcgacaccatcacgggcatgcacagcgtggaggtcagcggctcccagctctgccaggcccattcccagctgctgcagtacgtggagcgatacgggaagcgtttgaaggccaagaacctgatgtacctgaagcagatcctgtatttgctggagaaattcgtggctgtgctaggggggaacattaagcaaaatcccaatacacagagtctgtcacagacagggacggagctgaagaccatcaacgactttctcttccagagccagatcgacaacatcaacctgttcaaggtgcagcgatactgtgagaagagcatgatcagcagaaagctctttggattcactgaacggtacggagcagtgttctcatcccgggagcagcccaaactggctgggtttcagcaattcctgcagagcctgcagcccaggacgactgaagctcttgcagcccctgcagacgagagtcaggccagcaccctgcgaccagcttctccactgatgcacattgaaggcttcctggcagctctcactacggccaaccaggacggcagggtcatcctgagccgccaaggcagcctcagtcagagcaccctgaagtttttgctcctgaatccagctgtgcactttgcccaagtggtgaaggaatgccgggcagtggtcattgcggggggtaccatgcagccggtgtctgacttccggcagcagctgctggcctgtgccggggtggaagctgagcgcgtggtggagttttcctgtgttttcggcccctccctggctcttaccaggtcacgtgatccctccagacaacatcctgccccttgtcatctgcagcgggatctccaaccagccgctggaattcacgttccagaaaagagagctgcctcagatgatggacgaggtgggtcgcattctctgtaacctgtgcggtgtggttcctggaggggtggtctgtttcttcccctcctacgagtacctgcgccaggtccatgcccactgggagaagggtggcctgctgggccgtctggctgccaggaagaagatattccaggaacctaagagcgcacaccaggtggagcaggtgctgctggcatattccaggtgcatccaggcctgtggccaggagagaggccaggtgacaggggccctgctcctctctgtggttggaggaaagatgagtgaagggatcaacttctctgacaacctaggccggtgtgtggtgatggtgggcatgcccttccccaacatcaggtctgcagagctgcaggagaagatggcctacttggatcaaaccctccccagagcccccggccaggcacccccagggaaggctctggtggagaacctgtgcatgaaggccgtcaaccagtccataggcagggccatcaggcaccagaaggattttgccagcatagtgctcctggaccagcgatatgcccggccccctgtcctggccaagctgccggcctggatccgagcccgtgtggaggtcaaagctacctttggccccgccattgctgctgtgcagaaggtcagtcctacctttttctttctgagagcctccccaccccgagatcacatttctcactgccttctgtctgcccagtttcaccgggagaagtcggcctcttcctgatgggcaaccacaccactgcctggcgccgtgcccttcctttgtcctgcccgctggagacagtgtttgtcgtgggcgtggtctgcggggatcctgttacaaaggtgaaacccaggaggagagtgtggagtccagagcgctgccaggacccaggcacaggcgttagctcccgtaggagaaaatgggggaatcctgaatgaacagtgggtcctggctgtccttggggcgttccagggcagctcccctcctggaatagaatctttctttccatcctgcatggctgagagccaggcttccttcctggtctccgcaggaggctgtggcagctgtggcatccactgtggcatctccgtcctgcccaccttcttaagaggcgagatggagcaggcccatctgcctctgccctttctagccaaggttatagctgccctggactgctcactctctggtctcaatttaaaatgatccatggccacagggctcctgcccaggggcttgtcaccttcccctcctccttcctgagtcactccttcagtagaaggccctgctccctatcctgccccacagccctgcctggatttgtatccttggcttcgtgccagttcctccaagtctatggcacctccctccctctcaaccacttgagcaaactccaagacaccttctaccccaacaccagcaattatgccaagggccattaggctctcaacatgactatagagaccccgtgtcatcacggagacctttgttcctgtgggaaaatatccctcccacctgcaacagctgcccctgctgactgcgcctgtcttctccctctgaccccagagaaaggggctgtggtcagctgggatcttctgccaccatcagggacaaacgggggcaggaggaaagtcactgatgcccagatgtttgcatcctgcacagctacaggtccttaaataaaagtgtgctgttggttaaaaaaaaaaaaaaaaaaaaa

SEQ ID NO: 2356 - DNA, 2775 bp, Homo sapiens
ggaaggggcgtggcctcggtccggggtggcggccgttgccgccaccagggcctcttcctgcgggcggtgctgccgaggccggcctgcgcggggcagtcatggtacccccttgagcgggctgtggcggagagcggggcggggactggctggagggtggcggcccggcggggcgggggcggggccggcctctggctccttcttcctctgcatgtggctggcggccgcagagcagttcagttcgctcactcctcgccggccgcctctccttcgggctctcctcgcgtcactggagccatggcgttcgccgagacctacccggcggcatcctccctgcccaacggcgattgcggccgccccagggcgcggcccggaggaaaccgggtgacggtggtgctcggtgcgcagtggggcgacgaaggcaaagggaaggtggtggacctgctggcgcaggacgccgacatcgtgtgccgctgccagggaggaaataatgctggccatacagttgttgtggattctgtggaatatgattttcatctcttacccagtggaataattaatccaaatgtcactgcattcattggaaatggtgtggtaattcatctacctggattgtttgaagaagcagagaaaaatgttcaaaaaggaaaaggactagaaggctgggaaaaaaggcttattatatctgacagagctcatattgtatttgattttcatcaagcagctgatggtatccaggaacaacagagacaagaacaagcaggaaaaaatttgggtacaacaaaaaagggcattggcccagtttattcgtccaaagctgctcggagtggactcaggatgtgcgaccttgtttctgactttgatggcttctctgagaggtttaaagttctagctaaccaatacaaatctatataccccactttggaaatagacattgaaggtgaattacaaaaactcaagggttatatggaaaagattaaaccaatggtgagagatggagtttattttctatatgaggccctacatggaccaccaaagaaaatcttggtagaaggtgcaaatgcagcactattagatattgattttgggacttacccttttgtaacctcttcaaattgtactgttggaggtgtttgtactggtttgggtatgccacctcaaaatgttggagaagtgtatggagttgtgaaagcttatacaactagagttggtattggtgcctttcctacagagcaagacaatgaaattggagaattattacaaacaaggggtagagagtttggtgtaactactggaaggaaaagaagatgtggctggttggacctcgttttgctcaaatatgctcatatgatcaatggatttactgcgttggcacttaccaagttggatattttggacatgtttacggaaatcaaagttggagttgcttacaagttagatggtgaaatcatacctcatatcccagcaaaccaagaagtcttaaataaagttgaagttcaatataagactctcccaggatggaacacagacatatcaaatgcaagggcgtttaaagaactacctgttaatgcacaaaactatgttcgatttattgaagatgagcttcaaattccagttaagtggattggtgttggtaaatccagagaatctatgattcaactcttttaatgattgccagtaatgcaagaaacactccttgagagggaggggaaaagactttcttaaatatttcatttatgacctgcaaattcaagaataaagacactgaagtaagtttgaagccctacagttgtttccagtcttttcagatggatgcctactgtggagattaactttggcatattccagtgtcagctttctttagctggaattgccaaatcatttgttgctcctgctgctctcatggtgccacgttttttttttcaatgtttagtaatagtataatccatgttgtttgatatcaaaagtagaattacttttaatgtagtttttcttcattattgtcattgcgtgttcttaagttttacccctattagatggtaagaacaattaatgcagttttgcacaaatatttttacattctgatcattcagttctgtcattgtaatctttgttgttagaaacaaatgatgaaaacataggggttctgtaaacttttgtaatgctatgaattctgtttaaattttgggctgtctattttctgctgaaaccatgcaaaattgagctttggtggggctgggagggggttatgtattcatgggacctttaatttgtacagaacacagaacttatttctgtcagttatttaatacattgaaaatttagtgaaatgttcaaagagaatagatgtttcccaaaacaacaatctttatgttaaaaatagtcattaaaagatctgttgtaatatatggtggatatttttctttaatttcaaacattacctctgaaatgtgtatcttttcttttttatcttaccattaattttaaatctagtggattggttttcaacatcgtgcctgccgatatgcctacagaatcatctgtaagtgtcaaaatgaacccacgttgttagccataattttgattatgcctttatttctcctttcttgaaaaaaaaaaggtgttattttgacaattaggcataacattgttttgtagattatcttttaatgaactattttaaatgttaaattaggtgccacttaaatttattttattacaccatgaatagctgattaaaagaaccaaatatttctagtaaaaaaaaaaaaaaaaaaa

SEQ ID NO: 2357 - DNA, 2093 bp, Homo sapiens
ttagcggtgctcgggtccggtaacaacatggcggcgtccgtgaggggctcctttgggcaggggtagtgtttggtgtccctgtcttgcgtgatattgacaaactgaagctttcctgcaccactggacttaaggaagagtgtactcgtaggcggacagctttagtggccggccggccgctctcatcccccgtaaggagcagagtcctttgtactgaccaagatgagcaacatctacatccaggagcctcccacgaatgggaaggttttattgaaaactacagctggagatattgacatagagttgtggtccaaagaagctcctaaagcttgcagaaattttatccaactttgtttggaagcttattatgacaataccatttttcatagagttgtgcctggtttcatagtccaaggcggagatcctactggcacagggagtggtggagagtctatctatggagcgccattcaaagatgaatttcattcacggttgcgttttaatcggagaggactggttgccatggcaaatgctggttctcatgataatggcagccagtttttcttcacactgggtcgagcagatgaacttaacaataagcataccatctttggaaaggttacaggggatacagtatataacatgttgcgactgtcagaagtagacattgatgatgacgaaagaccacataatccacacaaaataaaaagctgtgaggttttgtttaatccttttgatgacatcattccaagggaaattaaaaggctgaaaaaagagaaaccagaggaggaagtaaagaaattgaaacccaaaggcacaaaaaattttagtttactttcatttggagaggaagctgaggaagaagaggaggaagtaaatcgagttagtcagagcatgaagggcaaaagcaaaagtagtcatgacttgcttaaggatgatccacatctcagttctgttccagttgtagaaagtgaaaaaggtgatgcaccagatttagttgatgatggagaagatgaaagtgcagagcatgatgaatatattgatggtgatgaaaagaacctgatgagagaaagaattgccaaaaaattaaaaaaggacacaagtgcgaatgttaaatcagctggagaaggagaagtggagaagaaatcagtcagccgcagtgaagagctcagaaaagaagcaagacaattaaaacgggaactcttagcagcaaaacaaaaaaaagtagaaaatgcagcaaaacaagcagaaaaaagaagtgaagaggaagaagcccctccagatggtgctgttgccgaatacagaagagaaaagcaaaagtatgaagctttgaggaagcaacagtcaaagaagggaacttcccgggaagatcagacccttgcactgctgaaccagtttaaatctaaactcactcaagcaattgctgaaacgcctgaaaatgacattcctgaaacagaagtagaagatgatgaaggatggatgtcacatgtacttcagtttgaggataaaagcagaaaagtgaaagatgcaagcatgcaagactcagatacatttgaaatctatgatcctcggaatccagtgaataaaagaaggagggaagaaagcaaaaagctgatgagagagaaaaaagaaagaagataaaatgagaataatgataaccagaacttgctggaaatgtgcctacaatggccttgtaacagccattgttcccaacagcatcacttaggggtgtgaaaagaagtatttttgaacctgttgtctggttttgaaaaacaattatcttgttttgcaaattgtggaatgatgtaagcaaatgcttttggttactggtacatgtgttttttcctagctgaccttttatattgctaaatctgaaataaaataactttccttccacattacatgttaaccattgcagactgcaagcctgtttgtgtccttttaccctaaaatatatgaaggcttccttttcaagatttttttataagaagttcctacagaaagaatatttgtgggaaacctccctttcactaacttcagaatataataaaatattataaataaaatatagaatataaatatgaaaaaaaaaaaaa

SEQ ID NO: 2358 - DNA, 2634 bp, Homo sapiens
gggtctgggcgtgccgcgggtgacggcggggccgggcgggccaatgggcgctgggtggcgggcgggcgggcctggcggccgggggctttaggacgtgagcgggcggccggccggacagactgacgtgtgagctgcatcgcgggaggcgcatggcggggatggcgctggcgcgggcctggaagcagatgtcctggttctactaccagtacctgctggtcacggcgctctacatgctggagccctgggagcggacggtgttcaattccatgctggtttccattgtggggatggcactatacacaggatacgtcttcatgccccagcacatcatggcgatattgcactactttgaaatcgtacaatgaccaagatgcgaccaggatcagaggttccttggggaagacccaccctacgaagttggaatgagaccatcagatgtgataagaaactcttctagatgtcaacataaccaaccttataaagactaaaattcatgagtagaacaggaaaatcatcctgactcatgtgttgtgttctttatttttaattttcaaagaggctcttgtatagcagtttttgtctattttaacattgtagtcatttgtactttgatatcagtattttcttaacctttgtgactgtttcaatattacccccgtgaaagcttttcttaatgtaactttgagtacattttaattgccttctatttttaaaactcaaaatcattagttgggctttactgttcttgctattgtatggcatatacatctgcctggatatatttctactcttgaccaaagttttgtaaagaacaatataagatttcgggtaggggtatggggagggaagatattttattgagaactacttaacaaaagatttatctgtaagcttgaactcaggagtacagttttagctatctagactctaacagcttttgctttaaaattattaaagtgtttcttaatgaaaaagaaaagatcttgctaaagttaaaataaggaacatttcaccttttaaatatttaattcttatgtggacttatttccagaaaactttggtgataattcttgagacaaaaggtggttaagtagcattattatgtaatgcttatataccatagagtttttaatagaagagaaatccatttcctccgagggtcactattaacaatgtacttccttaaatttagtttaatgattgtaatgggtgctgcatttgcacattgcattaagttatgatgagacgaattgttgttaaaaattatagcaaaaagaaatgtaaacttggttaaaatcctttcactctttgtattgttttttttaaggtttttattccttaaatgtaaaatgactacctaattttttgatgtaaatacattaaattcaaagagaaaaaaaatcagctgatgtagcagtatatcttttccttgatggttaaatattgatctagtatttatattgctgaattattttctgtggaggaccagataagcagtaagtatgtcttatcctatatgttttgcaacataaaaatattgctaattgaaaagaattaggcaattatgtgtgttgctgggttgtttttttgtttttttttttttgagacggagtcttgccctgtcgcccaggatggagtgcaacagcatgatctcggttcactgcaacctccatctcctgggatcaagtgattctcctgcctcagcctcctgaatagctgggattacaggcacctgccaccatgcctggctaattttttgtatctgtagtagagacggggtttcactgtgttggccaggatggtctcaaactcctgacctcctgatccacctgcctcggcctcccaaagtgctgggtttacaggcgtgagccaccgcgcccggccaaaattgaggtattttttgccctacgttttaaggactagacttttgaagtattttatagtctagaggtctcaagtaatatatatgtgtttaatatttttagagccaattgataccacaattagataggagtagtgagaataatatggaattacttggtttgaagtagttaaaaattggatatggttatatctgagctgtagtcatattatctcaagaaaaataatacgaggatttaacataagatttgttctattaatgcccaaatttggctttcctctactatcccccatagagaaccactaacaagtggatgtctaatattcctctggtgagttgaaggcaggagaagttgagaatcattagtttcaatgagtatccaggtgacctatcctggccctctactcagaaaccggcaatttgtcttcactctgagattcattaaattgctgttgtataactgatggttattatgaacactgacctgtgagacatatggaagataaagtttggtcttacaggaaatcttgaggagagtcaaaagagaaatgggagatgtctcttgagaggtgatcagagaagtttatgctcactgtctgatgcaaatgtctggtctatttgttagtaaataacagggaaatcattttcactttttgttaaaaataaggtatttacaagcataccttgtagttattgtgggttcagtttcagaccactgcaataaagtgaatatctcaaaaaaaaaaaaaaaa

SEQ ID NO: 2359 - DNA, 1738 bp, Homo sapiens
tgctgactaatccgcgggccgcggggaatgggtggcgcgccagccggtcggcaggggtcacgcggccgggtgtgcgcggaatggattcagggttctcgggtcgcgcccgggagctagagtcctgactcccagccggggtccccgaccggcctttcggggttgccgggcgcgctctgcaaaggggaaactgaggcccaaggaaattgagtatctctgcaaagtcaccagctgagttcgaaccagacagatcctgggaccccctactctatccgccaccggaagaatctccgtccttgtctttccattctgccctcccggcttcccagtaagcacacagccccaggaccacccttgaccgtcctcaaccaagcgatgcatgccaggggcccccatggccaactgtccccagcactgcctctggcctcctcagtcctgatgctgctgatgagcaccctgtggctggtgggggccggccccggcctggtcctggccccggagctgttgctggacccctggcaggtgcaccggctgctgacccatgccctgggccacacggccctgccaggcctgctcctgagcctgctgctcctgcccactgtgggctggcagcaggagtgccacctgggcacgctgagattcctgcatgcctcagccctgctcgccctggcttctgggctgctggcagtgctgctggcaggccttgggctgtccagtgcagccggcagctgtggatacatgcctgtccacctggccatgctggctggggagggacaccgccctagacggccccgtggggcactgccaccgtggctgtcgccgtggctgctgcttgccctgaccccactgctcagctctgagccacccttcctgcagctcctttgcggcctccttgccggcctggcctatgcagctggggccttccggtggctggaaccctcagagcgacggctgcaggtgctgcaggagggcgtcttgtgcaggaccttggcggggtgctggcccctgaggctccttgccaccccgggtagcctggcggagctgcctgtcacccatcctgccggagtgaggcctcccatccctggaccgccttatgtggcctcccctgacctctggtcccactgggaagactcagccctgcccccaccaagcctgaggcctgtgcagcccacctgggagggctcctcagaggcaggcctggactgggctggggccagcttctccccagggactccgatgtgggcggccttggatgagcagatgctgcaggagggcatccaggcctcgcttcttgacgggccagcccaggaaccccagagcgcaccatggctgtccaagtcctctgtctcctctctgcggctgcagcagctggagcgcatgggcttccctacggagcaggcggtggtggcactggcagccacaggccgtgtggagggtgccgtgtcactgttggttggaggacaagtgggcactgagaccctggtgacccatggaaagggtgggcctgcccactccgagggtcctgggcctccctagcccaggcagagagtggggcacaggcaggcccttgggtgctaagggctgggctgcatgtgggtagcccgagctcctactctgtctaaagagggccacagtggggagcaggggcacctctggaggcaggagaggccccccagcatgctgccctagtacgtgtttagaataaaaaccagtttgtttttcaacctggacctccttggag

SEQ ID NO: 2360 - DNA, 1999 bp, Homo sapiens
acgcgctcttagaccatggcgacccaggcgaagcgtccacgggtggcggggcccgtggacggcggcgacctggatcctgtggcctgcttcctgagctggtgccggcgggtggggctggagctgagtcccaaggtggcggtcagccggcagggcacggtggccggctacggcatggtggcccgggagagcgtgcaggccggagagctgctgttcgtggtgccgcgggccgcgctcctgtcgcagcacacctgctccatcggcggcctgctggagcgagagcgagttgcgctgcagggccagtcgggctgggtgccactgctgctggcgctgctccacgagctgcaggccccggcctcacgctggaggccctactttgcgctctggcccgagctgggccgcttggagcacccgatgttctggccagaggaggagcgccggtgcctgctccagggcacaggcgtacctgaggccgtggagaaggatttggccaacatccgcagcgagtaccagtccatcgtgctgcccttcatggaagcccaccccgatctcttcagcctcagggttcgctccctagaactctaccaccagctggtggcccttgtgatggcctatagctttcaggtaccactggaggaagaagaggatgaaaaggagcccaactcccccgtgatggtgcctgctgcagacatactaaaccacttagccaatcacaacgccaatctagaatactctgcgaattgtcttcggatggtagccactcagcccattcctaaaggccatgagattttcaacacttatgggcaaatggctaactggcaactgattcatatgtacggttttgttgaaccatatcctgacaacacagatgacacagctgacattcagatggtgacagttcgtgaggcagcattacagggaacaaaaactgaagctgaaaggcacctagtgtacgagcgctgggatttcctatgcaaactggagatggtaggggaagagggagcctttgtgatagggagggaggaggtgctgactgaagaggagctgaccaccacactaaaggtactgtgcatgcctgctgaggagttcagagagcttaaagaccaggatggagggggagatgataaaagggaagagggcagcctgacgatcacaaatattcccaagctcaaagcatcgtggagacagctgcttcaaaacagtgttctactgactttgcagacctatgccacagacttaaaaactgaccaaggtttactcagtaataaggaagtctatgcgaaactcagctggagggaacagcaagccttacaggttcgctatggtcagaagatgatcttacatcagttgttggaactgacaagttagcagtttccctgttccctgaaggaacagcaataagaactttattctaagctaatactcattgatgtttgaaaaagaggaaaatttggatctttcttttgcttactaaacaccaagaggaaaagtagcaaagttggtgtgctaggattaactcaggtaagggtgatgtgttttaggattgagaacagcagacttgggaatcactgctaattgttacttaaagcatgttacagctgttttgttctcagttttaaccaaagccagtggacatacggtagtaataactaagtcttgttgtgtttcagcatttaataatagactttggaggtagacccctggtttaaatctaagtctagtttgaggaagtcacttaacctttattgaaaagactctggatttaataagctgtgtaactggtactcgatagttacccaaagttcagtctagatggcacaaaccacctctcagggaataaaccctaagacatcactcaaggaggacttcaattatttaattttgaactgttttgtcctctctggccataaaacttgacagtcatgaaaggtaaggcaaattttaagtgggttaagtttttaaatacgtatctactcattttctttaaaaaaaaaaaaaaaaa

SEQ ID NO: 2361 - DNA, 3210 bp, Homo sapiens
ctctctcacacacacccccgcttgggcctcctctctctctccggctccattttctccgccgccgggggccggggtctcctgtggggggcccagccggtatcccaggtctcccttcagtgccggggtgaacccccgggggagccgggagccgggggcagacgggcgggggttggggcggagggagcagcggccccagcgagtttggggggagaagtaaccaggcggggggaggggcggagcagggagggggcctcagggcccccccccagctatggacgaacggctactggggccgccccctccaggcgggggccgggggggcctgggattggtgagtggggagcctgggggccctggcgagcctcccggtggcggagaccccggtgggggtagcgggggggtcccgggaggccgagggaagcaagacatcggggacattctgcagcagataatgaccatcaccgaccagagcctggacgaggcccaggccaagaaacacgccctaaactgccaccgaatgaagcctgctctctttagcgtcctgtgtgaaatcaaggagaaaactggcctcagcattcggagctcccaggaggaggagccggtggacccacagctgatgcgcttggacaacatgcttctggcagagggtgtggctgggcccgagaaagggggcggctcagcagcagcagctgcagccgctgcagcctctggtggtggtgtgtcccctgacaactccatcgaacactcggactatcgcagcaaacttgcccagatccgtcacatataccactcggagctggagaagtatgagcaggcatgtaatgagttcacgacccatgtcatgaacctgctgagggagcagagccgcaccaggcccgtggcccccaaagagatggaacgcatggtgagcatcatccatcgaaagttcagcgccatccagatgcagctgaagcagagcacctgcgaggctgtgatgatcctgcgctcccgtttcctggatgccagacgaaagcgccgtaacttcagcaaacaggccactgaggtcctaaatgagtatttctactcccacctgagtaacccatatcctagtgaggaggccaaggaggagcttgccaagaagtgtggcatcaccgtgtctcaggtctccaactggtttggcaacaagaggattcgctataagaaaaacatcggaaagttccaagaggaggcaaacatctatgctgtcaagaccgccgtgtcagtcacccaggggggccacagccgcaccagctccccgacacccccttcctctgcaggctctggcggctctttcaatctctcaggatctggagacatgtttctggggatgcctgggctcaacggagattcctattctgcttcccaggtggaatcactccgacactcgatggggccagggggctatggggataacctcgggggaggccagatgtacagcccacgggaaatgagggcaaatggcagctggcaagaggctgtgaccccctcttcagtgacatccccaacggagggaccagggagtgttcactctgatacctccaactgatcttgcccctcagggtcacaggggtgggggctctcacaaggcgacttgaagaggacgcaggcttccagaggacaaaccccaatacaggagaagcacaagacagagaagggccaatggggtcatcccctccctaacgagactctctgtgctgggggtgctaattacatggcaggaagaatggggcctctaaggggagtgtggggtctgtctctcccttttttccatctttttcctctctcgctttctttcttacacagaaacatacacataccgagaaacctatttctcagacccctttttctcctctgtctttctctctccctctcccacacctcacacacacatactcccacttgcaactattctgtttctctcctgggctcccccactttcccttccccaccccacttgtatgctctggaatctgtggagacgccagccctgcccaatcagagatgccaaaaatggggacatgacttctggacagaggacatgggccacgcccccatgcatccccacccccgcccctccggacggcttacttacctcatacgcagctcatcttaaaccaatagaatcgctcggtggacgagagtgtctgactcagatatctacctcggagggagtttctgctactttagggaattattgactgggctttggggttgaacttttttttttttaaagaaagaaaaagaaaccctgggatccatctgttttttttgttgttgttgttgtttttgttgttgttggtggtggtggtggtggtggttcttaatttttaatttagtttggggaagtagcttgtttttttttttataaatatgttgatttcttgtcttttttttttatttcttactttcccatattaggggtgatagccaaaggggttctggtaagagaaagggggacaaacagaactggtaaagaggcccccctggctccaggcctgtccatcaggaagtaaattttacagggcaccaagctttgccccctaaaatcccttaggtgttctttgttcatgcaggcaggtttctgccgcatttgatgtggaggcagtgaagggcttgccctgctggcctctcatcccccttcttcccacaacccttgggcagggctggactcagtaattttgaggaaattgaagatgccatcttcccctgtgagtgacatgtctttaattttttaaaaaactactatttgaaaattggagggggaagaatgggaagggagttattgccaaatatgttaaatatgggttggggtgcttgtatatgtatcttcctcaatttccccataaatgaggtatctttttgtcacaccaaaatcaaggggtagggagagggaggaggttgcaaaaagccagatgtgggggaaaagtaacatcaacactgtcccatcctcagccctgaactagctaccatctgatcccctcagacattctcaggattttacaagactgtcagagtggggaacccctcccattaaagatccgggcaggactggggacaggttggaagtgtgatgggtgggggggtgggaggcatgggccgggggcagttctctcctcacttgtaaacttgtgtagtttcacagaaaaaaaacaaaatgcagttttaaataaagaaatttctttttaaaaaaaa

SEQ ID NO: 2362 - DNA, 2197 bp, Homo sapiens
ttttttccgtgggagtaaggaagtgcttttgaatgaggtactgggggccaaggtgttggaagttcctaattctttcctcggttaactgtgaaactctgcgtattgggaaggcctggcctcagtcatcaggccaggagaggtactggacgccgcgcacgcactcgtctgccagcgaggcccaaaggggaagcctagcggagctcagtgtggcagctgctggcctctgggccgctacttgtcaataccatgctttcctgtaatatttgtggtgaaacagtaacctcagaaccagacatgaaagctcacctaattgttcacatggaaagtgaaattatatgtccattttgcaagttgtcaggtgtgaattatgatgaaatgtgttttcatatcgaaacagctcattttgagcagaatacacttgaaagaaactttgagaggataaatacagtacaatatggaacttcagataacaagaaagacaacaccctacagtgtggaatggaagttaattcaagtattctttcaggttgtgcatctaatcatccaaaaaattcagctcaaaacctgactaaagatagtactttaaaacatgaaggcttctattcagagaacttaactgaatctagaaaattcctgaaaagtagggaaaaacagtccagcctgaccgaaataaaaggatctgtttatgaaacaacatacagtcctcctgaatgtccattctgtggaaaaatagaggagcacagtgaagatatggaaactcatgtgaaaacaaagcatgccaatcttttagacattccattggaagactgtgatcaaccactctatgattgtcctatgtgtgggctcatatgtacaaattaccatattcttcaggaacatgttgacttgcatttggaagaaaacagctttcagcaaggcatggatagagtccagtgttctggtgatctacaattggctcaccagcttcagcaagaagaagacagaaagaggagatctgaagaatcaagacaagaaatagaagaatttcagaagctgcagagacaatatggtttagataattctggaggatacaaacaacaacaactacgaaatatggagatagaagtaaataggggaagaatgcctccatctgaatttcataggagaaaagctgatatgatggaatcattagctcttggttttgacgatggaaaaacaaaaacttccggaattattgaagcacttcataggtattatcagaatgctgccacagatgtgagacgggtgtggctttcttcagtggtggatcactttcattcatctttaggcgacaaaggttggggttgtggttacagaaatttccaaatgctactttcatcattattacaaaatgatgcttacgacgattgcttaaaaggtatgttgattccttgcattccaaaaattcaatctatgattgaagatgcatggaaggaaggttttgatcctcagggggcctctcaacttaataacaggttacagggaacaaaggcctggattggagcatgtgaagtatatatactcctgacctccctaagggtaaagtgtcatattgttgattttcacaaatcaactggtcctttgggtacacaccctcgcttatttgaatggatattgaactattattcttcagagggagaagggagtccaaaggtagtgtgtacatctaaacctcctatctatcttcagcatcaaggtcacagtcgaactgttattggaattgaagagaaaaaaaaccgaacattatgcttactaatacttgatcctggatgtccttctcgagaaatgcagaaattattaaagcaagacatagaggctagcagtctcaagcaacttcggaaatctatgggaaatttaaaacataagcaataccagatattggcagtagagggtgctctttctctagaggagaaacttgccaggagacaagcttctcaagtctttacagccgagaagattccttgaagaatcaagcatttaagcatttcagtgattgagaacaatactttgttttctaaatgtagatattgaactccttaatacaattatgaatctgtgaattctcttaagtcttaacatataatttaatctctaaaatgcctgtgttaattgaattatacctatcatacttcattgtttggtaaattatttcaataaaatgtcttgtttttgcattgtg

SEQ ID NO: 2363 - DNA, 939 bp, Homo sapiens
aacgggcccccgggtcggtttccgcggtggccatgactgcggccgtgttcttcggctgcgccttcattgccttcgggcctgcgctcgccctttatgtcttcaccatcgccaccgagccgttgcgtatcatcttcctcatcgccggagctttcttctggttggtgtctctactgatttcgtcccttgtttggttcatggcaagagtcattattgacaacaaagatggaccaacacagaaatatctgctgatctttggagcgtttgtctctgtctatatccaagaaatgttccgatttgcatattataaactcttaaaaaaagccagtgaaggtttgaagagtataaacccaggtgagacagcaccctctatgcgactgctggcctatgtttctggcttgggctttggaatcatgagtggagtattttcctttgtgaataccctatctgactccttggggccaggcacagtgggcattcatggagattctcctcaattcttcctttattcagctttcatgacgctggtcattatcttgctgcatgtattctggggcattgtattttttgatggctgtgagaagaaaaagtggggcatcctccttatcgttctcctgacccacctgctggtgtcagcccagaccttcataagttcttattatggaataaacctggcgtcagcatttataatcctggtgctcatgggcacctgggcattcttagctgcgggaggcagctgccgaagcctgaaactctgcctgctctgccaagacaagaactttcttctttacaaccagcgctccagataacctcagggaaccagcacttcccaaaccgcagactacatctttagaggaagcacaactgtgcctttttctgaaaatccctttttctggtggaattgagaaagaaataaaactatgcagatatgcgttccattca

SEQ ID NO: 2364 - DNA, 4190 bp, Homo sapiens
gaattccctttcgccggcgccgagttcctggcgccgctcgcccggcccggcttccgaggggagaggacgggctggcggggctggggacccgcgtctcggcccccggagcggggaccacggagacagaccccggcccggcgaccgagctgggcccgtgagccactcggcctcaggtcgctcctgtggttggtccagcccagaatgcagccttgagcctggcttaggccaccacctactccagctctctccaccccctattttactgcagctcagggggtaggctctaggctccaaagtacctgggtattgtcccttcatcaagaaagccccacagctctggagggctctgataatcccgttgtcagctctctgaaaagacagcatggctattaccctacagcccagtgacctgatctttgagttcgcaagcaacgggatggatgatgatatccaccagctggaagacccctctgtgttcccagctgtgatcgtggagcaggtaccctaccctgatttactgcatctgtactcgggactggagttggacgacgttcacaatggcatcataacagacgggaccttgtgcatgacccaggatcagatcctggaaggcagttttttgctgacagatgacaatgaggccacctcgcacaccatgtcaaccgcggaagtcttactcaatatggagtctcccagcgatatcctggatgagaagcagatcttcagtacctccgaaatgcttccagactcggaccctgcaccagctgtcactctgcccaactacctgtttcctgcctctgagcccgatgccctgaacagggcgggtgacactagtgaccaggaggggcattctctggaggagaaggcctccagagaggaaagtgccaagaagactgggaaatcaaagaagagaatccggaagaccaagggcaaccgaagtacctcacctgtcactgaccccagcatccccattaggaagaaatcaaaggatggcaaaggcagcaccatctatctgtgggagttcctcctggctcttctgcaagacagaaacacctgtcccaagtacatcaagtggacccagcgagagaaaggcatcttcaaactggtggactccaaagctgtgtccaagctgtgggggaagcagaaaaacaagcctgacatgaactatgagacaatggggcgggcactaagatactactaccaaagaggcatactggccaaagtggaagggcagaggctggtgtaccagtttaaggagatgcccaaggacctggtggtcattgaagatgaggatgagagcagcgaagccacagcagccccacctcaggcctccacggcctctgtggcctctgccagtaccacccggcgaaccagctccagggtctcatccagatctgccccccagggcaagggcagctcttcttgggagaagccaaaaattcagcatgtcggtctccagccatctgcgagtctggaattgggaccgtcgctagacgaggagatccccactacctccaccatgctcgtctctccagcagagggccaggtcaagctcaccaaagctgtgagtgcatcttcagtgcccagcaacatccacctaggagtggcccccgtggggtcgggctcggccctgaccctgcagacgatcccactgaccacggtgctgaccaatgggcctcctgccagtactactgctcccactcagctcgttctccagagtgttccagcggcctctactttcaaggacaccttcactttgcaggcctctttccccctgaacgccagtttccaagacagccaggtggcagccccaggggctccactgattctcagtggcctcccccaacttctggctggggccaaccgtccgaccaacccggcgccacccacggtcacaggggctggaccagcagggcccagctctcagccccctgggactgtcattgctgccttcatcaggacttctggcactacagcagcccctagggtcaaggaggggccactgaggtcctcctcctatgttcagggtatggtgacgggggcccccatggaggggctgctggttcctgaagagaccctgagggagctcctgagagatcaggctcatcttcagccacttccaacccaggtggtttccaggggttcccacaatccgagccttctgggcaaccagactttgtctcctcccagccgccccactgttgggctgaccccagtggctgaacttgagctctcctcaggctcagggtccctgctgatggctgagcctagtgtgaccacatctgggagccttctgacaagatcccccaccccagcccctttctccccattcaaccctacttccctcattaagatggagccccatgacatataagcaaaggggtcagggcaagtgtgacccaccaggcaaaattgagcagcattttcatagggaccgacttcagtagcacacctgcccctgcatttcagtgggatgtcaatacacttgaccccaagtcccccggccctgcctggtgtcactgtggccaaacagtgcccagcttaagcatccctggcatcagactatggccttcaagagcactagggcatatgcttttggcagcataacgggctgacttggtgatggagggaaaaagccttgagccaggcagaagtttgtggccagggtttgtgcagcagctttgtgagaagagcccttctacctggctctatctcactggctgcattccctacacagggaatttactaccctatatgtgaatatcccctgtatgtacttgtgtgtacttgttggtctgtatcttagtttctttggggaggacagggctgtagctgtgaggtcttgtctccaagggtgtgtgtatgtctccgtggatcagccacagggatagggattttgtttttaagggaaagcattctctaattccctttgttcatgccgagattcagttgctctgagactatggggtacaagtttgatcctccgaatctggagatgttgtagagctggaacgagtgcagagtaggaacgctttgatgcgcatgcacattggggaagatgcgctcctcagggacacaaaggccgagtggggtaaaaccacgaagggagggaagggaagtcagctctgggagcagccctcactggctggaccaaggtactcttcctggagtttgccgtgttagcaaccacagtcaccttgcagtcaggctggaatcttgggccaccccacagtgctttgctgtaggatttagacggggatgaagtgccctccagcctcagagctagccacaaagcccccagagctgaattcattgagtatttgtgcctagggcttgggctgtttgtgtgataccggccccccgacagacaataggctgtgatgacaccccagtctacttccccgatcctgggctccctcttgattagtaggtgacattttccactgtcaggcatcactggggctagtccggcagcgacctagatggggtccacccccattcctgctcaagcatgggcacctaccacatggtttctgctgctcagcctgactgcaactcacctcgaaggcggaccagcctgcctctgtgatgactgcagaagacctccttgggtgtaccaatgcccctcatctcccactttcacacctaaccctgactccttcaccaagaagacgggagtcggcagccaggagttcccgtggcacctctctctcttcgtggctccctgcttcccccttccctctttccgaggaagggtcaacctattctctctcaaaaccaacccctaggccaattgcctggatctcctcccctctcccttctttaaacgagcttgcctccctcctgccaagtttgagggcaaggctaagaaatgtcagccacggaaacaactctaatatctggtgactttgggtaatgtgaatcagtgcctgaggacctttgctgtgtccttggtacagaaccatccacttgacctaactacctcccctggccgcgctctcgctcttctcttctttgttaagccaacaactatcaccctctcctactcttctttctccctgccccctggagggcactgtgtttggttgtgcaaatgtatttactatgcgtgtttccagcagttggcattaaagtgcctttttctaataaaatcagtttattatgaccaaaaaaaaaaaaaaaaggaattc

SEQ ID NO: 2365 - DNA, 2898 bp, Homo sapiens
gattcccgatggagctggccccttcgtggcgaccacaagtcctatcacgccacaagaatctcggcttgttcacctacaaatgaaggccgacgatacttgcagaccgagtctgacatctatgggaccccactcctaccctgcgcctcaggggccgggacaaccgtgacccgtaccgactcctcgcgcctccgggatcaacctcagacccctgtgggctcccggggaagacgcatgcgcactgctccctcctcgtctccttcccttcgttaattagtccatcgcatttcaagtgctggatcctttttgtcccctactgcgtgcggtggcagcttccttgcggaagtggtgaccgtgagagaagaagatggcggcccctgtagtggcgccgcctggtgtggtggttagtcgggctaacaagcgcagcggcgcggggccgggaggcagcggtggcgggggagccagaggggcggaggaggaaccgccgccgcccctacaagcagttctggtggccgatagcttcgatcgccgcttcttccccatctccaaggaccagcctcgggtcctcttgcccctggccaatgtggcattaattgactacactctggaattcctgactgccacaggtgtacaggaaacatttgtcttttgttgctggaaagctgctcaaatcaaagaacatttactgaagtcaaagtggtgccgccctacatctctcaatgtggttcgaataattacatcagagctctatcgatcactgggagatgtcctccgtgatgttgatgccaaggctttggtgcgctctgactttcttctggtgtatggggatgtcatctcaaacatcaatatcaccagagcccttgaggaacacaggttgagacggaagctagaaaaaaatgtttctgtgatgacgatgatcttcaaggagtcatcccccagccacccaactcgttgccacgaagacaatgtggtagtggctgtggatagtaccacaaacagggttctccattttcagaagacccagggtctccggcgttttgcatttcctctgagcctgtttcagggcagtagtgatggagtggaggttcgatatgatttactggattgtcatatcagcatctgttctcctcaggtggcacaactctttacagacaactttgactaccaaactcgagatgactttgtgcgaggtctcttagtgaatgaggagatcctagggaaccagatccacatgcacgtaacagctaaggaatatggtgcccgtgtctccaacctacacatgtactcagctgtctgtgctgacgtcatccgccgatgggtctaccctctcaccccagaggcgaacttcactgacagcaccacccagagctgcactcattcccggcacaacatctaccgagggcctgaggtcagcctgggccatggcagcatcctagaggaaaatgtgctcctgggctctggcactgtcattggcagcaattgctttatcaccaacagtgtcattggccccggctgccacattggtgataacgtggtgctggaccagacctacctgtggcagggtgttcgagtggcggctggagcacagatccatcagtctctgctttgtgacaatgctgaggtcaaggaacgagtgacactgaaaccacgctctgtcctcacttcccaggtggtcgtgggcccaaatatcacgctgcctgagggctcggtgatctctttgcaccctccagatgcagaggaagatgaagatgatggcgagttcagtgatgattctggggctgaccaagaaaaggacaaagtgaagatgaaaggttacaatccagcagaagtaggagctgctggcaagggctacctctggaaagctgcaggcatgaacatggaggaagaggaggaactgcagcagaatctgtggggactcaagatcaacatggaagaagagagtgaaagtgaaagtgagcaaagtatggattctgaggagccggacagccggggaggctcccctcagatggatgacatcaaagtgttccagaatgaagttttaggaacactacagcggggcaaagaggagaacatttcttgtgacaatctcgtcctggaaatcaactctctcaagtatgcctataacataagtctaaaggaggtgatgcaggtactgagccacgtggtcctggagttccccctgcaacagatggattccccgcttgactcaagccgctactgtgccctgctgcttcctctgctaaaggcctggagccctgtttttaggaactacataaagcgcgcagccgaccatttggaagcgttagcagccattgaggacttcttcctagagcatgaagctcttggtatttccatggccaaggtactgatggctttctaccagctggagatcctggctgaggaaacaattctgagctggttcagccaaagagatacaactgacaagggccagcagttgcgcaagaatcaacagctgcagaggttcatccagtggctaaaagaggcagaagaggagtcatctgaagatgactgaagtcacactgcctgctcctttgggtgtgattgagtgccctcctggctcctgggctgggacaagtgaggaactagctgcagagggatgagtgaccaccatccaggctgagactgaaaggagcagaggctggaactacagtattctttcccctgctagcaaccatgtgcctcccatcctgactgtggagttgggatgtggaagtggggctggaacaaagcttctgcctagggaggagctaagcaggcccggcagttggaggaaggccagaggaacagctttgtgctccggctttccctcagggaacagcagagagcagttggctctttctgctgcttgtatatgttaatattaaaagagagagtggtgta

SEQ ID NO: 2366 - DNA, 3707 bp, Homo sapiens
ctcacgcgtcgaggtgtagctacatagttatctgtgtacatccacgctggggcatttttctcctgcttaatgaggacttgactcgggagcaagtgtgaatcattgccggggctgggaaaggaggaaggcgcatttaaccccctcccacccctctccatgtccgtgtgtcactcggctcggtccacctggcgcggccggtcgtggggctgctgctgctgttgacgacgacgacgacgacgggggctgcctctgctgtcccgggagtttcctcctgctccggccacacagctcctggggattgttcctcttcgaaccagaacctcggcctgaccggcactttggctccaaaataactttatttttgggggagaaagcacatcacgaaccagtcaaaatcgtggtttatttctgtaacgtgaagacttctgctcttttttctttgtttgtttttttcgtaaacatctgggtgtatatcaaacggcaagatgtccagtaatgtcccggcggatatgataaatttgcgcctcattttggtaagcggaaaaacaaaagagttcctgttttctcctaacgattctgcttctgacattgcaaagcatgtatatgacaattggccaatggactgggaagaagagcaggtcagcagtccaaatattctacgacttatttatcaaggacgatttctacatggaaatgtcacattaggagcattaaaacttccttttggcaaaacaacagtgatgcatttggtggccagagagacattaccagagccaaactctcaaggtcagaggaatcgtgagaagactggagagagtaattgttgtgtaatcctgtaaacactgtctgcctagtgtgatgtgatatagtctttgtctttcatgctgctgggacagaaaagacccgacattgcttcagaaaccgttcagaacagtctgcctgtaaacacatggaactgaattaccacatgaacactgtcatcttttctcatgaaagtaaaaagaaccaagaacatttttcactctgattttttatttcttgtattttttgttgagctgttttaacacatattggtttttgaatgcagtcaatctccaggggaaaagttaacaagttatctttcgtagcagaaaccattttgctgccacaaaattttcatcatcagaactaataaatcaagtgttccaaatacaatttgcactaaaaagattggcattattttcctcatcagcagaatttataacagtgtgtggtatctagaaatacttatatatacaattccacactggaagacactcagcaattaatgaagttaattactgggccaacttgagaggaaaaaatggaaaagaaactaaaatgttgggtgaattctaccaaagtcagccgtggtggctgcactggcacagaatactaaactgagtgtgactattttcactgcaacaaatgaaaaaacaaaatgtgcctgtttaaagcactcagtagagggctgatgaaactaattttttttcctttaagacatgcactcttgagtcctacagtaactgagtgtttgtttagacagcacaagaaggggtgagagtgcgtctcctagccttaatgtgggagggtagtttcagtcactcatcggctttcattattgtgcagaaatattagaaaacctcattgatcaattttatgtatttgaatatcagcaaattgaaattttccataattatcattaatttgtaaccacatccagtgtcatgcttactccttagagttcagatgaattcttaaaattaaaaaaaaactccatagtactaattttgtttctttatatagtttgcgtttgatattagtgcttgcaattgtattaaagtcaaaagctgatttttatggcatacacaagaatgccactttttcttttatttcataccaataatttaaagattgatatgctaaaaacaatttgcacagcactaaagcatgagctactttcatctaaacctgtaaaaatatgaaagatttttatattttttcactgggaagaaattcttcctggatgaaattacaaatatgtgtagaatatatttaataaaagacttataaaatacctaactacaggacttaaaatatagattggcgcgtagtatatagaacaatattccatataaataagtttagcctttataaaaatgaagttgcaggctgacattacattcggtacttactaagtgtcaacagcccttacaaacattaaatgtaaatggtttcaaatggtcagcgttgtttaaatgtaatcatgttattttattcattgttaatgctttgatgaaaaggctttatatgcagtagatctacgaaaatattgttcatactgatcagaattaaatttgtatagagcagagttttaaaatgaatgtaaatagcactaaacgttttctttctgcaacctgtacttacagattcttcctgtaaactaaataaaaaaaaaaatgatagtgcattttggtggtaattttaaaggtcttgattaggtcaataattgtttaagcaccgtctcattcatgttttctactttcatttcttaagcttttaaaattcatttaattaatattctgttgttgttttggggagtattcccaatgtatctttgatatttaacctggttaatttgtggacagtcacaacaatggatagaattatgtagtctccgttatcactaaaatgttatcttcaagagatgttaaatatttatatgctttgttgactagctgaaatatgaattctgttagtgttgactaaagaatctggtagttgcttaattgggcaattaaacaatttatggctctattttgtaaaacaaactactggtaattatttttaatacctattttcattctgattactctttttttaagttaaagactatcagttaattaagattgagtttttatgatggttaaaaataattctctattggtttttcaatatatttttctgtgtgttctcagattatatatttccctcaatttagagtttgctaagtgaaataaactggttcactagtagagaaagaattacgtcgcttaatacctaatatcatagttgtacaatatgaaaaaaagaataaaaagtagcagtaaaattatatactgaaaacaccaaaaatttagatgccttaatagtatatacgtgaaatactcagctgtccctttaaaaataattcattggactgcctggtggttaaaatacgattcctcatatccaaggctacttttgaagatccctctgccaaaaatatagctcacttatctaaaggtgagagctgcatagatccagtaatgtacataaagcctgaatgatgagcctatgtccctgcctaacactggtgtctcactcatctcttttacctaaattgtcctgaactttgttaagtgttctggacaaggccaagcttttctttattaaaacctcagcatgtctccctgatctgaactatttgctttctcttcaagataagttgtattttaccatggaaaaatacagtatctaacattaccattcacgttaaatgaagtttcctcataacatttatctttagttttatgaagtcatcgtgaccaatgttacagtaatttctgttagctgattgtggtaaacaatgtttaatgtgaaaagaaattaaaactttcttcatctgttgtagaaaaaaaaaaaaaaaa

SEQ ID NO: 2367 - DNA, 4406 bp, Homo sapiens
ctttccgacactctttgggaagagaatctctaatgacggcaacagtggagaacctaacgttccagaaggacactttgggaaatgctgttgacaaaaacacatccagattggagctccgttcctactcccttgcacggcgccacggctcgacagagccactcgtcctcgcctggtcatcccagttccggaggctgacctggggatgcgccctggacgccctgcaccgcagtccttgcgtcgctgctagtcagcacggcgttacccacctcatccgcagctccaggacgccgcactccacgcgctgccgcaaggaggacgcgcagcctggtcaccatggaaacggtgccgcctccgtcacggctcaagcgagaggtcaaaggtcagtcctgcaagttccgcttccggttccgagatcctgtttgttttctgaaagctttgtggtttcggtgagctctcagagccgatttctagcgtccgtgccggggacaggtgtccagaggtcgactgctgcagacatggcggcctccaccgcggccgggaagcagcggattcccaaagtggccaaggtgaaaaacaaagccccggctgaggtacagataactgctgaacaactcttaagagaggctaaagaaagagaacttgagcttcttccacctccacctcaacagaagatcacagatgaagaagaattaaatgattataaactaaggaaaaggaagacttttgaagataatataagaaaaaacaggactgtgattagtaactggataaaatacgcacaatgggaagaaagcctaaaggagattcaaagggctcgatccatatacgagcgtgctttagatgtagactaccgaaatattacactctggctgaaatacgcagaaatggaaatgaagaatcgccaagtcaaccatgctcgaaatatctgggaccgggccataacaacgctgcctcgagttaatcagttctggtacaagtacacgtacatggaggaaatgttgggaaacgttgccggtgcccggcaggtgtttgagcgctggatggagtggcagcctgaggagcaagcctggcactcctacatcaactttgagctgagatacaaagaggtggatcgggcccgcaccatttatgagcgatttgtcctcgtgcaccctgatgttaagaactggatcaagtatgcccgctttgaagaaaaacatgcttattttgcccatgcacggaaagtgtatgagagagctgtggaattctttggagatgaacatatggatgagcacctttatgttgcctttgccaagtttgaagaaaatcagaaagagtttgaaagggtacgagtgatttacaagtatgccctggacagaatttcaaaacaagatgcccaagaactctttaaaaattataccatctttgagaagaagtttggtgataggcggggtattgaagatatcattgtgagcaaacggagattccagtacgaagaagaagtgaaggcgaatccacacaattatgatgcatggtttgattacttgcgcttggtagaaagtgacgcagaagctgaagccgtgagagaagtctatgaaagggccattgccaatgtcccacccattcaggagaagaggcactggaagcgctacatttatctttggatcaactatgcactctatgaagaattggaggcaaaggatcctgagaggacaagacaggtgtatcaagcctctttggaactaattcctcacaaaaagttcacatttgccaaaatgtggatactgtatgcacagtttgaaatacgacagaagaatctgtcattagccagaagagcattgggaacttccataggcaaatgtccaaagaacaaattatttaaagtttacatagaattggagctacagcttcgagaatttgacagatgccggaagctttatgaaaagttcctggaatttggacctgaaaattgtacctcatggattaaattcgctgaattagagacaatccttggtgatattgacagagcacgggcaatctatgaattagccatcagtcagccacgtttagacatgccagaggtgctttggaaatcatatattgattttgaaattgagcaggaagaaacagaaagaacacgaaacctttaccggcggttgcttcaacggacgcagcatgtcaaggtatggatcagctttgctcagtttgagttgtcttcaggaaaagaaggaagtttgactaaatgcagacaaatttatgaagaagctaacaaaaccatgcgaaactgtgaagaaaaggaagagagacttatgctgctggaatcttggcgaagttttgaagaagaatttggaacagcttcagataaggagagagtagacaaactcatgccagagaaagtcaagaagagaagaaaggtccagactgatgatgggtctgatgcaggctgggaagaatactttgattacatctttccagaagatgctgccaaccaacctaacctcaaactcctggccatggccaaactgtggaagaaacagcagcaggaaaaggaggatgctgagcaccatccagatgaggacgtcgatgagagtgaatcctgatctttttttcatagacaaatgttttgttatttttataaattaattgtttggaactcttgtgactcctggaagttcttatatatttcaccagtaagaaattgattggtatctttgatggctactttttaagttattttttaaatgctcttgggttagctaggggtagggattgcaagtaaaggacttttttaactgctggatttgtttttccaactgagtccaaacttttctaatgtctgtccacatcatgcattaggaaatgtaattaaggtaacattctacagttacttttcatgtcatacccataaagatagtttatgcattcatctgaaatgtgtaactttttcatgtcttcagagtcacagacttgagttcatttcccagctctgccactcatgattatataacttaattttcattttcctcattcacaaaatgggccaatagtttgacagctcattttgaagattacattataaaaggaatatacctggtgggtgcatagtaagtgctcagtaaattgtttgttctaagccacttttaaaaatggtttcattccttgtagaattgaatgcgagtggattaataatttaccttactttcttactagtgtccagttatattgttttttagaacaacacttggaaaataatttgcagtgattatatttctgaacaaggttcagaaaacattgtttactaagaatttagtctaataatttcagttaggcgctcatcagttctccagagtggttgagtttgtaataccttgtttaaagaataatggcttgttcacgtgtgtgctatgaaaaatgatgtcccatgttcacataaatttgggaaattctggactaagacttaagtctcgttaatcaaatctctttatagttaggcttctgtacattatgtatctccagtagcaatgttgccatattatttatttcccaaacttagtggacaatggagtcatttctacctagagtaccagtaaacatctcccagtgtgctatagtagaaaatgtctactcctcactgctgacatgttaaacttactcttggtttagagcatgtgtagaaacacctaaggtagctctatgctaaataatgaagagtagcacaagaatgaatgtatttgctgatacgttgctcacattctcaagcaaaaattcaactgcattaaccgatctgagagttttcctttaacctggactgtgtttctcaagcacattttttctttgttcactgcccaaggactagaactgtatttttaaggttgttttcccctaaaaggacctttagtaagcaaatttattattaaatgtgcacatcttattcacccaagggaataaaagctacttcgtaatgttgttactaaattttatcttgaaaataaataacagtgtttgaggacagaagaaactaggactgttgttgagataaaatctgttttcagcctgactgctttagtcactggacgagcatcagctactgcggtgtcagatcacttctcgagtagaggtctgcctagtgagtgagcaggagaacatcatcttaatagcctttggctcacccagagtcagggagagatgaaaataataggtcagaatgcaagtgacttaatcacagtcttcctagaattatctgtttatgttgcatgaatgcataagaaaaaaattctgtcatgttcccaaggtagaattgtaataagcatgtgccagtgtgaaagctggaaggaaaaaagctattctctaacaggagaacataaagattcatttctctcccaccctcaactccaccaaagtaaatcctttcgatagtaaaagtttaa

SEQ ID NO: 2368 - DNA, 1849 bp, Homo sapiens
cgccgctctgggagccgctgctggtcccggccttgcggcctgcgggggaggctgcccggaggaggcagcggcggcggcagcgcgtcctcggtccccaggaccacggcttctttcctgccagatctatccatctggccatccatccgtgggggtctgcaatggccacctttagccgccaggaatttttccagcagctactgcaaggctgtctcctgcctactgcccagcagggccttgaccagatctggctgctccttgccatctgcctcgcctgccgcctcctctggaggctcgggttgccatcctacctgaagcatgcaagcaccgtggcaggcgggttcttcagcctctaccacttcttccagctgcacatggtttgggtcgtgctgctcagcctcctgtgctacctcgtgctgttcctctgccgacattcctcccatcgaggcgtcttcctatccgtcaccatcctcatctacctactcatgggtgagatgcacatggtagacaccgtgacatggcacaagatgcgaggggcacagatgattgtggccatgaaggcagtgtctctgggcttcgacctggaccggggcgaggtgggtacggtgccctcgccagtggagttcatgggctacctctacttcgtgggcaccatcgtcttcgggccctggatatccttccacagctacctacaagctgtccaaggccgcccactgagctgccggtggctgcagaaggtggcccggagcctggcactggccctgctgtgccttgtgctgtccacttgcgtgggcccctacctcttcccgtacttcatccccctcaacggtgaccgcctccttcgcaagtggctgcgagcctacgagagtgctgtctccttccacttcagcaactattttgtgggctttctttccgaggccacggccacgttggcgggggctggctttaccgaggagaaggatcacctggaatgggacctgacggtgtccaagccactgaatgtggagctgcctcggtcaatggtggaagttgtcacaagctggaacctgcccatgtcttattggctaaataactatgttttcaagaatgctctccgcctggggaccttctcggctgtgctggtcacctatgcagccagcgccctcctacatggcttcagtttccacctggctgcggtcctgctgtccctggcttttatcacttacgtggagcatgtcctccggaagcgcctggctcggatcctcagtgcctgtgtcttgtcaaagcggtgcccgccagactgttcgcaccagcatcgcttgggcctgggggtgcgagccttaaacttgctctttggagctctggccatcttccacctggcctacctgggctccctgtttgatgtcgatgtggatgacaccacagaggagcagggctacggcatggcatacactgtccacaagtggtcagagctcagctgggccagtcactgggtcacttttggatgctggatcttctaccgtctcataggctgaggcacatctgtggaccctcataaccctcttaagacccctctcagggtgccactgatgggggatgagggaaggccctctctctactccttgaccccctccatccttgacccccaacacctcaacacacacacacacacacacacacaaaatcacaccattttcatgcctgtcaatccccaccccaccacaaggcaggaagggggtggtgcctgctggggcctagagggggatgcttggggaaacagagaaggggagatccagggcctccccgccttccttcttcctttttatatacaatttgttattgtcaaataaaagtaggaaatattcaataggct

SEQ ID NO: 2369 - DNA, 1867 bp, Homo sapiens
cgccgctctgggagccgctgctggtcccggccttgcggcctgcgggggaggctgcccggaggaggcagcggcggcggcagcgcgtcctcggtccccaggaccacggcttctttcctgccagatctatccatctggccatccatccgtgggggtctgcaatggccacctttagccgccaggaatttttccagcagctactgcaaggctgtctcctgcctactgcccagcagggccttgaccagatctggctgctccttgccatctgcctcgcctgccgcctcctctggaggctcgggttgccatcctacctgaagcatgcaagcaccgtggcaggcgggttcttcagcctctaccacttcttccagctgcacatggtttgggtcgtgctgctcagcctcctgtgctacctcgtgctgttcctctgccgacattcctcccatcgaggcgtcttcctatccgtcaccatcctcatctacctactcatgggtgagatgcacatggtagacaccgtgacatggcacaagatgcgaggggcacagatgattgtggccatgaaggcagtgtctctgggcttcgacctggaccggggcgaggtgggtacggtgccctcgccagtggagttcatgggctacctctacttcgtgggcaccatcgtcttcgggccctggatatccttccacagctacctacaagctgtccaaggccgcccactgagctgccggtggctgcagaaggtggcccggagcctggcactggccctgctgtgccttgtgctgtccacttgcgtgggcccctacctcttcccgtacttcatccccctcaacggtgaccgcctccttcgcaacaagaaacgcaaagccaggtggctgcgagcctacgagagtgctgtctccttccacttcagcaactattttgtgggctttctttccgaggccacggccacgttggcgggggctggctttaccgaggagaaggatcacctggaatgggacctgacggtgtccaagccactgaatgtggagctgcctcggtcaatggtggaagttgtcacaagctggaacctgcccatgtcttattggctaaataactatgttttcaagaatgctctccgcctggggaccttctcggctgtgctggtcacctatgcagccagcgccctcctacatggcttcagtttccacctggctgcggtcctgctgtccctggcttttatcacttacgtggagcatgtcctccggaagcgcctggctcggatcctcagtgcctgtgtcttgtcaaagcggtgcccgccagactgttcgcaccagcatcgcttgggcctgggggtgcgagccttaaacttgctctttggagctctggccatcttccacctggcctacctgggctccctgtttgatgtcgatgtggatgacaccacagaggagcagggctacggcatggcatacactgtccacaagtggtcagagctcagctgggccagtcactgggtcacttttggatgctggatcttctaccgtctcataggctgaggcacatctgtggaccctcataaccctcttaagacccctctcagggtgccactgatgggggatgagggaaggccctctctctactccttgaccccctccatccttgacccccaacacctcaacacacacacacacacacacacacaaaatcacaccattttcatgcctgtcaatccccaccccaccacaaggcaggaagggggtggtgcctgctggggcctagagggggatgcttggggaaacagagaaggggagatccagggcctccccgccttccttcttcctttttatatacaatttgttattgtcaaataaaagtaggaaatattcaataggct

SEQ ID NO: 2370 - DNA, 1743 bp, Homo sapiens
atctatccatctggccatccatccgtgggggtctgcaatggccacctttagccgccaggaatttttccagcagctactgcaaggctgtctcctgcctactgcccagcagggccttgaccagatctggctgctccttgccatctgcctcgcctgccgcctcctctggaggctcgggttgccatcctacctgaagcatgcaagcaccgtggcaggcgggttcttcagcctctaccacttcttccagctgcacatggtttgggtcgtgctgctcagcctcctgtgctacctcgtgctgttcctctgccgacattcctcccatcgaggcgtcttcctatccgtcaccatcctcatctacctactcatgggtgagatgcacatggtagacaccgtgacatggcacaagatgcgaggggcacagatgattgtggccatgaaggcagtgtctctgggcttcgacctggaccggggcgaggtgggtacggtgccctcgccagtggagttcatgggctacctctacttcgtgggcaccatcgtcttcgggccctggatatccttccacagctacctacaagctgtccaaggccgcccactgagctgccggtggctgcagaaggtggcccggagcctggcactggccctgctgtgccttgtgctgtccacttgcgtgggcccctacctcttcccgtacttcatccccctcaacggtgaccgcctccttcgcaagggcaccatggtaaggtggctgcgagcctacgagagtgctgtctccttccacttcagcaactattttgtgggctttctttccgaggccacggccacgttggcgggggctggctttaccgaggagaaggatcacctggaatgggacctgacggtgtccaagccactgaatgtggagctgcctcggtcaatggtggaagttgtcacaagctggaacctgcccatgtcttattggctaaataactatgttttcaagaatgctctccgcctggggaccttctcggctgtgctggtcacctatgcagccagcgccctcctacatggcttcagtttccacctggctgcggtcctgctgtccctggcttttatcacttacgtggagcatgtcctccggaagcgcctggctcggatcctcagtgcctgtgtcttgtcaaagcggtgcccgccagactgttcgcaccagcatcgcttgggcctgggggtgcgagccttaaacttgctctttggagctctggccatcttccacctggcctacctgggctccctgtttgatgtcgatgtggatgacaccacagaggagcagggctacggcatggcatacactgtccacaagtggtcagagctcagctgggccagtcactgggtcacttttggatgctggatcttctaccgtctcataggctgaggcacatctgtggaccctcataaccctcttaagacccctctcagggtgccactgatgggggatgagggaaggccctctctctactccttgaccccctccatccttgacccccaacacctcaacacacacacacacacacacacacaaaatcacaccattttcatgcctgtcaatccccaccccaccacaaggcaggaagggggtggtgcctgctggggcctagagggggatgcttggggaaacagagaaggggagatccagggcctccccgccttccttcttcctttttatatacaatttgttattgtcaaataaaagtaggaaatattcaataggct

SEQ ID NO: 2371 - DNA, 1761 bp, Homo sapiens
atctatccatctggccatccatccgtgggggtctgcaatggccacctttagccgccaggaatttttccagcagctactgcaaggctgtctcctgcctactgcccagcagggccttgaccagatctggctgctccttgccatctgcctcgcctgccgcctcctctggaggctcgggttgccatcctacctgaagcatgcaagcaccgtggcaggcgggttcttcagcctctaccacttcttccagctgcacatggtttgggtcgtgctgctcagcctcctgtgctacctcgtgctgttcctctgccgacattcctcccatcgaggcgtcttcctatccgtcaccatcctcatctacctactcatgggtgagatgcacatggtagacaccgtgacatggcacaagatgcgaggggcacagatgattgtggccatgaaggcagtgtctctgggcttcgacctggaccggggcgaggtgggtacggtgccctcgccagtggagttcatgggctacctctacttcgtgggcaccatcgtcttcgggccctggatatccttccacagctacctacaagctgtccaaggccgcccactgagctgccggtggctgcagaaggtggcccggagcctggcactggccctgctgtgccttgtgctgtccacttgcgtgggcccctacctcttcccgtacttcatccccctcaacggtgaccgcctccttcgcaacaagaaacgcaaagccaggggcaccatggtaaggtggctgcgagcctacgagagtgctgtctccttccacttcagcaactattttgtgggctttctttccgaggccacggccacgttggcgggggctggctttaccgaggagaaggatcacctggaatgggacctgacggtgtccaagccactgaatgtggagctgcctcggtcaatggtggaagttgtcacaagctggaacctgcccatgtcttattggctaaataactatgttttcaagaatgctctccgcctggggaccttctcggctgtgctggtcacctatgcagccagcgccctcctacatggcttcagtttccacctggctgcggtcctgctgtccctggcttttatcacttacgtggagcatgtcctccggaagcgcctggctcggatcctcagtgcctgtgtcttgtcaaagcggtgcccgccagactgttcgcaccagcatcgcttgggcctgggggtgcgagccttaaacttgctctttggagctctggccatcttccacctggcctacctgggctccctgtttgatgtcgatgtggatgacaccacagaggagcagggctacggcatggcatacactgtccacaagtggtcagagctcagctgggccagtcactgggtcacttttggatgctggatcttctaccgtctcataggctgaggcacatctgtggaccctcataaccctcttaagacccctctcagggtgccactgatgggggatgagggaaggccctctctctactccttgaccccctccatccttgacccccaacacctcaacacacacacacacacacacacacaaaatcacaccattttcatgcctgtcaatccccaccccaccacaaggcaggaagggggtggtgcctgctggggcctagagggggatgcttggggaaacagagaaggggagatccagggcctccccgccttccttcttcctttttatatacaatttgttattgtcaaataaaagtaggaaatattcaataggct

SEQ ID NO: 2372 - DNA, 1778 bp, Homo sapiens
cgccgctctgggagccgctgctggtcccggccttgcggcctgcgggggaggctgcccggaggaggcagcggcggcggcagcgcgtcctcggtccccaggaccacggcttctttcctgccagatctatccatctggccatccatccgtgggggtctgcaatggccacctttagccgccaggaatttttccagcagctactgcaaggctgtctcctgcctactgcccagcagggccttgaccagatctggctgctccttgccatctgcctcgcctgccgcctcctctggaggctcgctgcacatggtttgggtcgtgctgctcagcctcctgtgctacctcgtgctgttcctctgccgacattcctcccatcgaggcgtcttcctatccgtcaccatcctcatctacctactcatgggtgagatgcacatggtagacaccgtgacatggcacaagatgcgaggggcacagatgattgtggccatgaaggcagtgtctctgggcttcgacctggaccggggcgaggtgggtacggtgccctcgccagtggagttcatgggctacctctacttcgtgggcaccatcgtcttcgggccctggatatccttccacagctacctacaagctgtccaaggccgcccactgagctgccggtggctgcagaaggtggcccggagcctggcactggccctgctgtgccttgtgctgtccacttgcgtgggcccctacctcttcccgtacttcatccccctcaacggtgaccgcctccttcgcaagtggctgcgagcctacgagagtgctgtctccttccacttcagcaactattttgtgggctttctttccgaggccacggccacgttggcgggggctggctttaccgaggagaaggatcacctggaatgggacctgacggtgtccaagccactgaatgtggagctgcctcggtcaatggtggaagttgtcacaagctggaacctgcccatgtcttattggctaaataactatgttttcaagaatgctctccgcctggggaccttctcggctgtgctggtcacctatgcagccagcgccctcctacatggcttcagtttccacctggctgcggtcctgctgtccctggcttttatcacttacgtggagcatgtcctccggaagcgcctggctcggatcctcagtgcctgtgtcttgtcaaagcggtgcccgccagactgttcgcaccagcatcgcttgggcctgggggtgcgagccttaaacttgctctttggagctctggccatcttccacctggcctacctgggctccctgtttgatgtcgatgtggatgacaccacagaggagcagggctacggcatggcatacactgtccacaagtggtcagagctcagctgggccagtcactgggtcacttttggatgctggatcttctaccgtctcataggctgaggcacatctgtggaccctcataaccctcttaagacccctctcagggtgccactgatgggggatgagggaaggccctctctctactccttgaccccctccatccttgacccccaacacctcaacacacacacacacacacacacacaaaatcacaccattttcatgcctgtcaatccccaccccaccacaaggcaggaagggggtggtgcctgctggggcctagagggggatgcttggggaaacagagaaggggagatccagggcctccccgccttccttcttcctttttatatacaatttgttattgtcaaataaaagtaggaaatattcaataggct

SEQ ID NO: 2373 - DNA, 5118 bp, Homo sapiens
ggggtttcggcggccgggagggagttgtcggcgccgcggccgctgcggacggacgctcgcctgccggctgaggaaaaagaagcaactaacaaaacactgtgataataaggattattcagtatgcagtttgcaggatatccatgacgacattgaaaatgaattttttgtattcaccagatattcttatatgagaagatctattttaaacagtctaaatattttttcttctgttggaccagcatggcaggatttaagcgagggtatgatggaaagattgctggattatatgatctggataaaaccttgggtcgaggccattttgccgtggttaaacttgccaggcatgtctttacgggtgaaaaggtggcagtaaaagttattgacaagacaaaactggacactctagctactggtcatcttttccaggaagtgagatgcatgaaactagtgcagcatcctaacatcgtccgcctttatgaagttattgacacccagaccaaactatatcttattctagaacttggggatgaaggagatatgtttgattatataatgaaacatgaggagggtcttaatgaagacttgcccaagaagtattttgctcagatagttcatgctatatcttattgccataaactccatgtggttcacagagacttaaaaccagagaatgtagtcttctttgaaaaacaaggtcttgtaaagttgacagactttgggttcagcaacaaatttcaaccagggaagaagctcactacaagctgtggatctcttgcatattccgctccagaaattctgcttggtgatgagtatgatgcacctgcagtagatatttggagtctgggagtgatccttttcatgttggtgtgtgggcagccgccctttcaagaagccaatgacagtgaaacactgacaatgatcatggattgcaaatatacagtaccatcccatgtgtctaaagagtgtaaagacctaatcacacggatgctacagagagatcccaagagaagggcttctttagaagagattgaaaatcatccttggcttcagggagtggacccttcaccagctacaaagtataacattccccttgtgtcatacaaaaatctctcggaagaggagcacaacagcatcattcagcgcatggtgcttggggacatagcggatcgagacgccattgtagaagccctggaaaccaacaggtataaccatatcacagccacatacttcctgctggctgaaaggatcctgagagaaaagcaagagaaagaaatacagaccagatctgcaagcccgagcaatatcaaggcccagtttaggcagtcatggccaaccaaaattgatgtaccccaggaccttgaggatgacctcacggccactcctttgtcccacgcgactgtccctcagtctcctgctcgggctgctgacagtgtcctcaatggccacaggagcaaaggcctgtgtgactcagctaagaaagatgacctccctgagttggctggaccagcactctctacggtgccacccgcaagcttaaaacccacagccagtgggcggaagtgtctgttcagggtggaagaagatgaagaggaagatgaggaggacaagaaacccatgtccctctcaacacaagtggttttgcgccggaagccatctgtaaccaaccgcctgacatccaggaagagtgcgcccgtcctcaaccagatctttgaggaaggggaatctgatgatgagtttgacatggatgagaatctgcctcccaagttgagcaggttaaagatgaatatagcttctccaggtacagttcacaaacgctaccaccggaggaaaagtcagggccggggctccagctgcagtagttcggagaccagtgatgatgattctgaaagccggcggcggctcgataaagatagcgggttcacctactcctggcaccgacgggatagcagcgaggggccccctggcagtgagggggatggcgggggccagagcaagccgagcaatgccagtggaggggtggacaaggccagccccagtgagaacaatgctggtgggggcagtccctccagcggctcgggtggcaaccccaccaatacatcgggtaccacacgccgctgtgccggccccagcaactccatgcagctggcctctcgcagtgctggggagctcgttgagagcctcaaactcatgagcctctgcctcggctcccagcttcatgggagcaccaagtacattattgatccacagaatggcttgtcattttccagtgtgaaagtccaagagaaatctacgtggaaaatgtgcattagctccacagggaatgcagggcaggtccctgcagtgggcggcataaagtttttctctgaccacatggcagataccaccactgaattggaacggataaagagcaagaacctgaaaaataacgtgctgcagctacctctgtgcgaaaagaccatctctgtgaacatccagcggaaccctaaggaggggctgctgtgcgcatccagcccagccagctgttgccatgtcatctgactgtggccccatctggccgctagcacgcttcctgctcagagcagtgaagaccggctcacttcactgttccatttggttttactattttaaagtgggcgttaggagcaattatttattacctttccatttgttcgcctgatgatgtgacaatgcatggtctttgtgcatgctgctagacacttttctttcccagccgaaaagcctattatgtaatttttacattcataattttaatgtggatgatcaggattaaatcaagatatatatctggaacctcttataaatggagcacttagaaatttgttgttctgcacttaacctagagagagaaaaaatgcttttctttgtgaaaaatctgaattcctgtcctgaccttctgtgatgtggaaaccctaggctctgagacacactctctggtgtctgagacagaaccaaagcaataacgttgtgatgcccacaggcctggagccagctagcgaccttgtgccgcccagctgtccatggcccgtgcagagcagaggacagtgagtgtctgcactgagaaccttaaaccacagttgaacatacccacacctgtttgtcttaagctatagtgtaaaaacaaagtttgggctctgaaaatttaactgaaaaagatttccttgtttttgtaataggtgagataaagtacttagatttataaggcagcttcccctgtagtgataaattacaagcagacaatcttattttgtaatgtgatgaagtgatgatgtcttaactctacttagagagtgtatgtctgtctaacagaacaaaaagatgctctgtgtaaattccttcctgtagggcacactgcaggatttccatgtagatagaagaactatagggcctagtacagaaggtgcacacaaatgttggcaaagtcaaaccccatgaattaaaacctactggaatttggtttttaggagtttggtaattagattatctcttttgttattttcattcagttatatcctttggctcagctagctttgaaattggctgatgaaaaaatatacataaaagggtaaaattcacacatacagcaaacaaaaatgcacaaagcctgcttcgtaacttttttttctggaattgtttttcactttgcctttttctgccaaaacaataatcaaagaactcttgctttaacctattcctgtacaaagactgtttttgaccagataatcatctgttgtggcattctatcttgtaggacactgtatattgcaaattgctgattatggaaggggccagttgctgttttttcatgcagtgccctgggagtcttaaaagcagtgcttagcaacattggtgatagcatgtggctgggacccagggcccttccccactcttcagccccgagtcatgtgtctgaggtgacggactgagacgcatctggtcctgtaattcagagagtgggcacatcaccaaagaactgcattgctgtggtcactgtttcttcaagtacacactgactctgctactttaggataaatatattttactcagaactctgaatttcacagtatacttactaaactaagtaaaaatgatacttaaaatacttattttactttctagacctaggctagatgttttaagctacagctctagttcattgtgatatttataatttgaaagctatgagaatagatgtgtgggtgaagccatagaacatatttgcttgaaattcttgagcagggatcttataaagggccagaaataagatgtgtggttcacatagatagtgagcgtaacatctgtattaaacataggagagaagtttataaagggcattggcaataaactctttgttgcagctgttttccaagcagtgtaaatactttttcctgtgattatgtatagccttggaatggcaccttttaactaacccatatgtgtttggtttcaatggttttttatattcagatgtatatatggtgctcactttaggatcagcagtgttgaccatttatgctgcatagctgtattatagccttattagttgtgtggttgacccttggggtatacaaatgtcagtctgagtggtgtcttactcctttgtttataagtgaatgattgtgcatgttttgtatgtcatagtatgtcgtcacataaaagggagggagcgaaaaaccattacattaagataatattggaccaaactacttacttgctctaaacagttacttgtaccccttaacctgtcttcaaaagttgcatatagttacagtagtgtataaattaaatattgtggaaaaacagtcttgtatttttctgtatgtgtgtatatatatataattatgtacttctggcaattctatctgtatttaaagatgtgacaatcttgacaccaattttaagaatagctgtgagaccgaattaaagataatccctaccaagtgaaaattgatgtgtgttaagagggtacagaattatcaactgatttggtcagttgcttccaatgctggttgatttccctcattgtgtaaacattgacaggtatgtgacaaatgggaaaaaaaatccaaataataaagtgacatattggtgttcagcaat

SEQ ID NO: 2374 - DNA, 2649 bp, Homo sapiens
cttttcttttttttttgacagggtctcactctgttgcccaagctggggtgcagtggcacgatcttggctcactgtagccttgacatcctgggctcaagggatcctcccatctcagcctcccaagtagctgcgactatgggtgtgacaccacgctgggctagtttttcaattttttgtagagatggagtctccctatgttgctcaggccggttgcgaactcctgggctcaagtgattctcctgcctcagcctcccaaagtgctgggattacagatgatagccacctcacccggcccacccctaccttctgaaagaggcattcttattcttattcccattttgcagatcaggaaacagagctcagtgcagcccactaaattgctcagggccctacagctaacaagcggcagaggcaggatctgcactcaggagctgcttggagatgctgctgtggccactgctgctgctgctgctgctgctgccaacattggccctgctcaggcagcagcggtcccaggatgccaggctgtcctggcttgctggcctccagcaccgagtggcatggggggccctggtctgggcagccacctggcagcgccggaggctggagcagagcacgctccatgtgcaccagagccagcagcaggccctgaggtggtgtctacagggagcccagcgcccccactgttccctcagaaggagcacagacataagcaccttccggaatcatctccctctgaccaaggccagccagacccagcaggaagacagtggagagcagccactgcccccgacctcaaaccaggaccttggggaggcctctctgcaggccaccttgctgggtctggcagccctaaacaaggcctacccagaagtgctggctcagggacgcactgcccgtgtgacgctcacatccccttggccccgacccctgccttggcctgggaataccctgggccaggtgggcacccctggaaccaaggaccctagggccctgctgctggacgcactgaggtccccagggctgagggcactggaggctgggacggctgtcgaacttctggatgttttcttgggcctggagactgatggtgaagagctagctggggcgatagctgccgggaaccctggagcgcctctccgtgaacgggcagctgagctccgggaggccctagagcaggggccacggggactggcccttcggctctggccaaagctgcaggtggtggtgactctggatgcaggaggccaggccgaggctgtggctgccctcggggccttgtggtgccaaggactagccttcttctctcctgcttatgctgcctcgggaggggtgctgggcctaaacctacagccagagcagccccatgggctctaccttctgccccctggggccccctttatcgagctgctcccagtcaaggaaggcacccaggaggaagctgcctccaccctccttttggccgaggcccagcagggcaaggagtatgagctggtgctgacggaccgcgccagcctcaccaggtgccgcctgggtgatgtggtgcgagtggttggtgcctacaatcagtgtccagtcgtcaggttcatctgcaggctggaccagaccctgagtgtgcgaggggaagatattggtgaagacctgttctctgaggccctgggccgggcagtggggcagtgggcgggggccaagctgctggaccatggctgtgtggagagcagcattctggattcctctgcgggctctgctccccactacgaggtgtttgtggcgctgagggggctgaggaatctgtcagaggaaaatcgagacaagctggaccactgccttcaggaagcctctccccgctacaagtccctgcggttctggggcagcgtgggccctgccagagtccacctggtggggcagggagccttccgagcactccgggcagccctcgctgcctgcccctcctcccccttcccccctgcgatgccccgggtccttcggcacaggcacctggcccagtgtctgcaggagagggtggtgtcctgagtcaagtcctgccccaccgcccagctccccccagaggccacctcgcccctccctctgggacctctccggatggggagtccttggccagggtctctgactctgtgtcacctgacatttgcccatgagagccgctgggccttagagaggccttggcccagctgaccggttctgaagtatgggcctccggggttagcagatgccagcagtgcctgcccgtgtccccatgtcccggcatgaaggacactgctagagagttaccatgcacaccgatggtttcctgtatcacagcccaaagaggttctctggtggccacagctgtgtgctcagtcagtgcactgggcaagctagaagtgttggggggttaatgtccccaggagcagcaaccctgagtcaataaggagcaggacctcagcttcattgtccttgagcaggacaattctgaagtgtattctacataaactctcagaggatgcccagcaggatggagtcccagttgcccgcagcagtaacccactcattcatgtacttcctgcgggggctctcccttccctctcttccccactcccccgccttgggcttcctgggatggctcccaaataaacctcttgcacccag

SEQ ID NO: 2375 - DNA, 2188 bp, Homo sapiens
agacaggggtagtgcgaggccgggcacagccttcctgtgtggttttaccgcccagagagcgtcatggacctggggaaaccaatgaaaagcgtgctggtggtggctctccttgtcattttccaggtatgcctgtgtcaagatgaggtcacggacgattacatcggagacaacaccacagtggactacactttgttcgagtctttgtgctccaagaaggacgtgcggaactttaaagcctggttcctccctatcatgtactccatcatttgtttcgtgggcctactgggcaatgggctggtcgtgttgacctatatctatttcaagaggctcaagaccatgaccgatacctacctgctcaacctggcggtggcagacatcctcttcctcctgacccttcccttctgggcctacagcgcggccaagtcctgggtcttcggtgtccacttttgcaagctcatctttgccatctacaagatgagcttcttcagtggcatgctcctacttctttgcatcagcattgaccgctacgtggccatcgtccaggctgtctcagctcaccgccaccgtgcccgcgtccttctcatcagcaagctgtcctgtgtgggcatctggatactagccacagtgctctccatcccagagctcctgtacagtgacctccagaggagcagcagtgagcaagcgatgcgatgctctctcatcacagagcatgtggaggcctttatcaccatccaggtggcccagatggtgatcggctttctggtccccctgctggccatgagcttctgttaccttgtcatcatccgcaccctgctccaggcacgcaactttgagcgcaacaaggccatcaaggtgatcatcgctgtggtcgtggtcttcatagtcttccagctgccctacaatggggtggtcctggcccagacggtggccaacttcaacatcaccagtagcacctgtgagctcagtaagcaactcaacatcgcctacgacgtcacctacagcctggcctgcgtccgctgctgcgtcaaccctttcttgtacgccttcatcggcgtcaagttccgcaacgatctcttcaagctcttcaaggacctgggctgcctcagccaggagcagctccggcagtggtcttcctgtcggcacatccggcgctcctccatgagtgtggaggccgagaccaccaccaccttctccccataggcgactcttctgcctggactagagggacctctcccagggtccctggggtggggatagggagcagatgcaatgactcaggacatccccccgccaaaagctgctcagggaaaagcagctctcccctcagagtgcaagcccctgctccagaagatagcttcaccccaatcccagctacctcaaccaatgccaaaaaaagacagggctgataagctaacaccagacagacaacactgggaaacagaggctattgtcccctaaaccaaaaactgaaagtgaaagtccagaaactgttcccacctgctggagtgaaggggccaaggagggtgagtgcaaggggcgtgggagtggcctgaagagtcctctgaatgaaccttctggcctcccacagactcaaatgctcagaccagctcttccgaaaaccaggccttatctccaagaccagagatagtggggagacttcttggcttggtgaggaaaagcggacatcagctggtcaaacaaactctctgaacccctccctccatcgttttcttcactgtcctccaagccagcgggaatggcagctgccacgccgccctaaaagcacactcatcccctcacttgccgcgtcgccctcccaggctctcaacaggggagagtgtggtgtttcctgcaggccaggccagctgcctccgcgtgatcaaagccacactctgggctccagagtggggatgacatgcactcagctcttggctccactgggatgggaggagaggacaagggaaatgtcaggggcggggagggtgacagtggccgcccaaggcccacgagcttgttctttgttctttgtcacagggactgaaaacctctcctcatgttctgctttcgattcgttaagagagcaacattttacccacacacagataaagttttcccttgaggaaacaacagctttaaaagaaaaagaaaaaaaaagtctttggtaaatggcaaaaaaaaaaaaaaaaaa

SEQ ID NO: 2376 - DNA, 3467 bp, Homo sapiens
ggcagggcggcggcggcagcggcgcagctccgctccccgcgcgtctcccttccccgcgcccaggtagggcgctcagcctccgccgccaggatgcggccgcccgcctgctggtggctgctcgcgccgccggcgctgctcgcgctcctcacctgctccctggcttttggtttggcttctgaagatacaaagaaagaggtcaagcagtctcaggatttggagaaaagtggtatatcaaggaaaaatgacatagacttaaaaggaattgtattcgtcatccagagtcaaagtaattcttttcatgcaaagagagcagagcagttaaaaaaaagcatcttaaagcaggctgcagatcttacacaggagctccccagtgtcctcctccttcatcagctggctaaacaagaaggtgcatggaccatacttccgttgttaccgcacttttctgtaacatatagcagaaattcatcttggattttcttctgtgaagaagagacaagaatacagattccaaaactcttggaaaccctcagaagatatgacccctctaaggaatggtttttgggaaaagcattacatgatgaagaagctacaataattcaccattatgccttttccgagaatcctacagtttttaagtatccagactttgctgcaggctgggccttaagtattccacttgtaaacaagcttaccaagagactaaagagtgaatccttgaaatccgactttacaatagatttaaaacatgagattgccctctacatctgggacaaaggcggaggacctcccctgaccccagtgcctgagttttgtaccaatgacgtggacttctactgtgctaccacattccattcttttctaccgctttgtagaaagccagtgaagaagaaggatatttttgttgcagtaaaaacatgcaagaaatttcatggtgacagaatgcctattgttaagcagacttgggagagccaggcaagtctcattgaatactatagtgactatactgaaaattccattcctactgtggatttgggaattcctaatacagatagaggtcattgtggaaagacatttgccattttggaaagatttctgaatcgtagccaggacaaaacagcatggttagtcattgtggatgatgatacattaataagtatctccaggctccagcacttgcttagctgttatgactccggcaagcctgtgtttctgggagagcgctacggctacggcctgggcactggtggctacagctacatcacgggaggaggaggaatggtcttcagcagagaagccgtcaggagacttctcgccagtaaatgtcgatgctacagcaatgatgctcccgatgatatggtcctgggaatgtgctttagtggcttgggaatccctgtgacacacagccctctcttccatcaggctcggccggtggattaccctaaggactacctttctcatcaagttcccatatcgttccacaaacactggaacatcgatccagtgaaggtgtatttcacatggttggcacccagtgacgaagacaaagccaggcaggagacacagaaaggttttcgagaggagttataaatcagggtgacctgtgcgcctagcctgctcagggagtgaactggagactgtggcctcatcccactgtgctgtgctcacaacacttgtgtctgccacatggcattgggtgcttcctgactttagggggagattttatgtatggtattttttgacagaggaagaaaaggggtcacaggagaaacatttttttttctgggaaaaatcacttgcttttgacttatgcagttgttttaacacttagtgatgactgtgtattctccaagctgtgatacagcagtttttttttattgtcacagggaaataaatggtaccagaagtccctttcctgttctgtctcttcattgtaatggaagtttcagttgggcatgagcctggagagatgtgactgtctacagttctatttgtatatataaaaagaggactgaaagtcttttgacatggatattgtgaatggtatgaacttttaaaccatattattgatgatgaaaattatttcctgggaactcagtaggaataataccgtattaaggaataatactgtacataaaacatcatgaaaccctagatatgaaatcccctgaagtctgtaatcatggtggttatgttttgtctattcttttgctgtttgtgcctcataaaaagagaatgaggtcttctgctagagcttcgtattgctttggaagttcatctgtgttttatttctccctgaagccctatctttatggcttacttgtaacatgaaagtagtagatgctgccagaaaatagtgtcctcaatatttaaaacaatgttgacatgttttgttcaagtcagcaagctctatgtgagtctcaggaagtgaattaaatttggaccttatgttttactcttgtttttttttttttttttgaatgttacttaatgactctctcctgactcaggagagaaaccccttgtggaaggacagcatggtgatcaggcaatttctctgggttcccaaagaatgacatttgaacacagtattttgaaacagctctagttttcaaattatatctttaatatatagtaatgtaacatattcagtattaatgtataaaaagcactctaattatataattcagtttttgtaaaggtatttgcataaaatttaatatgtcttaaactaattttggtaaattacttcttttttttctttttaataaaaactgttactcattaactttgcttataatgctttttatagcccagcacagaatttaaagccataccaccaaaagtacctgtgtgtgttaatatgtttttcttgtagcatagattgactatttgcaatagtattagtatttaccatttttccaaattagcaactaccagacctcacgtgttgcagtgataacacaatgcattggattcagttttgtgaaaatggattctgtggccatccaagggatgtatcagggatgatcagctgatgagaggctccagaaggatttctagatcgcttcaagcctatactgatggccttagctttgttcagtcattgtaactgggattgttgtcattgctaccgtggtagtcaccttcatgtcatctataatagtactcctggagagccctggctgcctacaccagtggaaaagagtctccagttctgctctggcctactaactgttaccactgagagaacaacatgttcatttgacatgattgaagctggcatccgtatatgaagatccttgtcaagctttcttctgtggtctgattagtgttgataccggggcacctcctctggtacttttaagtgttttgttatttatgtttactttttggaatggtgtaagcctaaccacaaataaaagatctttgcctaaaaaaaaaaaaaaaaaagaaaaaaaaaaaaaaaa

SEQ ID NO: 2377 - DNA, 3086 bp, Homo sapiens
agttgggctgctggagtgcggcgccaccgcggaggacaggggcagctggcgggcagcgggtgagggggtggcggggacgcgagtggcggccgcggggccccggacaagggtccgcagagctgcagccttcgagggccagccctctccgagtccggggctgggtcccaccagtgacaaggcggcagccccgcgcacaccaaagagaaggcggctgtggcggcagcggcagccccagccatgctgtgttatgtgacgaggccggacgcggtgctgatggaggtggaggtggaggcgaaagccaacggcgaggactgcctcaaccaggtgtgcaggcgactgggaatcatagaagttgactattttggactgcagtttacgggtagcaaaggtgaaagtttatggctaaacctgagaaaccggatctcccagcagatggatgggctagccccttacaggcttaaacttagagtcaagttcttcgtggagcctcatctcatcttacaggagcagactaggcatatctttttcttgcacatcaaggaggccctcttggcaggccacctcttgtgttccccagagcaggcagtggaactcagtgccctcctggcccagaccaagtttggagactacaaccagaacactgccaagtataactatgaggagctctgtgccaaggagctctcctctgccaccttgaacagcattgttgcaaaacataaggagttggaggggaccagccaggcttcagctgaataccaagttttgcagattgtgtcggcaatggaaaactatggcatagaatggcattctgtgcgggatagcgaagggcagaaactgctcattggggttggacctgaaggaatctcaatttgtaaagatgactttagcccaattaataggatagcttatcctgtggtgcagatggccacccagtcaggaaagaatgtatatttgacggtcaccaaggaatctgggaacagcatcgtgctcttgtttaaaatgatcagcaccagggcggccagcgggctctaccgagcgataacagagacgcacgcattctacaggtgtgacacagtgaccagcgccgtgatgatgcagtatagccgtgacttgaagggccacttggcatctctgtttctgaatgaaaacattaaccttggcaagaaatatgtctttgatattaaaagaacatcaaaggaggtgtatgaccatgccaggagggctctgtacaatgctggcgttgtggacctcgtttcaagaaacaaccagagcccttcacactcgcctctgaagtcctcagaaagcagcatgaactgcagcagctgcgagggcctcagctgccagcagacccgggtgctgcaggagaagctacgcaagctgaaggaagccatgctgtgcatggtgtgctgcgaggaggagatcaactccaccttctgtccctgtggccacactgtgtgctgtgagagctgcgccgcccagctacagtcatgtcccgtctgcaggtcgcgtgtggagcatgtccagcacgtctatctgccaacgcacaccagtcttctcaatctgactgtaatctaatctgttgtgcttttgttggacttggcatgtttccatgaactgcactattataaactattaaaatgatagattgtggagaaagtaattattccaacacccatctgccatgcgatgttaaaaaaaaaaaaaaggaagaaaaataacacagctactcctcactgcaaaaacatatccatgcgtagaatcaacaactccagtcatgggaccaggaggagctctgggacgcagacacattccttggatgttgattttttttatgatctagtaaaggaataggtaaagtctttgatgtcagtgaagtggcaacatagccaaaaagttgggtaccttttaggaaatgatgttgtaagtctccttaatgtatcctgaggtaagtttcctactggcagcagattttgtaagaattacttttaagaatttcattctttttgtatggtcatggagctccaaccatttttaataggaaagtcttttgtaaattgttgtcgttttaatgtcatttctgtctttataacttgatcaagaatgattggaaggcaaacaggtttacaaatcaattctgtgacttttaaaaagttgacaatgttgtcagatttaaaccagtgtggctagtaaaaagcagctcactcaatgtgggtggctccctattcctttacgctccccctatccctaccccacaagcctttcgattataaaatactaccaatcttgttataagattactgtggagtagtcaagtactccccgggccttctgagctggtggaatattttatttcagactgaaaacagagagcactctccttgggaagggaaagcggagcttgctgagtgagagatggagcctcatggtgtacaactgagggtagttaactcatcacttctcccaagcactcgatcccagcttcacccactggtgttgctttgcttgaactgttcaagccttttatagccttaccataagtatttagatatggtgtccttttctgtttttggggggggagttttgttgtgtttttttaaagtaagtgcttaagtattaactttgggttgtcccctctgtatgtttcgaaggggttttggttctttttgcttctgttttcttaaacatgttttccactcccacttgggcattttggaagctggtcagctagcaggttttctgggatgtcgggagacctagatgaccttatcgggtgcaatactagctaaggtaaagctagaaacctacactgtcactttactgagatttctgagtatacttttcatattgccttaatgtagcagtaatgtgtttatgcatttgtttctttgcacagacattttgtcaaatattaaaactctacttttttatggcacatattagcatataagcctttattccaagaggtatttattttttcacttgtaaaaaaataatgtttccacgtaaagaactctgttatatcctagaggactctgtcttttatattcgggataataaagactttaaagcaaaaaaaaaaaaaaaaa

SEQ ID NO: 2378 - DNA, 1545 bp, Homo sapiens
gccgaggggggcgtacggaggtggcagctgtgggaggaggcggcgtggaaggccgaggagctcaagcccggaccaatccccacgttccgggccgcgaccctgaccctgcagcgtaccgggaagcgaaaccggccggatgggccgctgagcccgaatcgggcactgtgtggagccccctggagctgagatcaggatgttccgcttcatgagggacgtggagcctgaggatcccatgttcctgatggatccctttgctattcaccgtcagcatatgagccgtatgttgtcaggtggctttggatatagccccttcctcagcatcacagatggcaacatgccagggaccaggcctgccagccgccggatgcagcaggctggagctgtctccccctttgggatgctgggaatgtcgggtggtttcatggacatgtttgggatgatgaatgacatgattggaaacatggaacacatgacagctggaggcaattgccagaccttctcatcttccactgtcatctcctactccaatacgggtgatggtgcccccaaggtctaccaagagacatcagagatgcgctcggcaccaggcgggatccgggagacacggaggactgttcgggattcagacagtggactggagcagatgtccattgggcatcacatccgggacagggctcacatcctccagcgctcccgaaaccatcgcacgggggaccaggaggagcggcaggactatatcaacctggatgagagtgaggccgcagcgtttgatgacgagtggcggcgggagacctcccgattccggcagcagcgtcccctggagtttcggcggcttgagtcctcaggggctgggggacgaagggcggaggggcctccccgcctggccatccagggacctgaggactccccttcccgacagtcccgccgctatgactggtgaggccccgggccctcagcctctcttgtacaggctgagaggctgagaaatcatcccctgaataactttttcctctcgattcccatccccaatttaatattaaattaacaggcaagccggcccccacctctccctgggggtctcagggagaacctttcacggcaccctttccctaccttttccttctttaatctcctggtttaccattgatgacttcgcctctgcatctactgacttgatttttcattctgccactccatcttcaaaccccctcacctttcccatcctactcctgccatgcattgaagggtcaatgcattttggggtgagctctgggtttaggggccccctccatccctcagctaccctggatctttgcccacctcttcctcagagcccccactgaggggccgtagccctatctagggctgtggaaggagcagactggttcctaactctctccctcctcctgcccacacacatcaaaagaatcttccctacacccttctctgcctttattttttgatttgtgcaacttgtaactaggtgtttatggaataaaggagaatggaaaaaagaaaaaaaaaaaaaaaaaaaaaaaaaaaaaa

SEQ ID NO: 2379 - DNA, 2395 bp, Homo sapiens
gccgccgtcggcgcgctgggtgcgggaagggggctctggatttcggtccctcccctttttcctctgagtctcggaacgctccagctctcagaccctcttcctcccaggtaaaggccgggagaggagggcgcatctcttttccaggcaccccaccatgggcaatgcctccaatgactcccagtctgaggactgcgagacgcgacagtggcttcccccaggcgaaagcccagccatcagctccgtcatgttctcggccggggtgctggggaacctcatagcactggcgctgctggcgcgccgctggcggggggacgtggggtgcagcgccggccgcaggagctccctctccttgttccacgtgctggtgaccgagctggtgttcaccgacctgctcgggacctgcctcatcagcccagtggtactggcttcgtacgcgcggaaccagaccctggtggcactggcgcccgagagccgcgcgtgcacctacttcgctttcgccatgaccttcttcagcctggccacgatgctcatgctcttcgccatggccctggagcgctacctctcgatcgggcacccctacttctaccagcgccgcgtctcgcgctccgggggcctggccgtgctgcctgtcatctatgcagtctccctgctcttctgctcgctgccgctgctggactatgggcagtacgtccagtactgccccgggacctggtgcttcatccggcacgggcggaccgcttacctgcagctgtacgccaccctgctgctgcttctcattgtctcggtgctcgcctgcaacttcagtgtcattctcaacctcatccgcatgcaccgccgaagccggagaagccgctgcggaccttccctgggcagtggccggggcggccccggggcccgcaggagaggggaaagggtgtccatggcggaggagacggaccacctcattctcctggctatcatgaccatcaccttcgccgtctgctccttgcctttcacgatttttgcatatatgaatgaaacctcttcccgaaaggaaaaatgggacctccaagctcttaggtttttatcaattaattcaataattgacccttgggtctttgccatccttaggcctcctgttctgagactaatgcgttcagtcctctgttgtcggatttcattaagaacacaagatgcaacacaaacttcctgttctacacagtcagatgccagtaaacaggctgacctttgaggtcagtagtttaaaagttcttagttatatagcatctggaagatcattttgaaattgttccttggagaaatgaaaacagtgtgtaaacaaaatgaagctgccctaataaaaaggagtatacaaacatttaagctgtggtcaaggctacagatgtgctgacaaggcacttcatgtaaagtgtcagaaggagctacaaaacctaccctcagtgagcatggtacttggcctttggaggaacaatcggctgcattgaagatccagctgcctattgatttaagctttcctgttgaatgacaaagtatgtggttttgtaatttgtttgaaaccccaaacagtgactgtactttctattttaatcttgctactaccgttatacacatatagtgtacagccagaccagattaaacttcatatgtaatctctaggaagtcaatatgtggaagcaaccaagcctgctgtcttgtgatcacttagcgaaccctttatttgaacaatgaagttgaaaatcataggcaccttttactgtgatgtttgtgtatgtgggagtactctcatcactacagtattactcttacaagagtggactcagtgggttaacatcagttttgtttactcatcctccaggaactgcaggtcaagttgtcaggttatttattttataatgtccatatgctaatagtgatcaagaagactttaggaatggttctctcaacaagaaataatagaaatgtctcaaggcagttaattctcattaatactcttattatcctatttctgggggaggatgtacgtggccatgtatgaagccaaatattaggcttaaaaactgaaaaatctggttcattcttcagatatactggaacccttttaaagttgatattggggccatgagtaaaatagattttataagatgactgtgttgtaccaaaattcatctgtctatattttatttagggaacatggtttgactcatcttatatgggaaaccatgtagcagtgagtcatatcttaatatatttctaaatgtttggcatgtaaatgtaaactcagcatcaaaatatttcagtgaatttgcactgtttaatcatagttactgtgtaaactcatctgaaatgttacaaaaataaactataaaacaaaaatttgaaaaaaaaaaaaaaaaaa

SEQ ID NO: 2380 - DNA, 1595 bp, Homo sapiens
cccgggccggggcacggagagagccgagcgccgcagccgtgagccgaatagagccggagagacccgagtatgaccggagaagcccaggccggccggaagaggagccgagcgcggccggaaggaaccgagcccgtccgaagggagcggagcgcagcctggcctggggcccggtcgagcccgcgccatggcggccgaggcgacagctgtggccggaagcggggctgttggcggctgcctggccaaagacggcttgcagcagtctaagtgcccggacactaccccaaaacggcggcgcgcctcgtcgctgtcgcgtgacgccgagcgccgagcctaccaatggtgccgggagtacttgggcggggcctggcgccgagtgcagcccgaggagctgagggtttaccccgtgagcggaggcctcagcaacctgctcttccgctgctcgctcccggaccacctgcccagcgttggcgaggagccccgggaggtgcttctgcggctgtacggagccatcttgcagggcgtggactccctggtgctagaaagcgtgatgttcgccatacttgcggagcggtcgctggggccccagctgtacggagtcttcccagagggccggctggaacagtacatcccaagtcggccattgaaaactcaagagcttcgagagccagtgttgtcagcagccattgccacgaagatggcgcaatttcatggcatggagatgcctttcaccaaggagccccactggctgtttgggaccatggagcggtacctaaaacagatccaggacctgcccccaactggcctccctgagatgaacctgctggagatgtacagcctgaaggatgagatgggcaacctcaggaagttactagagtctaccccatcgccagtcgtcttctgccacaatgacatccaggaagggaacatcttgctgctctcagagccagaaaatgctgacagcctcatgctggtggacttcgagtacagcagttataactataggggctttgacattgggaaccatttttgtgagtgggtttatgattatactcacgaggaatggcctttctacaaagcaaggcccacagactaccccactcaagaacagcagttgcattttattcgtcattacctggcagaggcaaagaaaggtgagaccctctcccaagaggagcagagaaaactggaagaagatttgctggtagaagtcagtcggtatgctctggcatcccatttcttctggggtctgtggtccatcctccaggcatccatgtccaccatagaatttggttacttggactatgcccagtctcggttccagttctacttccagcagaaggggcagctgaccagtgtccactcctcatcctgactccaccctcccactccttggatttctcctggagcctccagggcaggaccttggagggaggaacaacgagcagaaggccctggcgactgggctgagcccccaagtgaaactgaggttcaggagaccggcctgttcctgagtttgagtaggtccccatggctggcaggccagagccccgtgctgtgtatgtaacacaataaacaagcttcttcttcccaccctg

SEQ ID NO: 2381 - DNA, 4914 bp, Homo sapiens; identical to SEQ ID NO: 796

SEQ ID NO: 2382 - DNA, 2433 bp, Homo sapiens
atttcacttggaggaaagagagaaggaaggaagctgaggacttagcagggtatcactggacaggccatggctccacggtcccggcgacgaaggcacaagaaacctccctcatcagtggctcccatcatcatggccccaaccacaattgtgacccctgtgcctctgaccccctcaaaacctggccctagcattgacacacttggcttcttctccttggatgataatgttcctggcctatcgcagctgatccttcaaaagctgaacatgaaaagctatgaagaatataagttggtggtagatgggggtacccccgtatcaggctttggatttcgatgtcctcaagaaatgttccagaggatggaagacacatttcgattctgtgctcactgtagagcactccctagtgggctttcagactccaaggttctccggcactgtaagaggtgcagaaatgtctattactgtggtccagagtgccagaagtcagactggcccgcacacaggagggtttgtcaagagcttcgtcttgtggctgtggaccgtctcatggaatggcttctggtcacaggtgattttgttctaccctcaggaccttggccatggccacctgaagctgtacaggactgggactcctggttttctatgaaggggttacacctagatgctacattggatgctgtgctagttagtcatgctgtgaccaccttatgggccagtgtaggacggccaaggccagacccggatgtcctgcagggatctttgaagcggctgctgacagatgtcctgtcacggcccttgactctaggcctaggacttagggccttggggatagatgttaggaggactgggggaagcacagtgcatgtggttggtgcttcccatgtggagacatttcttactcgcccaggggactatgatgagcttggttacatgtttcctgggcaccttggactccgtgtggtcatggtgggtgtagatgtagctactggcttttcacagagcacctcaacttcacccctggaacctggcacaattcagcttagtgcccacaggggcctctaccatgacttctgggaggagcaagtagagaccgggcagacacaccatccagatttggtggcggcattccatccaggttttcattcctccccagacttgatggaggcttggctgcccaccctgctgctacttcgtgactataagattcctacattgattactgtttacagccatcaggagttggtatcctctttgcagattctggtggaactggatacacacatcactgcctttgggtctaatcctttcatgtccctcaaacctgaacaggtctattccagtcccaacaagcagccagtatactgcagtgcatactatatcatgtttcttggaagctcctgtcagctggataataggcaattagaagagaaagtggacggcgggatttaaatagatcataactggacatctggaaaacggggagtttgtgatgaaattaccctgctaatgccaggttcttgcaaactttgaaaaacattatattctaaacctcatttactgtttgggtaaaaattctaagctgaatgagagtttctgtataacataactggtttctttctttttttgagatggagtcttgctctgttgcccaggctggagtgcagcggcatgatctcgactcactgcagcctccgcctcctgggttcaagtggttctcctgcctcagcctccctagtagctgggattacaggtgcacaccaccacacctggctaatttttgtatttttagcagacagggtttcaccatgttggccaggctcgtatcaaacccttgaccccaggtgatctgcctgcctcagcctcccaaagttctgggattacaggcatgagccaccatgcccagccaatgtaactggtttctaagagtttagccacagtagcttctagagataggaaattagatttagtgggtgggaagaggccctgatgctggtctttccagagcttatagttgctaacacttttctttgtaaagaagtttaccttttgactggaaccagatggcactgagaaaaagaatgagaaccaccttattcttctgaaaaagactttcttctcatccagtaatttgggctaaaaaatggaaagatgttgatgacttgaagtgatgcaagaatggacaagtcagggaagtcattgggaacatggatgaggttgtaagcattggtacagtgtcctgtttcctgacttttttgagagaaatgtctacttttcctgttttctcttggggacttttgaccctagagtagccctggtgttatattttagatatcccaagctatatcagactttacctgaatatactggagttacttattatcccccattctataccccaataaactcagtttggggcttcttaaaaaaaaaaaa

SEQ ID NO: 2383 - DNA, 815 bp, Homo sapiens
agagaacctagcggttacgccaacgcgcgcgtgcgcccttgcgcgtttctctcttcccactcgggtttgacctacagccgcccgggagaagatggctgccccagcagtgtccgggctctcccggcaggtgcgatgcttcagtacctctgtggtcagaccatttgccaagcttgtgaggcctcctgttcaggtatacggtattgaaggtcgctatgccacagctctttattctgctgcatcaaaacagaataagctggagcaagtagaaaaggagttgttgagagtagcacaaatcctgaaggaacccaaagtggctgcttctgttttgaatccctatgtgaagcgttccattaaagtgaaaagcctaaatgacatcacagcaaaagagaggttctctcccctcactaccaatctgatcaatttgcttgctgaaaatggtcgattaagcaatacccaaggagtcgtttctgccttttctaccatgatgagtgtccatcgcggagaggtaccttgcacagtgacctctgcatctcctttagaagaagccacactctctgaattaaaaactgtcctcaagagcttcctaagtcaaggccaagtattgaaattggaggctaagactgatccgtcaatcttgggtggaatgattgtgcgcattggcgagaaatatgttgacatgtctgtcaagaccaagattcagaagctgggcagggctatgcgggagattgtctaaaagtgttggttttctgccatcagtgaaaattcttaaacttggagcaacaataaaaagcttccagaacagatcaaaaaaaaaa

SEQ ID NO: 2384 - DNA, 1199 bp, Homo sapiens
ctttaaagggtgactcgtcccacttgtgttctctctcctggtgcagagttgcaagcaagtttatcggagtatcgccatgaagttcgtcccctgcctcctgctggtgaccttgtcctgcctggggactttgggtcaggccccgaggcaaaagcaaggaagcactggggaggaattccatttccagactggagggagagattcctgcactatgcgtcccagcagcttggggcaaggtgctggagaagtctggcttcgcgtcgactgccgcaacacagaccagacctactggtgtgagtacagggggcagcccagcatgtgccaggcttttgctgctgaccccaaaccttactggaatcaagccctgcaggagctgaggcgccttcaccatgcgtgccagggggccccggtgcttaggccatccgtgtgcagggaggctggaccccaggcccatatgcagcaggtgacttccagcctcaagggcagcccagagcccaaccagcagcctgaggctgggacgccatctctgaggcccaaggccacagtgaaactcacagaagcaacacagctgggaaaggactcgatggaagagctgggaaaagccaaacccaccacccgacccacagccaaacctacccagcctggacccaggcccggagggaatgaggaagcaaagaagaaggcctgggaacattgttggaaacccttccaggccctgtgcgcctttctcatcagcttcttccgagggtgacaggtgaaagacccctacagatctgacctctccctgacagacaaccatctctttttatattatgccgctttcaatccaacgttctcacactggaagaagagagtttctaatcagatgcaacggcccaaattcttgatctgcagcttctctgaagtttggaaaagaaaccttcctttctggagtttgcagagttcagcaatatgatagggaacaggtgctgatgggcccaagagtgacaagcatacacaactacttattatctgtagaagttttgctttgttgatctgagccttctatgaaagtttaaatatgtaacgcattcatgaatttccagtgttcagtaaatagcagctatgtgtgtgcaaaataaaagaatgatttcagaaataaaaaaaaaaaaaaaaaaaaaaaaaaaaaaaaaaaaaaaaaaaaaaaaaaaaaaaaaaaaaaa

SEQ ID NO: 2385 - DNA, 3705 bp, Homo sapiens
acggcgcgcggcgagctgagggtggcggcggtcgacatgttccaggtcccggatagcgagggcggccgcgccggctccagggccatgaagcccccaggaggagaatcgagcaatctttttggaagtccagaagaagctactccttccagcaggcctaataggatggcatctaatatttttggaccaacagaagaacctcagaacatacccaagaggacaaatcccccagggggtaaaggaagtggtatctttgacgaatcaacccccgtgcagactcgacagcacctgaacccacctggagggaagaccagcgacatttttgggtctccggtcactgccacttcacgcttggcacacccaaacaaacccaaggatcatgttttcttatgtgaaggagaagaaccaaaatcggatcttaaagctgcaaggagcatcccggctggagcagagccaggtgagaaaggcagcgccagaaaagcaggccccgccaaggagcaggagcccatgcccacagtcgacagccatgagccccggctggggccgcggcctcgctctcacaacaaggtcctgaacccaccgggaggcaaatccagcatctccttctactaagagaagccactgctccacccggagccagaccagaaactcaagagatagggtagccatgttttcatttccttttgcccaaatgagcggggtgggaagagggttagtcttatgtgagcctggctgctcagcgtctcctggccgtcatgacagctgcttggagacccgtgccttccagatggctgggagatgcctctgtggggatgaaatggggcacccctggccatcactcatgtgtagtccaggtttgagaggaactggaaggggggtgagggtggggaggtggggcagggcatggtccttggatcaacagcccgccagctgattggatgtctaggaatgactgaaagaaaccaaaacagcctgtccactgctgctgtgggatggaggaggcgtaagcagaaacactaacagtatattgacctcttagcagaaccgcttccattctggagatcacggctgctaaatccagcatccccacttcattttacccccagcatattgttctgtagtcttttcttgaaacatcttgattgcttttcctcggcagctttcaaaaaaccaaataataatagttatccgtcttctacttcatggaagattgttttggtgccctgaccctctgaagtgcccagttcctgccatctgaaacctcggcctgatctgatctcatgttggaatctgcctgtctttcacacagggctggtcttggtcctttacatgccagttttgcttgtgaattcttgcttttttcctctcatcagccttaagtttaggcgtttgttgttctccagtgatgtagacagttcccttcacaagtcacagttcttcccataaatgaggcccgctgacctctgcgggactttaaaaatctattcagatatttccgagtaagtggcttgtttaaattcttcctgtgtctttctttattccttaattggttggtggaaagaagagatgcttgggaaccttgggttcttaggtttggattctttaataatatctaaaaagctaaattttaaataccagctttacataaatgattgttgactctggtctgtttctgacacctttccagaaaaaagtcaattgttcaggtacaccaaagaggaagaagagctgtggaggccaccctctacaaagctttatagaacttctggatctaactcacaaacaagcttccagaagagactagagaccttaggccaggagatgaaggagttcagtagcaaagtcacacctgtccaattccctgagctttgctcactcagctaatgggatggcaaaggtggtggtgctttcatcttcaggcagaagcctctgcccatccccctcaagggctgcaggcccagttctcatgctgcccttgggtgggcatctgttaacagaggagaacgtctgggtggcggcagcagctttgctctgagtgcctacaaagctaatgcttggtgctagaaacatcatcattattaaacttcagaaaagcagcagccatgttcagtcaggctcatgctgcctcactgcttaagtgcctgcaggagccgcctgccaagctccccttcctacacctggcacactggggtctgcacaaggctttgtcaaccaaagacagcttcccccttttgattgcctgtagactttggagccaagaaacactctgtgtgactctacacacacttcaggtggtttgtgcttcaaagtcattgatgcaacttgaaaggaaacagtttaatggtggaaatgaactaccatttataacttctgtttttttattgagaaaatgattcacgaattccaaatcagattgccaggaagaaataggacgtgacggtactgggccctgtgattctcccagcccttgcagtccgctaggtgagaggaaaagctctttacttccgcccctggcagggacttctgggttatgggagaaaccagagatgggaatgaggaaaatatgaactacagcagaagcccctgggcagctgtgatggagcccctgacattactcttcttgcatctgtcctgccttctttccctctgcgaggcagtggggtgggattcagagtgcttagtctgctcactgggagaagaagagttcctgcgcatgcaagccctgctgtgtggctgtcgtttacatttgggaggtgtcctgtatgtctgtacgttggggactgcctgtatttggaagatttaaaaacctagcatcctgttctcaccctctaagctgcattgagaaatgactcgtctctgtatttgtattaagccttaacacttttcttaagtgcattcggtgccaacattttttagagctgtaccaaaacaaaaagcctgtactcacatcacaatgtcattttgataggagcgttttgttatttttacaaggcagaatggggtgtaacagttgaattaaacttagcaatcacgtgctcagagcttttgcctgtcagttgtgtgtgtcccttatagtcccttcccccacagctcttgctgaaagagtttgccttgttttgttttgttgttttgtatttagccagaggatgccaaaattagtcttctcaaagctttgagtagagtaagtgtgggaataagccagtttttttttttctgtttctgtaacttaaatgaacgggtttttttcccttgtatgccacttgtcctaacatgtccttaaggtgtttaacctgcctctgacctggcttgcaatgcataggtgaggagaagcagagagcttgtcatatgcaagtcctgtcaagaaaacaggtgggcatggtggctcaggtctgtagtctttgggtctttgggaggccagggtgggaggatcacttgagctcaggagtttgagaccagcctagacaacatactacgaccctgtctatacaaaaaaaaacttctctaaattagccggatgtggtggtgcatgcctgtagtcccagctactcgggaggctgagtgaggcaggaggatcacttgagaccaggaggttgtggctgtagtgagtgatgatcatgccactgcacttcagcctggaccacagagcaagaccctgtgtaaaaaaataaaataaaaaacagattggaaaaaaaaaaaaaaaaaaaaaaa

SEQ ID NO: 2386 - DNA, 4125 bp, Homo sapiens
cgactgggccaggcgccggggcaggaagggaggcggccgccgtgccattcttaaaggcgcccgagtgtaggcgacaggccgctgacggccggaaggaaaatgagtgagtctttggttgtttgtgatgttgccgaagatttagtggaaaagctgagaaagtttcgttttcgcaaagaaacgaacaacgctgctattataatgaagattgacaaggataaacgcctggtggtactggatgaggagcttgagggcatttcaccagatgaacttaaagatgaactacctgaacgacaacctcgcttcattgtgtatagttataaatatcaacatgatgatggaagagtttcatatcctctgtgctttattttctccagtcctgttggatgtaagcctgaacaacagatgatgtatgctggaagtaagaataagctagtccagacagctgaactaaccaaggtatttgaaataagaaataccgaagacctaactgaagaatggttacgtgagaaacttggattttttcactaatgtgaacttctgtgtttctaaagtatttatgtattaacctgaccatactggaatcagacataaatacttatttatgcctaaaaatgcactgttacttacagtttgtttcctgcagtaaagaaaaattcttcatttgtgcaaaatttgaacaaagaggaaatcatcttcatagtaatgaaactttgtaaagtgtttccttatattggtaattgttaggtggactacttttctccagggactttttgcactcttgtgactaatttctataacttatggttcggaatttgttactatttacagacaccattggaaagtggatatattagattgtgagagacaacagttgcctccttttgacaaatactggatattagcagtttatttatgaaaatagcgtattatcacttgtcaaatcattgaaattcatttggggtcaaagacttgagtgacccagtattgagccatgaataatttagtgtaacctgtattacaagtacattgatgaattctgtatcttctttggtttcctgtatctttttaatcaagtctagaaactatgttcatcagtcactcatttttaaggtcgggagttagattttatgatagaattatgactgttagcttttctccttatagcatcttagtcttagaaattggtgggttgtaataatcaagggcttcattccttttatgtcatttctagacagttttgaatctaggttaataacactttatttataaagcacctcaatgtcctgtgaacactaattattttaaatgtgttaatactgtgcctttgatttgttagctttaaagttagtttaagacttttacactgccagtattccacatttggtgaaattaatacttttttaaagggtccaaataaaataattttctaatgtgtatatctgaaatttgtaataaaatcaacttcatattttaaaaattccaactatctgcttgcattggtgaatatatggcagtcgagagttataattttgggtatacttgtggttagttttgtgccataggaaaaaattatcttaaaactttggccatagttaataacattaacacttcaatagcaatcacatcttatatcctaaatgtcagaagatattctgaactggatgcctgaatagttaactaaaccagtcttgttagatgatggtactcttggcataaagcgaggattctgatatttggcatacttgtaaaaacaaatacataagtaaccattgaacattaatttgataataggtctagagactctaaaaactaaccaaacttggtgagtgtattcttatattaagaatatcttagtcatctcaaaactagcaaaatttaaattttggcatgttttccattcatatgttctttgcattttatttttgaggtttctgtgagaagtaaagatagttggaatttttgcgatattgaatagaacatcttctgttcccaacactgtttggcttcactaatttagaagtcaggaagcaatagaaagttggagatgaggaagtgctagagtaggtgtttgttttggttcttggagggaaaagattctttattccaatttccagagagaagagaaaactcacccaggaagtttaaaaattctttaaacaggtattttgatattggagaataacatgcatataattctgtaggaatgcacatgtaatccaagtgagtggagagtgtttttaatgtttttgaatgaaggaaatgaggttttgtttcacctgttttgcagcagtaagagaaactagtgctgcaagaatgtattttttaatgaagttccttattttgtcttgcatgttttagttttgcttatttttaaatttggaggtcctccataatgtcagataatattgacctgccatacgttagcactcttagttccgctactgtctttaacaggagcaaagagctgtgataaaccatgcttttttgagcttgtctgactcctaattaataacatgtttttggcaagacaacagattgaggttagaggatcagtaggacatttttattccatctgtcctatggggaaatttacaaatcccgtgctctaaaatgttctcaaacatttatatagatttccctttcatcttactaaattttgcattgttcttttcaagtatgtttcgtatttactgtctttttttctgccatttcccaaataataactccagatttcataattccagtttttacattccgttatctttctggtacaaccattcccattcagccttaaatctgagtcctttttagcagcaacttttttcctgggatcctccttcgtggtcttctaagtcagtgttagttttgaaatttttggccctgcataagttctgcatagcatctaatgtcaaaatagaaccaactggtaatcacagtattatttagtgtggtttccatgacaacaaaaatacatacgaagaaaacttctcaggttactatgctgaaattccaaaatgtctgagttttgaatagtgatcactttgttctggtattgacgcaattatattaggaaaaaagttggttgactgtttttgtttaattgacttctaaaatgttcaaattgtctagttctaaaagtttactaaatgcctagtgcagttaaacatactcttgtttaagtgtgtgttgctaaattttttactgtcattactaaataatctgtgtggcaaaatgtgtgtcagcacttttccctccttttttatctcctattttcaggagtcaaatgtagccataaactgtatccttgtctgacactttagctaaaaatttccagttaggggagtttattgccaaattaaatttggctgttccccccaacccatatagatattaaggaaggtgtacttaaaaaatgtttggactgcttttaaaacctgagcaatgtcattaatccatatgtggactagtgatgaatagatattttcataagagtttaaatgctgatatttggtggaagtagagagtaactcatattctatcaattcaagtattcttactatggttgctttccctatttgttcaatagactgataatactggaatttatagagtttgagccattacaacttttgtgaggatgtgtttcaaacatttctggacaaatcttattttgtatttctggaagaatgtagtaatcttctagaccgcttaaaaccaatgctcccaagctgaatattcttgagaaatttgtttttattatgccatttgacatttcaaatcagtgctcatatacagtaaacttgtgatagaaattgtattttattgctttttggattataattcatataaatataattacttgaatattgtttgagatcattaacatgccagggcagttcccactgatttagatggtccaagataatctcattcaggaggcttgaaacattaatggtttagtcttgtgaattttaacagttctctgtcatcgtttaacaaaaccaacaactgacacaactccttaagctgtggtttcagtctctgctagttcatattgcatgtttattttggacagtcttttgttaagcatggtgcttgtactggtttaaataaaatgttaacatt

SEQ ID NO: 2387 - DNA, 1262 bp, Homo sapiens
tgtgtcacttccggcctccctttagctgccatcttgcgtccccgcgtgtgtgcgcctaatctcaggtggtccacccgagaccccttgagcaccaaccctagtcccccgcgcggccccttattcgctccgacaaggtacaaaaaggctctggacggcggcgtggtaggaggacgggagcgggggcgggaagttccctgaaggagcgagacagggagggacagggcagaggaggagaggaaggcgatgcgacggacaggcgcacccgctcaggctgactctcgggggcgaggtcgagccaggggcggctgccctgggggcgaggcgacgctgtctcaacctccacctcgcggcggaacccgaggacaggagcctcagatgaaagaaacaatcatgaaccaggaaaaactcgccaaactgcaggcacaagtgcgcattggtgggaaaggaactgctcgcagaaagaagaaggtggttcatagaacagccacagcagatgacaaaaaacttcagttctccttaaagaagttaggggtaaacaatatctctggtattgaagaggtgaatatgtttacaaaccaaggaacagtgatccactttaacaaccctaaagttcaggcatctctggcagcgaacactttcaccattacaggccatgctgagacaaagcagctgacagaaatgctacccagcatcttaaaccagcttggtgcggatagtctgactagtttaaggagactggccgaagctctgcccaaacaatctgtggatggaaaagcaccacttgctactggagaggatgatgatgatgaagttccagatcttgtggagaattttgatgaggcttccaagaatgaggcaaactgaattgagtcaacttctgaagataaaacctgaagaagttactgggagctgctattttatattatgactgctttttaagaaatttttgtttatggatctgataaaatctagatctctaatatttttaagcccaagccccttggacactgcagctcttttcagtttttgcttatacacaattcattctttgcagctaattaagccgaagaagcctgggaatcaagtttgaaacaaagattaataaagttctttgcctagtatacagttttatttttttatttcattgacaccgatctgtacacagtaaaaaaaattgcttatagaaagctaatcatggcatgtaatatggctgataacctttggaatttgattaaagatttaaaatcacaaaaaaaaaaaaa

SEQ ID NO: 2388 - DNA, 1021 bp, Homo sapiens
tgtgtcacttccggcctccctttagctgccatcttgcgtccccgcgtgtgtgcgcctaatctcaggtggtccacccgagaccccttgagcaccaaccctagtcccccgcgcggccccttattcgctccgacaagatgaaagaaacaatcatgaaccaggaaaaactcgccaaactgcaggcacaagtgcgcattggtgggaaaggaactgctcgcagaaagaagaaggtggttcatagaacagccacagcagatgacaaaaaacttcagttctccttaaagaagttaggggtaaacaatatctctggtattgaagaggtgaatatgtttacaaaccaaggaacagtgatccactttaacaaccctaaagttcaggcatctctggcagcgaacactttcaccattacaggccatgctgagacaaagcagctgacagaaatgctacccagcatcttaaaccagcttggtgcggatagtctgactagtttaaggagactggccgaagctctgcccaaacaatctgtggatggaaaagcaccacttgctactggagaggatgatgatgatgaagttccagatcttgtggagaattttgatgaggcttccaagaatgaggcaaactgaattgagtcaacttctgaagataaaacctgaagaagttactgggagctgctattttatattatgactgctttttaagaaatttttgtttatggatctgataaaatctagatctctaatatttttaagcccaagccccttggacactgcagctcttttcagtttttgcttatacacaattcattctttgcagctaattaagccgaagaagcctgggaatcaagtttgaaacaaagattaataaagttctttgcctagtatacagttttatttttttatttcattgacaccgatctgtacacagtaaaaaaaattgcttatagaaagctaatcatggcatgtaatatggctgataacctttggaatttgattaaagatttaaaatcacaaaaaaaaaaaaa

SEQ ID NO: 2389 - DNA, 1702 bp, Homo sapiens
agactcaacaagagctccagcaaagactttcactgtagcttgacttgacctgagattaactagggaatcttgagaataaagatgagctctgaaaattgtttcgtagcagagaacagctctttgcatccggagagtggacaagaaaatgatgccaccagtccccatttctcaacacgtcatgaagggtccttccaagttcctgtcctgtgtgctgtaatgaatgtggtcttcatcaccattttaatcatagctctcattgccttatcagtgggccaatacaattgtccaggccaatacacattctcaatgccatcagacagccatgtttcttcatgctctgaggactgggttggctaccagaggaaatgctactttatttctactgtgaagaggagctggacttcagcccaaaatgcttgttctgaacatggtgctactcttgctgtcattgattctgaaaaggacatgaactttctaaaacgatacgcaggtagagaggaacactgggttggactgaaaaaggaacctggtcacccatggaagtggtcaaatggcaaagaatttaacaactggttcaacgttacagggtctgacaagtgtgtttttctgaaaaacacagaggtcagcagcatggaatgtgagaagaatttatactggatatgtaacaaaccttacaaataataaggaaacatgttcacttattgactattatagaatggaactcaaggaaatctgtgtcagtggatgctgctctgtggtccgaagtcttccatagagactttgtgaaaaaaaattttatagtgtcttgggaattttcttccaaacagaactatggaaaaaaaggaagaaattccaggaaaatctgcactgtgggcttttattgccatgagctagaagcatcacaggttgaccaataaccatgcccaagaatgagaagaatgactatgcaacctttggatgcactttatattattttgaatccagaaataatgaaataactaggcgtggacttactatttattgctgaatgactaccaacagtgagagcccttcatgcatttgcactactggaaggagttagatgttggtactagatactgaatgtaaacaaaggaattatggctggtaacataggtttttagtctaattgaatcccttaaactcagggagcatttataaatggacaaatgcttatgaaactaagatttgtaatatttctctctttttagagaaatttgccaatttactttgttatttttccccaaaaagaatgggatgatcgtgtatttatttttttacttcctcagctgtagacaggtccttttcgatggtacatatttctttgcctttataatcttttatacagtgtcttacagagaaaagacataagcaaagactatgaggaatatttgcaagacatagaatagtgttggaaaatgtgcaatatgtgatgtggcaaatctctattaggaaatattctgtaatcttcagacctagaataatactagtcttataataggtttgtgactttcctaaatcaattctattacgtgcaatacttcaatacttcatttaaaatatttttatgtgcaataaaatgtatttgtttgtattttgtgttcagtacaattataagctgtttttatatatgtgaaataaaagtagaataaacacaaaaaaaaaaaaaaaaaaaaaaaaaaaa

SEQ ID NO: 2390 - DNA, 3727 bp, Homo sapiens
ctgctttcaaggtgtctagatacagagtgaagaatgtcacagtaggaagtgcactggactaggggagtcaggagacccgggttcttgtgttggcaccatcactcatgagctacgaggtgacttcaggctgccattggacctgtcaagtgcctgagtcatgtgataatgggctacattgcgcagggcccctgggccatctccacaggagatgccagaggacgagtgcccacttgctggtcttcacagagcacgctgaaatgagacggtttaagcggaagcatcttactgccattgactgccagcatttggctcggagtcacttggctgtgacccagcccttcggtcaaagatggacaaacagagatccgaaccatggtctctatcctaaaccgagaacaaaaagagggagtaggggtcagggaagtcaaagatgcatccctgagttcttcctagcaggcaagcagccgtgcaccaatgacatggccaaaagcaattctgttggccaggacagctgtcaggactctgagggtgacatgatctttcctgcagagagcagctgtgcactgcctcaggaaggcagtgcagggccgggctcaccagggtctgccccgccctccaggaagcggtcttggtcctctgaggaagagagtaaccaggctaccgggaccagccggtgggatggagtttctaagaaagctccacggcaccatttgtctgtgccatgcacaaggcctagggaggccaggcaagaagcagaggacagtacgtctcggctctctgcggagtctggtgaaaccgaccaagatgctggggacgtgggtcctgatcccattcctgactcatactatgggcttcttgggaccttgccctgccaggaagcactgagccacatttgcagcctgcctagtgaggtcctgaggcacgtgtttgccttcctcccggtggaagacctctattggaacctgagcttggtgtgccacttgtggagggagatcatcagtgacccgctgttcattccttggaagaagctgtaccatcgatacctgatgaatgaagagcaagctgtcagcaaagtggacggcatcctgtctaactgtggcatagaaaaggagtcagacctgtgtgtgctgaacctcatacgatacacagccaccactaagtgctctccgagtgtggatcccgagagggtgctgtggagtctgagggaccaccccctcctccccgaggctgaggcgtgtgtgcggcaacacctccccgacctctacgctgctgccgggggtgtcaacatctgggccctggtggcggctgtggtgctcctctccagcagtgtgaatgacatccagcgactgctcttctgcctccggagacccagctccacggtgaccatgccagatgtcaccgagaccctgtactgcatagccgtgcttctctacgccatgagggagaaggggattaacatcagcaataggattcactacaacattttctattgcctatatcttcaggagaattcctgcactcaggccacaaaagttaaagaggagccatctgtctggccaggcaagaaaaccatccaacttacacatgaacaacagctgattctgaatcacaagatggaacctctccaggtggtgaaaattatggcctttgccggcactgggaagacctcaacgctggtcaagtatgcagagaagtggtctcagagcaggtttctgtatgtgacattcaacaagagcatcgcaaagcaggccgaacgcgtcttccccagcaacgtcatctgcaaaaccttccactccatggcctacgggcacatagggcggaagtaccagtcaaagaagaagttgaatctcttcaagttaacacccttcatggtcaactccgtccttgctgaagggaagggtggattcataagagccaagcttgtgtgtaagactctagaaaacttctttgcctcggctgacgaagagctgaccattgatcacgtgcctatttggtgtaagaacagccaaggacagagagtcatggttgagcagagtgaaaaactgaatggtgtccttgaagcgagccgcctctgggataacatgcggaagctgggggagtgcacagaagaggcgcaccagatgactcatgacggctacttgaaactctggcagctgagcaagccttcgctggcctcttttgacgccatctttgtggatgaggcccaggactgcacaccagctatcatgaacatagttctgtctcagccatgtgggaaaatctttgtaggggacccgcaccagcagatctataccttccggggtgcggtcaacgccctgttcacagtgccccacacccacgtcttctatctcacgcagagttttcggtttggtgtggaaatagcttatgtgggagctactatcttggatgtttgcaagagagtcaggaaaaagactttggttggaggaaaccatcagagtggcattagaggtgacgcaaaggggcaagtggccttgttgtcccggaccaacgccaacgtgtttgatgaggccgtacgggtgacggaaggggaattcccttcaaggatacatttgattggggggattaaatcatttggattggacagaatcattgatatttggatccttcttcagccagaggaagaacggaggaaacaaaacctcgtcattaaagacaaatttatcagaagatgggtgcacaaagaaggctttagtggcttcaagaggtatgtgaccgctgccgaggacaaggagcttgaagccaagatcgcagttgttgaaaagtataacatcaggattccagagctggtgcaaaggatagaaaaatgccatatagaagatttggactttgcagagtacattctgggcactgtgcacaaagccaaaggcctggagtttgacactgtgcatgttttggatgattttgtgaaagtgccttgtgcccggcataacctgccccagcttccgcacttcagagttgagtcattttctgaggatgaatggaatttactgtatgttgcagtaactcgagccaagaagcgtctcatcatgaccaaatcattggaaaacattttgactttggctggggagtacttcttgcaagcagagctgacaagcaacgtcttaaaaacaggcgtggtgcgctgctgcgtgggacagtgcaacaatgccatccctgttgacaccgtccttaccatgaagaagctgcccatcacctatagcaacaggaaggaaaacaaggggggctacctctgccactcctgtgcggagcagcgcatcgggcccctggcgttcctgacagcctccccggagcaggtgcgcgccatggagcgcactgtggagaacatcgtactgccccggcatgaggccctgctcttcctcgtcttctgaggacaaggcgcacgttctccgcagtgcagagcagcttgccgaggaccccgcgtgaagaaagccagcgaggggggcttctgctccctgagactctgggttcacccacagcactttctgaggaagaggacaccagcccaagctggacctgccatttctccactccctacagacagccagtctccacttgcctcccctctggatgtatctggtcagggaagtgggggatgttcttttgataaaaaaaaaaaaaaaaatttatgtatttaaacttttattacaagatttcaattaaacaggcaccatagcactggcaaaaaaaaaaaaaaaaaaaaaaaaaa

SEQ ID NO: 2391 - DNA, 3540 bp, Homo sapiens
cagaggaggagctcgctgccgggggacgctgggctgagcggccggcggcgcgggcccggcggcggcggcagcggggtccgggtccggagcgccacatgagacggtttaagcggaagcatcttactgccattgactgccagcatttggctcggagtcacttggctgtgacccagcccttcggtcaaagatggacaaacagagatccgaaccatggtctctatcctaaaccgagaacaaaaagagggagtaggggtcagggaagtcaaagatgcatccctgagttcttcctagcaggcaagcagccgtgcaccaatgacatggccaaaagcaattctgttggccaggacagctgtcaggactctgagggtgacatgatctttcctgcagagagcagctgtgcactgcctcaggaaggcagtgcagggccgggctcaccagggtctgccccgccctccaggaagcggtcttggtcctctgaggaagagagtaaccaggctaccgggaccagccggtgggatggagtttctaagaaagctccacggcaccatttgtctgtgccatgcacaaggcctagggaggccaggcaagaagcagaggacagtacgtctcggctctctgcggagtctggtgaaaccgaccaagatgctggggacgtgggtcctgatcccattcctgactcatactatgggcttcttgggaccttgccctgccaggaagcactgagccacatttgcagcctgcctagtgaggtcctgaggcacgtgtttgccttcctcccggtggaagacctctattggaacctgagcttggtgtgccacttgtggagggagatcatcagtgacccgctgttcattccttggaagaagctgtaccatcgatacctgatgaatgaagagcaagctgtcagcaaagtggacggcatcctgtctaactgtggcatagaaaaggagtcagacctgtgtgtgctgaacctcatacgatacacagccaccactaagtgctctccgagtgtggatcccgagagggtgctgtggagtctgagggaccaccccctcctccccgaggctgaggcgtgtgtgcggcaacacctccccgacctctacgctgctgccgggggtgtcaacatctgggccctggtggcggctgtggtgctcctctccagcagtgtgaatgacatccagcgactgctcttctgcctccggagacccagctccacggtgaccatgccagatgtcaccgagaccctgtactgcatagccgtgcttctctacgccatgagggagaaggggattaacatcagcaataggattcactacaacattttctattgcctatatcttcaggagaattcctgcactcaggccacaaaagttaaagaggagccatctgtctggccaggcaagaaaaccatccaacttacacatgaacaacagctgattctgaatcacaagatggaacctctccaggtggtgaaaattatggcctttgccggcactgggaagacctcaacgctggtcaagtatgcagagaagtggtctcagagcaggtttctgtatgtgacattcaacaagagcatcgcaaagcaggccgaacgcgtcttccccagcaacgtcatctgcaaaaccttccactccatggcctacgggcacatagggcggaagtaccagtcaaagaagaagttgaatctcttcaagttaacacccttcatggtcaactccgtccttgctgaagggaagggtggattcataagagccaagcttgtgtgtaagactctagaaaacttctttgcctcggctgacgaagagctgaccattgatcacgtgcctatttggtgtaagaacagccaaggacagagagtcatggttgagcagagtgaaaaactgaatggtgtccttgaagcgagccgcctctgggataacatgcggaagctgggggagtgcacagaagaggcgcaccagatgactcatgacggctacttgaaactctggcagctgagcaagccttcgctggcctcttttgacgccatctttgtggatgaggcccaggactgcacaccagctatcatgaacatagttctgtctcagccatgtgggaaaatctttgtaggggacccgcaccagcagatctataccttccggggtgcggtcaacgccctgttcacagtgccccacacccacgtcttctatctcacgcagagttttcggtttggtgtggaaatagcttatgtgggagctactatcttggatgtttgcaagagagtcaggaaaaagactttggttggaggaaaccatcagagtggcattagaggtgacgcaaaggggcaagtggccttgttgtcccggaccaacgccaacgtgtttgatgaggccgtacgggtgacggaaggggaattcccttcaaggatacatttgattggggggattaaatcatttggattggacagaatcattgatatttggatccttcttcagccagaggaagaacggaggaaacaaaacctcgtcattaaagacaaatttatcagaagatgggtgcacaaagaaggctttagtggcttcaagaggtatgtgaccgctgccgaggacaaggagcttgaagccaagatcgcagttgttgaaaagtataacatcaggattccagagctggtgcaaaggatagaaaaatgccatatagaagatttggactttgcagagtacattctgggcactgtgcacaaagccaaaggcctggagtttgacactgtgcatgttttggatgattttgtgaaagtgccttgtgcccggcataacctgccccagcttccgcacttcagagttgagtcattttctgaggatgaatggaatttactgtatgttgcagtaactcgagccaagaagcgtctcatcatgaccaaatcattggaaaacattttgactttggctggggagtacttcttgcaagcagagctgacaagcaacgtcttaaaaacaggcgtggtgcgctgctgcgtgggacagtgcaacaatgccatccctgttgacaccgtccttaccatgaagaagctgcccatcacctatagcaacaggaaggaaaacaaggggggctacctctgccactcctgtgcggagcagcgcatcgggcccctggcgttcctgacagcctccccggagcaggtgcgcgccatggagcgcactgtggagaacatcgtactgccccggcatgaggccctgctcttcctcgtcttctgaggacaaggcgcacgttctccgcagtgcagagcagcttgccgaggaccccgcgtgaagaaagccagcgaggggggcttctgctccctgagactctgggttcacccacagcactttctgaggaagaggacaccagcccaagctggacctgccatttctccactccctacagacagccagtctccacttgcctcccctctggatgtatctggtcagggaagtgggggatgttcttttgataaaaaaaaaaaaaaaaatttatgtatttaaacttttattacaagatttcaattaaacaggcaccatagcactggca

SEQ ID NO: 2392 - DNA, 923 bp, Homo sapiens
agtggagtgaggggtaacaagatggcgaccgagacggtggagctccataagctaaagcttgccgaactaaagcaagaatgtcttgctcgtggtttggagaccaagggaataaagcaagatcttatccacagactccaggcatatcttgaagaacatgctgaagaggaggcaaatgaagaagatgtactgggagatgaaacagaggaagaagaaacaaagcccattgagctccctgtcaaagaggaagaaccccctgaaaaaactgttgatgtggcagcagagaagaaagtggtgaaaattacatctgaaataccacagactgagagaatgcagaagagggctgaacgattcaatgtacctgtgagcttggagagtaagaaagctgctcgggcagctaggtttgggatttcttcagttccaacaaaaggtctgtcatctgataacaaacctatggttaacttggataagctgaaggaaagagctcaaagatttggtttgaatgtctcttcaatctccagaaagtctgaagatgatgagaaactgaaaaagaggaaggagcgatttgggattgtcacaagttcagctggaactggaaccacagaggatacagaggcaaagaagaggaaaagagcagagcgctttgggattgcctgatgaagagttcctgatactttctgttctccagtgttttccatttctctccttcttcttggtcacatatatgcctaaatgcacagtcatgtgcctacgtcctgcctcgcaatgagggagcatgtaccccaggtacatccatgaactgcggcagcagtttgacttattgctgtttcagctttaaggttgttgtgtttttgtttttgattatgttgcttgttaataaaaaaaaatagaaaagtaaaaaaaaaaaaaaaaaaaaaaaaaaaaaa

SEQ ID NO: 2393 - DNA, 7637 bp, Homo sapiens
tttccgtggaatcaggccggctgaatggaacaaaagtgggacttttaaaatgttgccctgtaagaagagaagaactacagtgacagagtccctacagcataaaggcaatcaagaggaaaacaacgtagacctagaatcagccgttaaaccagaatctgaccaggttaaggacttgagttcggtgtcactatcctgggatccaagtcatggcagagtagctggcttcgaagtacagtctttgcaggatgcaggaaatcagcttggtatggaggatacatctctgagctctggaatgctcacccagaacacaaatgtaccaattctagaaggtgttgatgtggccatctctcagggaatcaccctaccttccttggagtcttttcacccccttaatatacacattggtaaaggaaaactccacgctactggctcaaagagagggaaaaaaatgacactcaggcctgggccagttacccaagaagacagatgtgatcatcttaccctaaaggagcctttttcaggagagcctagtgaagaagtcaaggaagaaggagggaaacctcaaatgaattctgaaggggagataccttccctgccatcaggcagccaatctgcaaaaccagtaagccagcccaggaaatcaacccagccagatgtttgtgcctctcctcaagaaaagccactcaggactctgtttcaccaacctgaggaagagatagaagatggtggactcttcattccaatggaagaacaagacaatgaagaaagtgagaaaaggagaaaaaagaaaaagggtaccaagaggaaacgagatggaaggggtcaagaagggaccttggcatatgacctgaaactggatgacatgcttgaccgtaccttggaggatggtgccaagcagcacaatctaacagcagtcaatgtccgaaacatccttcatgaagtaatcacaaatgaacacgtggtagctatgatgaaagcagccatcagtgagacggaagatatgccaatgtttgagcctaaaatgacacgctctaaactgaaggaagtagtggaaaaaggagtggtaattccaacatggaatatttcaccaattaagaaggccaatgaaattaagcctcctcagtttgtggatatccaccttgaagaagatgattcctcagatgaagaataccagccggatgatgaagaagaagatgaaactgctgaagagagcttattggaaagtgatgttgaaagcactgcttcatctccacgtggggcaaagaaatccagattgaggcagtcttctgagatgactgaaacagatgaggagagtggcatattatcagaggctgagaaagtcaccacaccagccatcaggcacatcagtgctgaggtagtgcccatggggcccccgccccctccaaagccgaaacagaccagagatagtactttcatggagaagttacatgcggtagatgaggagctggcttccagtccagtctgcatggattctttccagcccatggatgacagtctcattgcatttcgaacgcgttctaagatgcccctgaaagatgttcccctgggccaattagaggcagagctccaagctccagacatcactccagatatgtatgaccccaatacggcagatgatgaggactggaagatgtggctggggggacttatgaatgatgatgtggggaatgaagatgaagcagatgatgatgatgatccagaatataatttcctggaagacctcgatgaaccagacacagaggatttccggactgaccgggcagtgagaatcaccaaaaaggaagtaaatgagctgatggaagagctgtttgaaactttccaagatgagatgggattctccaacatggaagatgatggcccagaagaggaggagtgtgtagctgagcctcgtcctaactttaacacccctcaagctctacggtttgaggaaccactggccaacctgttaaatgaacaacatcggacagtgaaggagctatttgaacagctgaagatgaagaaatcttcagccaaacagctgcaggaagtagagaaggttaaaccccagagtgagaaagttcatcagactctgattctggacccagcacagaggaagagactccagcagcagatgcagcagcacgttcagctcttgacccaaatccaccttcttgccacctgcaaccccaacctcaatccggaggccactaccaccaggatatttcttaaagagctgggaacctttgctcaaagctccatcgcccttcaccatcagtacaaccccaagtttcagaccctgttccaaccctgtaacttgatgggagctatgcagctgattgaagacttcagcacacatgtcagcattgactgcagccctcataaaactgtcaagaagactgcgaatgaatttccctgtttgccaaagcaagtggcttggattctggccacaagcaaggttttcatgtatccagagttacttccagtgtgttccctgaaggcaaagaatccccaggataagatcgtcttcaccaaggctgaggacaatttgttagctttaggactgaagcattttgaaggaactgagtttcctaatcctctaatcagcaagtaccttctaacctgcaaaactgcccaccaactgacagtgagaatcaagaacctcaacatgaacagagctcctgacaacatcattaaattttataagaagaccaaacagctgccagtcctaggaaaatgctgtgaagagatccagccacatcagtggaagccacctatagagagagaagaacaccggctcccattctggttaaaggccagtctgccatccatccaggaagaactgcggcacatggctgatggtgctagagaggtaggaaatatgactggaaccactgagatcaactcagatcgaagcctagaaaaagacaatttggagttggggagtgaatctcggtacccactgctattgcctaagggtgtagtcctgaaactgaagccagttgccacccgtttccccaggaaggcttggagacagaagcgttcatcagtcctgaagcccctccttatccaacccagcccctctctccagcccagcttcaaccctgggaaaacaccagcccgatcaactcattcagaagcccctccgagcaaaatggtgctccggattcctcacccaatacagccagccactgttttacagacagttccaggtgtccctccactgggggtcagtggaggtgagagttttgagtctcctgcagcactgcctgctgtgccccctgaggccaggacaagcttccctctgtctgagtcccagactttgctctcttctgcccctgtgcccaaggtaatgctgccctcccttgccccttctaagtttcgaaagccatatgtgagacggagaccctcaaagagaagaggagtcaaggcctctccctgtatgaaacctgcccctgttatccaccaccctgcatctgttatcttcactgttcctgctaccactgtgaagattgtgagccttggcggtggctgtaacatgatccagcctgtcaatgcggctgtggcccagagtccccagactattcccatcactaccctcttggttaaccctacttccttcccctgtccattgaaccagtcccttgtggcctcctctgtctcacccttaattgtttctggcaattctgtgaatcttcctataccatccacccctgaagataaggcccacgtgaatgtggacattgcttgtgctgtggctgatggggaaaatgcctttcagggcctagaacccaaattagagccccaggaactatctcctctctctgctactgttttcccgaaagtggaacatagcccagggcctccactagcagatgcagagtgccaagaaggattgtcagagaatagtgcctgtcgctggaccgttgtgaaaacagaggaggggaggcaagctctggagccgctccctcagggcatccaggagtctctaaacaaccctacccctggggatttagaggaaattgtcaagatggaacctgaagaagctagagaggaaatcagtggatcccctgagcgtgatatttgtgatgacatcaaagtggaacatgctgtggaattggacactggtgccccaagcgaggagttgagcagtgctggagaagtaacgaaacagacagtcttacagaaggaagaggagaggagtcagccaactaaaaccccttcatcttctcaagagccccctgatgaaggaacctcagggacagatgtgaacaaaggatcatcaaagaatgctttgtcctcaatggatcctgaagtgaggcttagtagccccccagggaagccagaagattcatccagtgttgatggtcagtcagtggggactccagttgggccagaaactggaggagagaagaatgggccagaagaagaggaagaagaggactttgatgacctcacccaagatgaggaagatgaaatgtcatcagcttctgaggaatctgtgctttctgtcccagaactccaggaaacaatggagaaactgacttggctggcatctgaaaggcgcatgagtcaggagggtgagtctgaagaagagaattctcaggaggagaactctgagccagaagaagaggaggaagaagaagcagaaggaatggaaagcctgcagaaagaggatgaaatgacggatgaagcagttggagactctgctgagaagcctcctacttttgcttcacctgagactgctccagaagtggagaccagcagaactccaccaggagagagcatcaaagctgctggaaaaggccggaacaatcatcgagctcgcaacaagcggggaagtcgggctcgggccagcaaggacacctccaagctgctgttgctgtatgatgaggacattctcgagcgagatccactcagggagcagaaggacttggcctttgcccaagcttatctgaccagggtgcgagaagccctacaacatatccctggcaagtatgaagacttccttcaagtcatctatgaatttgagtcaagtacccagagacggacggctgtagatctctacaaaagcctgcaaattctgctccaagactggcctcagctgttgaaagactttgctgctttcctgttacctgagcaagctctggcctgtggattatttgaggagcagcaggcttttgagaagagccgcaagttccttcggcagctggagatttgctttgcagagaacccctcacaccaccagaagattatcaaggtcctccaaggctgtgcagactgccttccccaggagatcaccgagctcaagacacagatgtggcagctcctcaagggccacgaccacctgcaggatgagttttctatcttctttgaccacttgcgcccagcagctagccggatgggtgactttgaagagatcaattggactgaggaaaaggagtatgagtttgatggctttgaagaagtggccctgcctgatgtggaagaagaggaggagcctcccaagatacccacagcctcaaagaacaagaggaaaaaagagatcggggtccaaaatcatgataaggagactgaatggccagatggggccaaggactgtgcctgctcctgccatgaaggaggtccagattccaagctgaagaagagcaaaaggcggagctgtagccactgtagcagcaaggtctgtgacagcaaatcctacaagagcaaggagccccatgagttggtgggcagcagcccccaccgagaggctagtcctatgcctggtgctaaggaagctgggcagggcaaggatatgatggaagaggaagccccagaggagcgggagagcactgaggccacccagagcaggactgtcaggaccaccagaaagggagagatgcctgtttcaggattggcagtggggagcactttgccatcccctcgagaagtgactgttacagaacggctcctcctggatggcccaccacctcattcaccagagactcctcaatttccccccacaactggagctgtactgtacactgttaagagaaaccaggttgggcctgaggttcgctcctgccccaaggcatcccccagacttcagaaagagagggagggccaaaaggcagtgagtgagtcagaggctttgatgctggtctgggatgcatcagaaactgagaaattgcctggtaccgtggaaccccctgcttccttcctgagtcctgtttcctcaaagaccagagatgcagggagaagacatgtgtccgggaaaccagacactcaagagagatggctgccctcaagcagagctcgggtgaagacaagagacaggacgtgccctgtccatgaatctccatcaggaattgacacctcagagacttctcccaaagcccctagagggggtttggctaaagacagtggaacacaggccaagggtccagagggggagcagcagccaaaggccgcagaagctacggtgtgtgccaacaacagcaaggtcagctccactggggaaaaggttgtcctgtggacaagggaagctgaccgtgtgatcctcaccatgtgccaggagcaaggggcacagccacagaccttcaacatcatctcccagcagctgggaaataagacccctgctgaggtttcccaccgttttcgagaactcatgcagctcttccacactgcctgtgaagccagctctgaggatgaggatgatgcaaccagtaccagcaatgcagaccagctgtctgaccatggggaccttctgtctgaagaggagctggatgaatgagactctgggaatcatctacacaggaccaaacccaacaggcgccctggcaccggggagggggtagttgtactctgcttgtacagtccttgagcccagtttacagatctggagagcaggaggccaggacaaggacaaaggctggaggatggagtaggacccaggggctctgccatcctaggcatcattcaaggtcttttatgaagactttacagatgtcctctgtaaatagcatcgagagtggagttcagctcctttctctacttttttttggtctgatggcacatatttattgttctgtggtctaatcacagtgtttctaaatgtaaaaagtgcatatgttggtgtagctagtcccgcgacattgagctcctctgcatgaagacactgggctcctgcatccagctgtttttattgcaaactagctcctttctcccacactgggaactttagtccacgaggctgtcaccaccctggtagcactgggccaggctttgtagctcctgcagcagctctgctacgtcatcgtgctccactccagcatccatgaagctggcccagcgccgcaagtcgagtttggtgaggtctctggccaaggcttccagggtctggtgcagggacgaagaggaacacagtgccccaaacactgggatgctctccactgctgtggagggagaggaaacagagacctgtagatggatgattattctgccctgggactcgccaaactgataaggaagtccaaccttagtagacttgattgtaaactcaacaaatttggtgtattgtccccttagtacaccagtactccagaggaagaatgcttttcttgggagccatagggtgaataaaggaatgtttaactgtg

SEQ ID NO: 2394 - DNA, 4738 bp, Homo sapiens
tttccgtggaatcaggccggctgaatggaacaaaagtgggacttttaaaatgttgccctgtaagaagagaagaactacagtgacagagtccctacagcataaaggcaatcaagaggaaaacaacgtagacctagaatcagccgttaaaccagaatctgaccaggttaaggacttgagttcggtgtcactatcctgggatccaagtcatggcagagtagctggcttcgaagtacagtctttgcaggatgcaggaaatcagcttggtatggaggatacatctctgagctctggaatgctcacccagaacacaaatgtaccaattctagaaggtgttgatgtggccatctctcagggaatcaccctaccttccttggagtcttttcacccccttaatatacacattggtaaaggaaaactccacgctactggctcaaagagagggaaaaaaatgacactcaggcctgggccagttacccaagaagacagatgtgatcatcttaccctaaaggagcctttttcaggagagcctagtgaagaagtcaaggaagaaggagggaaacctcaaatgaattctgaaggggagataccttccctgccatcaggcagccaatctgcaaaaccagtaagccagcccaggaaatcaacccagccagatgtttgtgcctctcctcaagaaaagccactcaggactctgtttcaccaacctgaggaagagatagaagatggtggactcttcattccaatggaagaacaagacaatgaagaaagtgagaaaaggagaaaaaagaaaaagggtaccaagaggaaacgagatggaaggggtcaagaagggaccttggcatatgacctgaaactggatgacatgcttgaccgtaccttggaggatggtgccaagcagcacaatctaacagcagtcaatgtccgaaacatccttcatgaagtaatcacaaatgaacacgtggtagctatgatgaaagcagccatcagtgagacggaagatatgccaatgtttgagcctaaaatgacacgctctaaactgaaggaagtagtggaaaaaggagtggtaattccaacatggaatatttcaccaattaagaaggccaatgaaattaagcctcctcagtttgtggatatccaccttgaagaagatgattcctcagatgaagaataccagccggatgatgaagaagaagatgaaactgctgaagagagcttattggaaagtgatgttgaaagcactgcttcatctccacgtggggcaaagaaatccagattgaggcagtcttctgagatgactgaaacagatgaggagagtggcatattatcagaggctgagaaagtcaccacaccagccatcaggcacatcagtgctgaggtagtgcccatggggcccccgccccctccaaagccgaaacagaccagagatagtactttcatggagaagttacatgcggtagatgaggagctggcttccagtccagtctgcatggattctttccagcccatggatgacagtctcattgcatttcgaacgcgttctaagatgcccctgaaagatgttcccctgggccaattagaggcagagctccaagctccagacatcactccagatatgtatgaccccaatacggcagatgatgaggactggaagatgtggctggggggacttatgaatgatgatgtggggaatgaagatgaagcagatgatgatgatgatccagaatataatttcctggaagacctcgatgaaccagacacagaggatttccggactgaccgggcagtgagaatcaccaaaaaggaagtaaatgagctgatggaagagctgtttgaaactttccaagatgagatgggattctccaacatggaagatgatggcccagaagaggaggagtgtgtagctgagcctcgtcctaactttaacacccctcaagctctacggtttgaggaaccactggccaacctgttaaatgaacaacatcggacagtgaaggagctatttgaacagctgaagatgaagaaatcttcagccaaacagctgcaggaagtagagaaggttaaaccccagagtgagaaagttcatcagactctgattctggacccagcacagaggaagagactccagcagcagatgcagcagcacgttcagctcttgacccaaatccaccttcttgccacctgcaaccccaacctcaatccggaggccactaccaccaggatatttcttaaagagctgggaacctttgctcaaagctccatcgcccttcaccatcagtacaaccccaagtttcagaccctgttccaaccctgtaacttgatgggagctatgcagctgattgaagacttcagcacacatgtcagcattgactgcagccctcataaaactgtcaagaagactgcgaatgaatttccctgtttgccaaagcaagtggcttggattctggccacaagcaaggttttcatgtatccagagttacttccagtgtgttccctgaaggcaaagaatccccaggataagatcgtcttcaccaaggctgaggacaatttgttagctttaggactgaagcattttgaaggaactgagtttcctaatcctctaatcagcaagtaccttctaacctgcaaaactgcccaccaactgacagtgagaatcaagaacctcaacatgaacagagctcctgacaacatcattaaattttataagaagaccaaacagctgccagtcctaggaaaatgctgtgaagagatccagccacatcagtggaagccacctatagagagagaagaacaccggctcccattctggttaaaggccagtctgccatccatccaggaagaactgcggcacatggctgatggtgctagagaggtaggaaatatgactggaaccactgagatcaactcagatcgaagcctagaaaaagacaatttggagttggggagtgaatctcggtacccactgctattgcctaagggtgtagtcctgaaactgaagccagttgccacccgtttccccaggaaggcttggagacagaagcgttcatcagtcctgaagcccctccttatccaacccagcccctctctccagcccagcttcaaccctgggaaaacaccagcccgatcaactcattcagaagcccctccgagcaaaatggtgctccggattcctcacccaatacagccagccactgttttacagacagttccaggtgtccctccactgggggtcagtggaggtgagagttttgagtctcctgcagcactgcctgctgtgccccctgaggccaggacaagcttccctctgtctgagtcccagactttgctctcttctgcccctgtgcccaaggtaatgctgccctcccttgccccttctaagtttcgaaagccatatgtgagacggagaccctcaaagagaagaggagtcaaggcctctccctgtatgaaacctgcccctgttatccaccaccctgcatctgttatcttcactgttcctgctaccactgtgaagattgtgagccttggcggtggctgtaacatgatccagcctgtcaatgcggctgtggcccagagtccccagactattcccatcactaccctcttggttaaccctacttccttcccctgtccattgaaccagtcccttgtggcctcctctgtctcacccttaattgtttctggcaattctgtgaatcttcctataccatccacccctgaagataaggcccacgtgaatgtggacattgcttgtgctgtggctgatggggaaaatgcctttcagggcctagaacccaaattagagccccaggaactatctcctctctctgctactgttttcccgaaagtggaacatagcccagggcctccactagcagatgcagagtgccaagaaggattgtcagagaatagtgcctgtcgctggaccgttgtgaaaacagaggaggggaggcaagctctggagccgctccctcagggcatccaggagtctctaaacaaccctacccctggggatttagaggaaattgtcaagatggaacctgaagaagctagagaggaaatcagtggatcccctgagcgtgatatttgtgatgacatcaaagtggaacatgctgtggaattggacactggtgccccaagcgaggagttgagcagtgctggagaagtaacgaaacagacagtcttacagaaggaagaggagaggagtcagccaactaaaaccccttcatcttctcaagagccccctgatgaaggaacctcagggacagatgtgaacaaaggatcatcaaagaatgctttgtcctcaatggatcctgaagtgaggcttagtagccccccagggaagccagaagattcatccagtgttgatggtcagtcagtggggactccagttgggccagaaactggaggagagaagaatgggccagaagaagaggaagaagaggactttgatgacctcacccaagatgaggaagatgaaatgtcatcagcttctgaggaatctgtgctttctgtcccagaactccaggtgagagctggagaatattctcaagtatttcgtggactcagtaatatgtatcacttattgatatgccacctgcttgcttgctgcactatggatagtcctaaaatcatttgtatttgatttgtgaatgcattatgggacatgattgtggagttgaggtgaaatgagatggaaaggatgaaattttacttattatattaaactcgtttacacattaaa

SEQ ID NO: 2395 - DNA, 1496 bp, Homo sapiens
gtgccctgcagcgcgtggacaggctaggggtcgcgggagcgggagggaggcgctgccgggcctgtcgcgcaaggacgtcggtcctcccaggtttgagggcggtcaggcggggtcaaggccaggcagcggggcgcgtctgcgttgcgcccgactctccgcggttacctgtgcctagaggtgatttgaagggcaggggccgagagattcgtagccctgctgcggcgccgtcccggagttccccggcccagaccagacccgcggggcgccctcagcagcccgcccgtcttgcactcggagagcggtcctggcaggaaggccggccagtgtgcacccggttcgggcccctgcgcccgggctggcaagatggccacgcccccagcagagacggcgcctctaggacaccatcggggaccgaggaccagctttatccagggactctaccattcccacccctttggccccactccacgacaaccacttccccatcttctcctctattctggtctcccctgcccccacgccttcccacccagcgtcttccccaggttcccccactacctctccctcagatccaggccctcagctcagcatgggtggttctccctccaggaaagggggaggagggaccaggacctgagttgcatagcggctgcctggatgggcttagaagcctttttgagggacctccctgcccctatcctggggcttggatacctttccaagtccctggaactgcccacccttcccctgccaccccgtcaggagatcctagtatggaggaacatctgtctgtcatgtatgagagactgagacaagagcttcccaagctcttccttcagtcccacgactacagtctgtattccttggatgtggaattcatcaatgagatcctcaacatacgtaccaagggccggacatggtacattctttcactgaccctctgccgtttcctggcctggaattattttgcacaccttcgtttggaggttttacagctgacccgccaccctgagaactggaccctgcaagcccggtggcggcttgtggggctgcccgtccacttgctctttttgcggttctacaagcgtgacaaagacgagcattaccggacctatgatgcctactccactttctacctgaattccagtggcctcatttgtcgccatcgtctagataaactgatgccttcacactcacctccaacgcctgtgaagaagctgctagtgggagccctggtggccctggggctgtcagagccagaacctgacttaaacctgtgttccaagccctgatccttgaccttggagtggaggcagcactgaagactgctacgcccaagagaaggaggtggaggcagccaagaatctcaggagccagcttcctctcctcgtttctctccttccttcctttccatctcatgctgtgtaaagctgctgtgtaatttaacttgtaaataataaagtttaactgactatatgaaaaaaaaaaaaaaaaaa

SEQ ID NO: 2396 - DNA, 1743 bp, Homo sapiens
gtaatttcgacctgtcctttcccgggagttagcgatccctcaacccctgcactgcgctagtcctaaagaggaaatgtctctacgctgcggggatgcagcccgcaccctggggccccgggtatttgggagatatttttgcagcccagtcagaccgttaagctccttgccagataaaaaaaaggaactcctacagaatggaccagaccttcaagattttgtatctggtgatcttgcagacaggagcacctgggatgaatataaaggaaacctaaaacgccagaaaggagaaaggttaagactacctccatggctaaagacagagattcccatggggaaaaattacaataaactgaaaaatactttgcggaatttaaatctccatacagtatgtgaggaagctcgatgtcccaatattggagagtgttggggaggtggagaatatgccaccgccacagccacgatcatgttgatgggtgacacatgtacaagaggttgcagattttgttctgttaagactgcaagaaatcctcctccactggatgccagtgagccctacaatactgcaaaggcaattgcagaatggggtctggattatgttgtcctgacatctgtggatcgagatgatatgcctgatgggggagctgaacacattgcaaagaccgtatcatatttaaaggaaaggaatccaaaaatccttgtggagtgtcttactcctgattttcgaggtgatctcaaagcaatagaaaaagttgctctgtcaggattagatgtgtatgcacataatgtagaaacagtcccggaattacagagtaaggttcgtgatcctcgggccaattttgatcagtccctacgtgtactgaaacatgccaagaaggttcagcctgatgttatttctaaaacatctataatgttgggtttaggcgagaatgatgagcaagtatatgcaacaatgaaagcacttcgtgaggcagatgtagactgcttgactttaggacaatatatgcagccaacaaggcgtcaccttaaggttgaagaatatattactcctgaaaaattcaaatactgggaaaaagtaggaaatgaacttggatttcattatactgcaagtggccctttggtgcgttcttcatataaagcaggtgaatttttcctgaaaaatctagtggctaaaagaaaaacaaaagacctctaaaacttcaacaagaccttcaagatcacagaaatttttaaaatttgattccagttaataacagaggtggtgccagaatgcctggactgcagtggatgtgccccacctctttgcttaaaaaaaaaaatgtcaatagccaggcatagtggctcacgcctgtaatcccagcactttaggaggccaaggcgggtggatcacctgaggtcaggagttcgagaccagcctggccaacatggtgaaatcctgtctccactaaaaacacaaaaattagtcaggcgtggtagtgggtgcctgtaatcccagctactcgggaggctaaggcaggagaatcacttgaacctgggagggggaggttgcagtgagccaagatcgctccattgccctccagcctgggtgacaagagcaaaactccatctcaaataaataaaaaggaaaaaaaagtcaataaactgtacaaatttaattacagtaattcatttggcttttagtgtatcttctttgtcccaattaaacagttgcttgctgtgatgtaatcttaaaaaaaaaaaaaaaaa

SEQ ID NO: 2397 - DNA, 1631 bp, Homo sapiens
gtaatttcgacctgtcctttcccgggagttagcgatccctcaacccctgcactgcgctagtcctaaagaggaaatgtctctacgctgcggggatgcagcccgcaccctggggccccgggtatttgggagatatttttgcagcccagtcagaccgttaagctccttgccagataaaaaaaaggaactcctacagaatggaccagaccttcaagattttgtatctggtgatcttgcagacaggagcacctgggatgaatataaaggaaacctaaaacgccagaaaggagaaaggttaagactacctccatggctaaagacagagattcccatggggaaaaattacaataaactgaaaaatactttgcggaatttaaatctccatacagtatgtgaggaagctcgatgtcccaatattggagagtgttggggaggtggagaatatgccaccgccacagccacgatcatgttgatgggtgacacatgtacaagaggttgcagattttgttctgttaagactgcaagaaatcctcctccactggatgccagtgagccctacaatactgcaaaggcaattgcagaatggggtctggattatgttgtcctgacatctgtggatcgagatgatatgcctgatgggggagctgaacacattgcaaagaccgtatcatatttaaaggaaaggaatccaaaaatccttgtggagtgtcttactcctgattttcgaggtgatctcaaagcaatagaaaaagttgctctgtcaggattagatgtgtatgcacataatgtagaaacagtcccggaattacagagtaaggttcgtgatcctcgggccaattttgatcagtccctacgtgtactgaaacatgccaagaaggttcagcctgatgttatttctaaaacatctataatgttgggtttaggcgagaatgatgagcaagtatatgcaacaatgaaagcacttcgtgaggcagatgtagactgcttgactttaggacaatatatgcagccaacaaggcgtcaccttaaggtgaatttttcctgaaaaatctagtggctaaaagaaaaacaaaagacctctaaaacttcaacaagaccttcaagatcacagaaatttttaaaatttgattccagttaataacagaggtggtgccagaatgcctggactgcagtggatgtgccccacctctttgcttaaaaaaaaaaatgtcaatagccaggcatagtggctcacgcctgtaatcccagcactttaggaggccaaggcgggtggatcacctgaggtcaggagttcgagaccagcctggccaacatggtgaaatcctgtctccactaaaaacacaaaaattagtcaggcgtggtagtgggtgcctgtaatcccagctactcgggaggctaaggcaggagaatcacttgaacctgggagggggaggttgcagtgagccaagatcgctccattgccctccagcctgggtgacaagagcaaaactccatctcaaataaataaaaaggaaaaaaaagtcaataaactgtacaaatttaattacagtaattcatttggcttttagtgtatcttctttgtcccaattaaacagttgcttgctgtgatgtaatcttaaaaaaaaaaaaaaaaa

SEQ ID NO: 2398 - DNA, 3390 bp, Homo sapiens
caggcatcggtgtcgcctcgcagggaacagttgggtggcttccagcttatgccaggagtctcctcctcacccgcacatcgcggggctaggatgggatgtcgtggctgccaaatcctccgaggcaactcctgcctgggacggcctaccacaggatgggcctgagaatccggagcgcaggctcgggccgctaggacaccttcccccgcccgcggacccagccttccagcatcaccggggttcgcggaggagaaagaggaaaggcgtttggcctgccaaggccgccgtagcgagggggcggggcccggaagagcaggatggcggcgcgggacagtgacagcgaagaagatctggtcagctatgggaccgggctggagcctctggaagaaggtgaaagaccaaagaaaccaatccctcttcaggatcagactgtcagagatgaaaaaggaaggtataaacgattccacggggcctttagtggaggtttctctgctggatacttcaatactgttggctcaaaagaaggatggacaccctctacctttgtgtcttcacgacagaacagagcagacaaatctgttcttggtcctgaagattttatggatgaagaggatcttagtgaatttgggatagcacctaaagcgattgtcaccacagacgattttgcctccaaaaccaaagacagaatacgagaaaaggctaggcagttggccgctgctactgcccctattcctggagccaccctccttgatgacctcataacgccagcaaaattatctgttggtttcgaattgctaagaaaaatgggttggaaagaaggacaaggagttggtcctcgagtaaagagacggccacgccgacagaaacctgatcctggagtcaaaatctatggctgtgcattaccccctggaagctcggaaggatctgagggtgaagatgatgactacttgcctgataatgtgacctttgcacccaaagatgtcacacctgtggatttcacacctaaagataatgtgcatggtctagcttacaagggcctggatccccaccaggcactgtttggaacttcgggagaacattttaatcttttcagtggtggttctgagagagctggcgatcttggagaaattggactgaataaaggaagaaaattgggaatttcaggccaggcttttggtgtaggtgccctggaagaggaagatgatgatatctatgccacagaaactctatccaagtatgacactgttctgaaggacgaggagcctggagacggactctatggctggacagcacccaggcagtataaaaaccagaaagaatcagagaaagaccttcggtacgttggcaaaattttggatggattttccttggcttctaaacctttatcttctaagaaaatctatccacctccagagctgccaagagactatcgaccagtgcattatttcagacccatggtggccgccacctccgagaactcacacttactgcaggtattatcagagtcagctggaaaggcaacgcctgacccagggacacacagtaagcaccaactgaatgcctccaaacgggctgagttgcttggagagacgcctattcaaggttcagctacttcagtgttagaatttctgtcccaaaaagacaaagagagaatcaaagaaatgaagcaggcaactgacctgaaagcagctcagctcaaggccaggagtctggcccagaacgctcagagcagcagagcccagctctcccctgcagcggctgctgggcactgctcttggaacatggcattaggtggtgggacggccaccttaaaagccagcaacttcaagcctttcgccaaagatccggaaaagcaaaagcgatacgacgagttcttagtacacatgaaacagggtcagaaagatgctctggaacgctgtctggaccccagcatgacagagtgggagcgaggccgtgagcgggatgagtttgcccgggcggccctgctgtacgcatcttcccattcgaccttgtcctccaggttcactcacgccaaggaggaggatgactcagatcaggttgaagtccctcgagaccaagagaatgatgtcggggataagcagtcggctgtgaagatgaagatgtttgggaagctcacccgagacacgtttgagtggcaccctgacaagcttctatgtaagagatttaatgtccctgacccttatccagattcaactttagttggcttaccaagagtgaagcgtgacaagtactcagtcttcaactttctgacgctcccagagacagcttccttgcccaccactcaagcatcaagtgaaaaagtatcacagcaccgaggtcccgacaaatcaagaaaaccatccagatgggatacctctaaacacgaaaagaaagaagattccattagtgaatttttaagtttggctagatcaaaagccgagccacctaaacaacagtccagccccttagtaaacaaagaggaagagcatgcaccagaattatccgcaaatcagaccgtcaacaaagatgtggacgcacaggctgaaggagaagggagccgcccatccatggacttattcagggccatctttgccagttcctcagatgaaaagtcctcatcctccgaggatgagcaaggtgacagtgaagatgatcaggcaggctctggggaggccaacttccaaagctcccaagacactgacttgggggaaacatcatctgtggctcacgctcttgtgccagcaccccaggagccgccaccttccttcccgatacaaaagatgcagatagatgaaagagaagagttcggcccgcggctgcctcccgtcttctgccccaatgctcgtcagacacttgaggttcctcaaaaagagaaacataaaaagaacaaagacaagcacaaggccaagaaagagcacaggcggaagaaagagaagaaaaagaaacacaggaagcacaaacacaaaggcaagcaaaagaataaaaaaccagagaaaagtagtagctccgagagttccgacagcagcgacagccagagtgacgaggaaaccgcagacgtgtcgccccaggagctgctgagacggctgaaaagtcttccactaagaaggcagtaattgaatgctgccctggctcgtcctagaatcatttctcctccatgatggaagcccagtgattgttcagttaacgcattgtacagagtgtatttatatgtaaattcctgctgtaaaataatttttaaaaccttgacatttcaaagactgccttgaaaggtcgcagaaattgatttctatttttaatttcagttagtatcgggggaaaaaaatccagactgaacagtttaattaaagtggaatttttctattttcaaaaaaaaaaaaaaaaaaaaaaaaaaaa

SEQ ID NO: 2399 - DNA, 2726 bp, Homo sapiens
cggcacgaggctggttgccggggcaggggcggaggcggaggcagaggtggaggcgctttgaaagccgtcattgtgtggcactggacggggaatcaagagacccggtttctaatccctgctctgtcactaacaagctgcgtgatcttcggaaaaaagtaatcctcttggaaagctggaaacatagtccgaagcttaagtgaaaatgatacatgttagaagacatgaaacaaggagaaattctaagagtcacgtgcctgagcagaaatctcgagttgattggaggcgaactaaaagaagtagtatctcacaattacttgatagtgatgaagagcttgatagtgaagaatttgatagtgatgaagagcttgatagtgatgaaagttttgaaaatgatgaagagcttgatagtaacaagggacctgattgtaataaaacaccaggaagtgaaagagagctcaacttaagtaaaattcaaagtgaaggaaatgacagtaagtgtctcattaactctggcaacggttcaacatatgaagaagaaacgaacaaaatcaaacataggaatattgacttacaagatcaggaaaaacatttaagtcaagaggataatgatctcaacaaacaaactggacaaataatagaggatgatcaggaaaaacatttaagtcaagaggataatgatctcaacaaacaaactggacaaataatagaggatgatttagaagaagaagacatcaagcgaggaaaaagaaaaaggctatcctctgtgatgtgtgacagtgatgagagtgatgacagcgatatcctagttagaaaagtaggtgttaaacgtccccgtagagtggttgaagatgaaggttcttcagtggaaatggagcaaaagactcctgaaaaaacattagctgcacaaaagcgagaaaaacttcagaagctcaaagaactctcaaaacaaagatctcgtcagagacgcagtagtggtagagattttgaggactctgaaaaggaatcttgcccaagcagtgatgaagttgatgaggaggaagaagaggataattatgaatctgatgaagatggagatgattatattatcgatgactttgtagtgcaagatgaggagggtgatgaagagaataaaaaccaacaaggagaaaaattgactacatcacaactgaaattagtaaaacagaattctctttattcttttagtgaccactatactcattttgaaagagttgtgaaggctcttctgatcaacgctttagatgaatcttttctgggaacattatatgatggcacaaggcaaaaatcatatgcaaaagatatgctaacatctcttcattatttggataaccgctttgttcagcctcgtctagagagcttggtatctagaagtcgttggaaagagcaatataaggagcgagtagaaaattattctaatgtaagtattcatttgaagaatcctgaaaactgttcctgccaggcttgtggactgcatcgctactgtaaatattcagtgcatttatcaggagagttgtataacaccaggaccatgcaaatagataatttcatgtcacatgataaacaggtgttcactgttggcagaatttgtgccagccgtaccagaatttatcataaactgaaacattttaaattcaaactataccaggaatgttgcaccattgcaatgacagaagaagttgaagatgaacaagttaaagaaacagtggaaagaattttcaggcggtcaaaagaaaatggctggattaaggagaaatatggtcaacttgaagaatatctcaattttgcggattactttcaagaagagaagtttgagttgtaacacatttccatcagagaagattttttaaattcctgtaaatgtgaagatcatgattcttgtttttctgtatcatgtgacatgtttgtacattttatctatatcttcatggcaaaatattttgtttaaaacatgattatcttaattcctgtgaagtggcactctacactctaattaaacttttatctgatgtacataaaagcattatcttaatttttaagtctgtaaatatattttaaagttatataataatggctttataacagatgactgtcaagtgaatgagctgttgatatcctgtcagtttagtcaaaatatattgtatcttaaaaatgtatttagactaacgtctacatgtatttttacggaattcctggccagatctgtttattcttttacagtattaaatgattttcactaatatattttttactgctatcatctaaatcagtgggccatggaagaaacctcatatatcattcagttcaatcccattgcttcagaatcagatcatagcatatctattctaagtagaggaatgcttttttccttttcttgaaagtttctctttcaaatagatttcaggcctctagagtctttcaaccctcacattcaggaataattttatgtaaattttcatgctttataatgttcttacttttttctattcaattttgtctatatattgatgattaagatgtattttatttatttttatccatagctttttccatataagtatgtatcttagggtcagaactgctgaaagagacaaactcagccaaaaacacttggaaagcatattttggtatctgcattgctttgcatatctaaattttcccataaagtaataaagtaaaatggttgcagaggaaaaaaaaagaaaaaaaaa

SEQ ID NO: 2400 - DNA, 1334 bp, Homo sapiens
cgccgcgtgcgcctgcagacgctccgctcgctgccttctctcctggcaggcgctgccttttctccccgttaaagggcacttgggctgaaggatcgctttgagatctgaggaacccgcagcgctttgagggacctgaagctgtttttcttcgttttcctttgggttcagtttgaacgggaggtttttgatccctttttttcagaatggattatttgctcatgattttctctctgctgtttgtggcttgccaaggagctccagaaacagcagtcttaggcgctgagctcagcgcggtgggtgagaacggcggggagaaacccactcccagtccaccctggcggctccgccggtccaagcgctgctcctgctcgtccctgatggataaagagtgtgtctacttctgccacctggacatcatttgggtcaacactcccgagcacgttgttccgtatggacttggaagccctaggtccaagagagccttggagaatttacttcccacaaaggcaacagaccgtgagaatagatgccaatgtgctagccaaaaagacaagaagtgctggaatttttgccaagcaggaaaagaactcagggctgaagacattatggagaaagactggaataatcataagaaaggaaaagactgttccaagcttgggaaaaagtgtatttatcagcagttagtgagaggaagaaaaatcagaagaagttcagaggaacacctaagacaaaccaggtcggagaccatgagaaacagcgtcaaatcatcttttcatgatcccaagctgaaaggcaatccctccagagagcgttatgtgacccacaaccgagcacattggtgacagaccttcggggcctgtctgaagccatagcctccacggagagccctgtggccgactctgcactctccaccctggctgggatcagagcaggagcatcctctgctggttcctgactggcaaaggaccagcgtcctcgttcaaaacattccaagaaaggttaaggagttcccccaaccatcttcactggcttccatcagtggtaactgctttggtctcttctttcatctggggatgacaatggacctctcagcagaaacacacagtcacattcgaattcgggtggcatcctccggagagagagagaggaaggagattccacacaggggtggagtttctgacgaaggtcctaagggagtgtttgtgtctgactcaggcgcctggcacatttcagggagaaactccaaagtccacacaaagattttctaaggaatgcacaaattgaaaacacactcaaaagacaaacatgcaagtaaagaaaaaaaaaaaaaaaaa

SEQ ID NO: 2401 - DNA, 5198 bp, Homo sapiens
gcagcgggcaggcaagggcggccgagcgggcggcgggcatgagcggggcgggcagggcgctggccgcgctgctgctggccgcgtccgtgctgagcgccgcgctgctggcccccggcggctcttcggggcgcgatgcccaggccgcgccgccacgagacttagacaaaaaaagacatgcagagctgaagatggatcaggctttgctactcatccataatgaacttctctggaccaacttgaccgtctactggaaatctgaatgctgttatcactgcttgtttcaggttctggtaaacgttcctcagagtccaaaagcagggaagcctagtgctgcagctgcctctgtcagcacccagcacggatctatcctgcagctgaacgacaccttggaagagaaagaagtttgtaggttggaatacagatttggagaatttggaaactattctctcttggtaaagaacatccataatggagttagtgaaattgcctgtgacctggctgtgaacgaggatccagttgatagtaaccttcctgtgagcattgcattccttattggtcttgctgtcatcattgtgatatcctttctgaggctcttgttgagtttggatgactttaacaattggatttctaaagccataagttctcgagaaactgatcgcctcatcaattctgagctgggatctcccagcaggacagaccctctcgatggtgatgttcagccagcaacgtggcgtctatctgccctgccgccccgcctccgcagcgtggacaccttcagggggattgctcttatactcatggtctttgtcaattatggaggaggaaaatattggtacttcaaacatgcaagttggaatgggctgacagtggctgacctcgtgttcccgtggtttgtatttattatgggatcttccatttttctatcgatgacttctatactgcaacgggggtgttcaaaattcagattgctggggaagattgcatggaggagtttcctgttaatctgcataggaattatcattgtgaatcccaattattgccttggtccattgtcttgggacaaggtgcgcattcctggtgtgctgcagcgattgggagtgacatactttgtggttgctgtgttggagctcctctttgctaaacctgtgcctgaacattgtgcctcggagaggagctgcctttctcttcgagacatcacgtccagctggccccagtggctgctcatcctggtgctggaaggcctgtggctgggcttgacattcctcctgccagtccctgggtgccctactggttatcttggtcctgggggcattggagattttggcaagtatccaaattgcactggaggagctgcaggctacatcgaccgcctgctgctgggagacgatcacctttaccagcacccatcttctgctgtactttaccacaccgaggtggcctatgaccccgagggcatcctgggcaccatcaactccatcgtgatggcctttttaggagttcaggcaggaaaaatactattgtattacaaggctcggaccaaagacatcctgattcgattcactgcttggtgttgtattcttgggctcatttctgttgctctgacgaaggtttctgaaaatgaaggctttattccagtaaacaaaaatctctggtccctttcgtatgtcactacgctcagttcttttgccttcttcatcctgctggtcctgtacccagttgtggatgtgaaggggctgtggacaggaaccccattcttttatccaggaatgaattccattctggtatatgtcggccacgaggtgtttgagaactacttcccctttcagtggaagctgaaggacaaccagtcccacaaggagcacctgactcagaacatcgtcgccactgccctctgggtgctcattgcctacatcctctatagaaagaagattttttggaaaatctgatggctcccactgagatgtgctgctggaagactctagtaggcctgcagggaggactgaagcagcctttgttaaagggaagcattcattaggaaattgactggctgcgtgtttacagactctgggggaagacactgatgtcctcaaactggttaactgtgacacggctcgccagaactctgcctgtctatttgtgacttacagatttgaaatgtaattgtcttttttcctccatcttctgtggaaatggatgtctttggaacttcattccgaggagataagctttaactttccaaaagggaattgccatgggtgtttttcttctgtggtgagtgaaacaatctgaggtctggttcttgctgaccttgttgccctgcaaacttcctttccacgtgtacgcgcacaccaacacgaaatgccatcactcctactgcggctgctatgaagcttactggttgtgatgtgttataatttagtctgtttttttgattgaatgcagtttaatgtttccagaaagccaaagtaattttcttttcagatatgcaaggctttggtgggtccaaaaaatgtctatcacaagccattttttccttttcctctctcgaaaagttaaaatatctatgtgttattcccaaaccctcttacctatgtatctgcctgtctgtccatcatcttccttcctccctatctctgtgtatctggatggcagccgctgcccaggggagtggctgtggggagggcaggtactgtctttgcctgtgggtccagctgagccatccctgctgggtgatgctgggcaagacccttggcccgtctgggccttggcttcctcacttgtgaaatgagcgggaagatgactctcagttccttccacctcttagacatggtgaggtaacagacatcaaaagcttttctgaaatcttcagaagaaatagttccattacagaaaactcttcaaaataaatagtagtgaaaacttttaaaaactctcattggagtaagtcttttcaagatgatcctccacaatggaggcagcgttcctacttgtcatcacacagctgaagacattgtttcttaggtgtgaaatcggggacaaaggacaaacagagacacacggcattgttcatgggaggcatcgtcaccctcctgggtgttctgtgggaatttcctgtgtgaggaaaacgtggccacagggttgtgctgtacccacccttccccggcgagatggccctcggcctgtgccgctgcttccaccctcgccactccatggcagcttttggtctgtttccggctctgccctctgccctgaactctcatccggcttgtacctgcctgctggacccctccacctggaggccagcccatgtctcaggcccagccctagcctcttctcctcaaattctaagtgttttctctttaggtttccctggctttgtgaatggatcatgtgtctctaggtataaacctgacatcatctttccacccggcttacctccaccagatctccccagttctgtctccatcttctacctgcagctgctctgttctcatggtcactgctgcatcactgagtctggacccttgttatcattttcaaactggcctccttccctcgttccccacttcttaaagtcacctgtccattgccaccagattaagctttctccagccagatcacctctctctgagaaacctccattgacatggaaacaccattgtctggcacacatactcacatactcaccttcccgtcttgatccccacacatctttccagcctcccctcccactccactccctgctctctcctccacctccccatcctcttgtctcccctcccctctgaatccagcccagcggggcttctcctgcctccatcacatcacagaagtacctcctgcttctggttttaattagagccttccccgattacattttcctctgaattttttcctatctacatttgatctgtcatgtttaaaccccctacttctaagggaacttctctaatctcttatcctcatccccaaatagtgttttcttcctctgggttcttataatgttggtatcaatctcacagcatttagtgcttcctgcctggtgtgacagttacctgtgtgcatgtgcaatttctaatttcccacgctagactgtgagcttcctaaggcaagaatcatgccttgttggtttctgtattcctcatggtgccaaacacagtgccttctacattgcaggcgctgaataaacatttttaaagcaaaatgatgtggatttttaaaataaatatttaagtgctggtaagatgagcatgtatccggggtgcccatgaaatgttcttggggccgtgtggggacagtcgtcattcctcctcctgccacccttttctttcagtgagtcactgtggatggtcccagctgtgtcatcccaaagttcagcagggaaagctgagctgggcctctccaggtgagttttctagaagcatttctcaaactgtgggttacatcaacttgggtgtcttgagctgtaaggaaggaactccggagtcagctgggctacaggggagcttctctaagtcctgcgggaggccagacccagcctgagcttgctgttagctagcggaggcagctgctggtggcccaggtgctcgacaccaggcatcccctctcctcccacgaagggtgtgccataatccccttcaacaggaaatgcttcccagaagcctctcagcagcctcccctcctgtcctatcagctagaagcgcctcgcttgtcccaagaccagcagggacagggaactgtccgagcccgtggctgtgtggaggaaggcgacccccagcacaagattggtttcctttgggaagggaagagggagtgtgttggggtaaggggtagagcagaggaatggtcagggggcaacaaccgctgacagctgcaacaggtgcatggcatctcacagggaggcagggaggtgcgagctcctaagtaatggagcaaaaaaattctattctgtagaatggggagagaaaatgtgacattttaatttttttttgcatttatattcctaattcctacttaaagtgaatatactgccgctgtagatcataaaatgtatcttttccatggccaacaaggggcatcttttataaatgcataataacccagtttgtatcaaagggtatcgacttaagtgaaatttcaacatgctgttactttttccttttaatgtaattctgttttccaaataaatgggggagaca

SEQ ID NO: 2402 - DNA, 5691 bp, Homo sapiens
atgggtgtgcacactcctcgacctgctcccttccacttcgtcagcctggccgggggctctttcaagaggtggggccgcttggtggcttctaagtcgtgcctctccctctgggtaataaacgccttgggggcagggactttgcagtcttgcttattgaggcgttttccaaaacagggaccgagggctctaacacccgtgcggagggtggccggcgggggcgggagtttggcagaatgcggctggagaagaggccgcggatcgggacgccgggaccccacaaactggcagccaggaggcgggccagccgaggatcgggggggctcggactccccctgcacccagtccactgttcggagggacttagagcagggtcccttccctgagggcctcgcccccgaggacgtggcgccggagccgtgcgacccattggcttcagcgggtgggaagcctggggccgggacgcgcgttcgccccgcgctggggttgaacctgcgtggatgtgcggcgggtgaggaaccgcggagaaggcggtcagctgctgtgtgggaaggtgacagctttttcttgaagctgaacatcaagctcagtttcgaggtcatatttgatgacttatttgatggcttagtaattgggtcctttggtcgtgtctacttagacaaaaaaagacatgcagagctgaagatggatcaggctttgctactcatccataatgaacttctctggaccaacttgaccgtctactggaaatctgaatgctgttatcactgcttgtttcaggttctggtaaacgttcctcagagtccaaaagcagggaagcctagtgctgcagctgcctctgtcagcacccagcacggatctatcctgcagctgaacgacaccttggaagagaaagaagtttgtaggttggaatacagatttggagaatttggaaactattctctcttggtaaagaacatccataatggagttagtgaaattgcctgtgacctggctgtgaacgaggatccagttgatagtaaccttcctgtgagcattgcattccttattggtcttgctgtcatcattgtgatatcctttctgaggctcttgttgagtttggatgactttaacaattggatttctaaagccataagttctcgagaaactgatcgcctcatcaattctgagctgggatctcccagcaggacagaccctctcgatggtgatgttcagccagcaacgtggcgtctatctgccctgccgccccgcctccgcagcgtggacaccttcagggggattgctcttatactcatggtctttgtcaattatggaggaggaaaatattggtacttcaaacatgcaagttggaatgggctgacagtggctgacctcgtgttcccgtggtttgtatttattatgggatcttccatttttctatcgatgacttctatactgcaacgggggtgttcaaaattcagattgctggggaagattgcatggaggagtttcctgttaatctgcataggaattatcattgtgaatcccaattattgccttggtccattgtcttgggacaaggtgcgcattcctggtgtgctgcagcgattgggagtgacatactttgtggttgctgtgttggagctcctctttgctaaacctgtgcctgaacattgtgcctcggagaggagctgcctttctcttcgagacatcacgtccagctggccccagtggctgctcatcctggtgctggaaggcctgtggctgggcttgacattcctcctgccagtccctgggtgccctactggttatcttggtcctgggggcattggagattttggcaagtatccaaattgcactggaggagctgcaggctacatcgaccgcctgctgctgggagacgatcacctttaccagcacccatcttctgctgtactttaccacaccgaggtggcctatgaccccgagggcatcctgggcaccatcaactccatcgtgatggcctttttaggagttcaggcaggaaaaatactattgtattacaaggctcggaccaaagacatcctgattcgattcactgcttggtgttgtattcttgggctcatttctgttgctctgacgaaggtttctgaaaatgaaggctttattccagtaaacaaaaatctctggtccctttcgtatgtcactacgctcagttcttttgccttcttcatcctgctggtcctgtacccagttgtggatgtgaaggggctgtggacaggaaccccattcttttatccaggaatgaattccattctggtatacgtcggccacgaggtgtttgagaactacttcccctttcagtggaagctgaaggacaaccagtcccacaaggagcacctgactcagaacatcgtcgccactgccctctgggtgctcattgcctacatcctctatagaaagaagattttttggaaaatctgatggctcccactgagatgtgctgctggaagactctagtaggcctgcagggaggactgaagcagcctttgttaaagggaagcattcattaggaaattgactggctgcgtgtttacagactctgggggaagacactgatgtcctcaaactggttaactgtgacacggctcgccagaactctgcctgtctatttgtgacttacagatttgaaatgtaattgtcttttttcctccatcttctgtggaaatggatgtctttggaacttcattccgaggagataagctttaactttccaaaagggaattgccatgggtgtttttcttctgtggtgagtgaaacaatctgaggtctggttcttgctgaccttgttgccctgcaaacttcctttccacgtgtacgcgcacaccaacacgaaatgccatcactcctactgcggctgctatgaagcttactggttgtgatgtgttataatttagtctgtttttttgattgaatgcagtttaatgtttccagaaagccaaagtaattttcttttcagatatgcaaggctttggtgggtccaaaaaatgtctatcacaagccattttttccttttcctctctcgaaaagttaaaatatctatgtgttattcccaaaccctcttacctatgtatctgcctgtctgtccatcatcttccttcctccctatctctgtgtatctggatggcagccgctgcccaggggagtggctgtggggagggcaggtactgtctttgcctgtgggtccagctgagccatccctgctgggtgatgctgggcaagacccttggcccgtctgggccttggcttcctcacttgtgaaatgagcgggaagatgactctcagttccttccacctcttagacatggtgaggtaacagacatcaaaagcttttctgaaatcttcagaagaaatagttccattacagaaaactcttcaaaataaatagtagtgaaaacttttaaaaactctcattggagtaagtcttttcaagatgatcctccacaatggaggcagcgttcctacttgtcatcacacagctgaagacattgtttcttaggtgtgaaatcggggacaaaggacaaacagagacacacggcattgttcatgggaggcatcgtcaccctcctgggtgttctgtgggaatttcctgtgtgaggaaaacgtggccacagggttgtgctgtacccacccttccccggcgagatggccctcggcctgtgccgctgcttccaccctcgccactccatggcagcttttggtctgtttccggctctgccctctgccctgaactctcatccggcttgtacctgcctgctggacccctccacctggaggccagcccatgtctcaggcccagccctagcctcttctcctcaaattctaagtgttttctctttaggtttccctggctttgtgaatggatcatgtgtctctaggtataaacctgacatcatctttccacccggcttacctccaccagatctccccagttctgtctccatcttctacctgcagctgctctgttctcatggtcactgctgcatcactgagtctggacccttgttatcattttcaaactggcctccttccctcgttccccacttcttaaagtcacctgtccattgccaccagattaagctttctccagccagatcacctctctctgagaaacctccattgacatggaaacaccattgtctggcacacatactcacatactcaccttcccgtcttgatccccacacatctttccagcctcccctcccactccactccctgctctctcctccacctccccatcctcttgtctcccctcccctctgaatccagcccagcggggcttctcctgcctccatcacatcacagaagtacctcctgcttctggttttaattagagccttccccgattacattttcctctgaattttttcctatctacatttgatctgtcatgtttaaaccccctacttctaagggaacttctctaatctcttatcctcatccccaaatagtgttttcttcctctgggttcttataatgttggtatcaatctcacagcatttagtgcttcctgcctggtgtgacagttacctgtgtgcatgtgcaatttctaatttcccacgctagactgtgagcttcctaaggcaagaatcatgccttgttggtttctgtattcctcatggtgccaaacacagtgccttctacattgcaggcgctgaataaacatttttaaagcaaaatgatgtggatttttaaaataaatatttaagtgctggtaagatgagcatgtatccggggtgcccatgaaatgttcttggggccgtgtggggacagtcgtcattcctcctcctgccacccttttctttcagtgagtcactgtggatggtcccagctgtgtcatcccaaagttcagcagggaaagctgagctgggcctctccaggtgagttttctagaagcatttctcaaactgtgggttacatcaacttgggtgtcttgagctgtaaggaaggaactccggagtcagctgggctacaggggagcttctctaagtcctgcgggaggccagacccagcctgagcttgctgttagctagcggaggcagctgctggtggcccaggtgctcgacaccaggcatcccctctcctcccacgaagggtgtgccataatccccttcaacaggaaatgcttcccagaagcctctcagcagcctcccctcctgtcctatcagctagaagcgcctcgcttgtcccaagaccagcagggacagggaactgtccgagcccgtggctgtgtggaggaaggcgacccccagcacaagattggtttcctttgggaagggaagagggagtgtgttggggtaaggggtagagcagaggaatggtcagggggcaacaaccgctgacagctgcaacaggtgcatggcatctcacagggaggcagggaggtgcgagctcctaagtaatggagcaaaaaaattctattctgtagaatggggagagaaaatgtgacattttaatttttttttgcatttatattcctaattcctacttaaagtgaatatactgccgctgtagatcataaaatgtatcttttccatggccaacaaggggcatcttttataaatgcataataacccagtttgtatcaaagggtatcgacttaagtgaaatttcaacatgctgttactttttccttttaatgtaattctgttttccaaataaatgggggagaca

SEQ ID NO: 2403 - DNA, 1400 bp, Homo sapiens
agagacgtggcagcggagggataatcggggcggccggggctgaagggagaggcgcaggagccctggggagagtggtccctgcccttccgcgcctcgagccatcgctaccgcccttcggaaccagtgcagcggccgatcagtaaacacagagactggggatcgatcatggggctttgtaagtgccccaagagaaaggtgaccaacctgttctgcttcgaacatcgggtcaacgtctgcgagcactgcctggtagccaatcacgccaagtgcatcgtccagtcctacctgcaatggctccaagatagcgactacaaccccaattgccgcctgtgcaacatacccctggccagccgagagacgacccgccttgtctgctatgatctctttcactgggcctgcctcaatgaacgtgctgcccagctaccccgaaacacggcacctgccggctatcagtgccccagctgcaatggccccatcttccccccaaccaacctggctggccccgtggcctccgcactgagagagaagctggccacagtcaactgggcccgggcaggactgggcctccctctgatcgatgaggtggtgagcccagagcccgagcccctcaacacgtctgacttctctgactggtctagttttaatgccagcagtacccctggaccagaggaggtagacagcgcctctgctgccccagccttctacagccaggccccccggcccccagcttccccaggccggcccgagcagcacacagtgatccacatgggcaatcctgagcccttgactcacgcccctaggaaggtgtatgatacgcgggatgatgaccggacaccaggcctccatggagactgtgacgatgacaagtaccgacgtcggccggccttgggttggctggcccggctgctaaggagccgggctgggtctcggaagcggccgctgaccctgctccagcgggcggggctgctgctactcttgggactgctgggcttcctggccctccttgccctcatgtctcgcctaggccgggccgcagctgacagcgatcccaacctggacccactcatgaaccctcacatccgcgtgggcccctcctgagcccccttgcttgtggctaggccagcctaggatgtgggttctgtggaggagaggcggggtaatggggaggctgagggcacctcttcactgcccctctccctcaagcctaagacactaagaccccagacccaaagccaagtccaccagagtggctgcaggccaggcctggagtccccgtgggtcaagcatttgtcttgacttgctttcctcccgggtctccagcctccgacccctcgccccatgaaggagctggcaggtggaaataaacaacaactttattaaaacaccaaaaaaaaaaaaaa

SEQ ID NO: 2404 - DNA, 3433 bp, Homo sapiens
ggcgcggctggtgcgctcgagaagcgatggcggcggcctgaactcacctaacaccgcagcagcaaccgggcccggccaggttcggcgttccgtgagtgaacgatttagaaatctggactggccagtgacctctgggcttgccattccagcctggtataacctctggctccatgggcagctactggctcctacagaccggatgaagcagactggagacacaagtggagaaaacctccagctggcaaatcctcagagtgtaggcctctggctgccagtcctgcccagcctgcctcatggagaggatgaattggctgagcagactggcctcccggggccctgggcaccgtatacctcaaggggccaatctccaaaccccagtcatggctgatcccgagacctgcctcatggtcttcaagaatcactggtcccaggtggtgcgaatcctggagcggcaaggccctcgggcagctcctgggggtgcagacgatctcagtgctgtgcgcaaccacacttaccagatgttgacactgctggcagaggaccgtgcagttccctcggcccccacaggccctgggtccctgctggagtttgctctgcacgaggatctgctgacccgtgtgttgacatggcagctgcaatgggatgagcttggggatggggtcgaggaacggcgggctgagcaactgaaactatttgaagtgctagtgagcgaagctcgccagccactgttgcggcatggtccagttcgtgaggctctgctcaccctgctggatgcctgtggccgccctgtgcccagtagcccagcactggatgaaggcttggtgctacttctcagccagctgtgtgtttgtgtggcccaggagccttcattgctcgagttcttcctgcagccacctcctgagcctggagccgctccccgtcttcttctcttttctcgccttgtcccttttgtgcatcgagagggcaccctgggccagcaggcccgtgatgccctacttcttctcatggctttgtcagctgggagccccactgtgggccgctacatcgcggatcactcttacttctgcccggtgctggccacagggctcagtgccctgtactcatcactgcctcgaaagattgaggttccaggggatgattggcactgtctgcgacgggaagactggctgggagtgccagcccttgcactcttcatgagttccctggagttctgcaatgcagtaattcaggtggctcaccccctggtgcagaagcagttggttgattatatccataatgggttcctggtgcctgtcatgggtcctgccttgcacaagacctctgtggaggagatgatcgccagtaccgcctacctggaacttttcctacggagtatctcagagcctgctttgctccgtaccttcctgcgattcctgttgttgcaccggcatgacacccacaccatcctcgacaccctcgttgctcgtattggcagtaactcccggctctgcatggtctctctgagtctcttcaggaccctcctgaacctcagctgtgaggatgtcctgctgcagctggttctcaggtatcttgttccatgtaaccacgttatgctgagccagaagccggctgttcgtgatgtggacctatatggacgagcagctgacaagtttctctccctaatcccacgctgttgtcggcaccacgcccccagcccacctcgtccagagcatgcctcatgggcacgaggtgggcctagcagagagacagggagaagggaggacatcacgggtcctggaagcccaagtgtggactcctcttctgtgacgacagtaccccggccctccacaccatctcgtctggttctcttcctgcggcagcagagcctgggtggctctgagtctccaggcccagccccttgctcaccagggctttctgcatcccccgcctccagccctggccgacggcctacccctgcagaggagcctggagagctggaagacaattacctggagtatctgcgtgaggcacgtcgtggtgtggaccgctgtgtccgagcctgccgtacctggtctgccccctatgatggcgagcggccctctcctgagcccagtccttttggctcccggactaagaaacgcagcctactgcctgaggaggacaggaacaacgtgggggaaggggaggaggaagagctggggaggagggggcgggctgggggtgcaggggagggccctggtcacctgccccctccccagctcaatggagtgccaggatcatggcctgagggggccaagaaggttcgtctggtgccaaaggagggagctggggaactgctagagggcatctccgagggcatggcaggactagagggctttgggcaggagctccgggagctagaggtggcattgagcaatgggggaactggctcagagtcccccttagaacctccactgccccttgaggaggaggaggcctacgagagcttcacctgtccccctgagccccctggccccttcctcagcagccctttgcggactctcaaccagctgccaagccagcccttcactggccccttcatggctgtgctctttgccaaactcgagaacatgctgcagaactccgtctatgtcaacttcctgctgacggggctggtggcccagctggcctgtcacccccagcccctgctccgctctttcctgctcaacaccaacatggtcttccagcccagtgtcaagtccctgctgcaggtgctgggctctgtgaagaataagattgagaactttgcggcttcccaggaggacttcccagcactgctgtccaaagccaagaagtacctcattgcccgtggcaagttggactgggctgagggccctgcagcaggacctgccccacgccgttctgatcccctagtgaagagccggaggccatccttgggggagttactcctgcggcatgcacacagtccaaccagggcccggcaggcggcacaattggtccttcagcctgggcgagacggagcaggacttggcctaagtgggggctcccctggggcttcaactccagttctactcacccggggcggggcccctgaacgccaaggtgaggctcttcgagtcaagaatgctgtctactgtgcagtcattttccctgaatttctcaaggagttggctgccatctcccaggctcatgccgtcacctcgcctttcttgttggagacttcagaggaaggatctggccctctcatctcaggctgtgggcccctcaatccttaactttcttccatggacaatcagggccatgggtggcccgggctggggctagggcacaggctcctttttatgtttggaggcagtgacaaaaggactttttaatttatttcagatgaatgttttatggagaacttgttgcaatatgtataaaagggaaatctccaaaaaaaaaaaaaaaaaaa

SEQ ID NO: 2405 - DNA, 1609 bp, Homo sapiens
gggattggagtgctctgctccggacgcactacgtaggtgggcctgcgggagttctgagtgcgacggcgcaggtctgcaccatggcggcccggcttgtcagccgatgcggggctgtgcgtgcagctccccacagcggcccgctggtgtcctggcgcaggtggtccggcgcctcaacagacaccgtgtatgacgtggtggtgtcgggtggaggcctggtgggcgctgccatggcctgtgccttgggatatgatattcactttcatgacaagaaaatcctgttgctcgaagcaggtccaaagaaagtactggagaaattgtcagaaacttacagcaacagggtcagctccatttcccctggctctgcaacgcttctcagtagttttggtgcctgggaccatatctgcaacatgagatacagagcctttcggcgaatgcaggtgtgggacgcctgctcagaggccctgataatgtttgataaggataatttagatgacatgggctatatcgtggagaatgatgtcatcatgcatgctctcactaagcagttggaggctgtgtctgaccgagtgacggttctctacaggagcaaagccattcgctatacctggccttgtccatttcctatggccgactccagcccttgggttcatattaccctaggtgatggcagcaccttccagaccaaattgttgataggtgcagatggtcacaactccggagtacggcaggctgttggaatccagaatgtgagctggaactatgaccagtctgctgttgtggctactctgcatttatcagaggccacagaaaacaacgtagcctggcagagatttcttccctctgggcctattgctctgctcccgctctcagacaccttgagttccttggtttggtccacgtcccatgaacatgcagcagagctagttagcatggatgaggaaaaatttgtggatgccgttaactctgccttttggagtgatgctgaccacacggacttcatcgacacagctggtgccatgctgcagtatgctgtcagccttctgaagcccactaaggtctcggctcgccagctgcccccaagcgtagccagggtggatgccaaaagccgagttctgtttcctcttgggttgggacatgctgctgagtacgtcaggcctcgggtggcgctcattggggatgcagcccacagagtccatccgcttgcaggacagggtgtcaacatgggctttggggatatctccagcttggcccatcacctcagtacggcagccttcaatgggaaggacttaggttccgtgagccacctcacaggttatgaaacagaaagacagcgtcacaacactgctcttctggctgctacagacttactaaaaaggctctattctaccagtgcctccccgcttgtgttgctcaggacgtggggcttgcaggccacaaatgcagtgtctccactcaaagaacagattatggcctttgcaagcaaatgagtactcctctcctaaagaaagattacgttgatgaaaaagaacatcctgcccaggacccatcatacatattttcaagatcttatttaatttaataaacttactttacattaaaaaaaaaaaaa

SEQ ID NO: 2406 - DNA, 1553 bp, Homo sapiens
ctttcccgggggcagtctcttttctctcctcacctgacggctcccctccgcgcctccgggggctccctcaggcctccccacggtcatttcagctggacagaggcagcagcgacagtgacagcgatagtggcagcagcggtggcagcgagagctatgcggggccagggtccacccctttctagctttggcgtctggttggcttccagggcagcctccgatccatcccgcccgaggaggcaaggatatgatattcactttcatgacaagaaaatcctgttgctcgaagcaggtccaaagaaagtactggagaaattgtcagaaacttacagcaacagggtcagctccatttcccctggctctgcaacgcttctcagtagtgtgggacgcctgctcagaggccctgataatgtttgataaggataatttagatgacatgggctatatcgtggagaatgatgtcatcatgcatgctctcactaagcagttggaggctgtgtctgaccgagtgacggttctctacaggagcaaagccattcgctatacctggccttgtccatttcctatggccgactccagcccttgggttcatattaccctaggtgatggcagcaccttccagaccaaattgttgataggtgcagatggtcacaactccggagtacggcaggctgttggaatccagaatgtgagctggaactatgaccagtctgctgttgtggctactctgcatttatcagaggccacagaaaacaacgtagcctggcagagatttcttccctctgggcctattgctctgctcccgctctcagacaccttgagttccttggtttggtccacgtcccatgaacatgcagcagagctagttagcatggatgaggaaaaatttgtggatgccgttaactctgccttttggagtgatgctgaccacacggacttcatcgacacagctggtgccatgctgcagtatgctgtcagccttctgaagcccactaaggtctcggctcgccagctgcccccaagcgtagccagggtggatgccaaaagccgagttctgtttcctcttgggttgggacatgctgctgagtacgtcaggcctcgggtggcgctcattggggatgcagcccacagagtccatccgcttgcaggacagggtgtcaacatgggctttggggatatctccagcttggcccatcacctcagtacggcagccttcaatgggaaggacttaggttccgtgagccacctcacaggttatgaaacagaaagacagcgtcacaacactgctcttctggctgctacagacttactaaaaaggctctattctaccagtgcctccccgcttgtgttgctcaggacgtggggcttgcaggccacaaatgcagtgtctccactcaaagaacagattatggcctttgcaagcaaatgagtactcctctcctaaagaaagattacgttgatgaaaaagaacatcctgcccaggacccatcatacatattttcaagatcttatttaatttaataaacttactttacattaaaaaaaaaaaaaaaaaa

SEQ ID NO: 2407 - DNA, 2283 bp, Homo sapiens
tttccgcgttctcccctctccgcgggcagtgctagctcgccgcggccgcctccggggaccacctggcttcatgtgtggatttccacggctcttgcccagaggcgggtacactgtgttccaatgtgccacggaactcacgcagtggcactttgtggcttcatgaaggaagaggcaggccacgcaacacttcctccccaagccaaggagaagtatcacttttagaggcagaggagcggaaggcagtgggtgtgaccaaaagtgccatttgttaaagactgttggagcagaactactgagaaaaaccaggcattgtatcttcagttgtcatcaagttcgcaatcagattggaaaagctcaacttgaagctttcttgcctgcagtgaagcagagagatagatattattcacgtaataaaaaacatgggcttcaacctgactttccacctttcctacaaattccgattactgttgctgttgactttgtgcctgacagtggttgggtgggccaccagtaactacttcgtgggtgccattcaagagattcctaaagcaaaggagttcatggctaatttccataagaccctcattttggggaagggaaaaactctgactaatgaagcatccacgaagaaggtagaacttgacaactgcccttctgtgtctccttacctcagaggccagagcaagctcattttcaaaccagatctcactttggaagaggtacaggcagaaaatcccaaagtgtccagaggccggtatcgccctcaggaatgtaaagctttacagagggtcgccatcctcgttccccaccggaacagagagaaacacctgatgtacctgctggaacatctgcatcccttcctgcagaggcagcagctggattatggcatctacgtcatccaccaggctgaaggtaaaaagtttaatcgagccaaactcttgaatgtgggctatctagaagccctcaaggaagaaaattgggactgctttatattccacgatgtggacctggtacccgagaatgactttaacctttacaagtgtgaggagcatcccaagcatctggtggttggcaggaacagcactgggtacaggttacgttacagtggatattttgggggtgttactgccctaagcagagagcagtttttcaaggtgaatggattctctaacaactactggggatggggaggcgaagacgatgacctcagactcagggttgagctccaaagaatgaaaatttcccggcccctgcctgaagtgggtaaatatacaatggtcttccacactagagacaaaggcaatgaggtgaacgcagaacggatgaagctcttacaccaagtgtcacgagtctggagaacagatgggttgagtagttgttcttataaattagtatctgtggaacacaatcctttatatatcaacatcacagtggatttctggtttggtgcatgaccctgggtcttttggtgatgtttggaagaactgattctttgtttgcaataattttggcctagagacttcaaatagtagcacacattaagaacctgttacagctcattgttgagctgaatttttcctttttgtattttcttagcagagctcctggtgatgtagagtataaaacagttgtaacaagacagctttcttagtcattttgatcatgagggttaaatattgtaatatggatacttgaaggactttatataaaaggatgactcaaaggataaaatgaacgctatttgaggactctggttgaaggagatttatttaaatttgaagtaatatattatgggataaaaggccacaggaaataagactgctgaatgtctgagagaaccagagttgttctcgtccaaggtagaaaggtacgaagatacaatactgttattcatttatcctgtacaatcatctgtgaagtggtggtgtcaggtgagaaggcgtccacaaaagaggggagaaaaggcgacgaatcaggacacagtgaacttgggaatgaagaggtagcaggagggtggagtgtcggctgcaaaggcagcagtagctgagctggttgcagctgctgatagccttcaggggaggacctgcccaggtatgccttccagtgatgcccaccagagaatacattctctattagtttttaaagagtttttgtaaaatgattttgtacaagtaggatatgaattagcagtttacaagtttacatattaactaataataaatatgtctatcaaatacctctgtagtaaaatgtgaaaaagcaaaaaaaaaaaaaaaaaaaaaa

SEQ ID NO: 2408 - DNA, 2366 bp, Homo sapiens
tttccgcgttctcccctctccgcgggcagtgctagctcgccgcggccgcctccggggaccacctggcttcatgtgtggatttccacggctcttgcccagaggcgggtacactgtgttccaatgtgccacggaactcacgcagtggcactttgtggcttcatgaaggaagaggcaggccacgcaacacttcctccccaagccaaggagaagtatcacttttagaggcagaggagcggaaggcagtgggtgtgaccaaaagtgccatttgttaaagcttatcttccttgccagattttaaaaactattatggaaaatctcaagcattcacaaaagtagagagaaagaaaggactctcagactgttggagcagaactactgagaaaaaccaggcattgtatcttcagttgtcatcaagttcgcaatcagattggaaaagctcaacttgaagctttcttgcctgcagtgaagcagagagatagatattattcacgtaataaaaaacatgggcttcaacctgactttccacctttcctacaaattccgattactgttgctgttgactttgtgcctgacagtggttgggtgggccaccagtaactacttcgtgggtgccattcaagagattcctaaagcaaaggagttcatggctaatttccataagaccctcattttggggaagggaaaaactctgactaatgaagcatccacgaagaaggtagaacttgacaactgcccttctgtgtctccttacctcagaggccagagcaagctcattttcaaaccagatctcactttggaagaggtacaggcagaaaatcccaaagtgtccagaggccggtatcgccctcaggaatgtaaagctttacagagggtcgccatcctcgttccccaccggaacagagagaaacacctgatgtacctgctggaacatctgcatcccttcctgcagaggcagcagctggattatggcatctacgtcatccaccaggctgaaggtaaaaagtttaatcgagccaaactcttgaatgtgggctatctagaagccctcaaggaagaaaattgggactgctttatattccacgatgtggacctggtacccgagaatgactttaacctttacaagtgtgaggagcatcccaagcatctggtggttggcaggaacagcactgggtacaggttacgttacagtggatattttgggggtgttactgccctaagcagagagcagtttttcaaggtgaatggattctctaacaactactggggatggggaggcgaagacgatgacctcagactcagggttgagctccaaagaatgaaaatttcccggcccctgcctgaagtgggtaaatatacaatggtcttccacactagagacaaaggcaatgaggtgaacgcagaacggatgaagctcttacaccaagtgtcacgagtctggagaacagatgggttgagtagttgttcttataaattagtatctgtggaacacaatcctttatatatcaacatcacagtggatttctggtttggtgcatgaccctgggtcttttggtgatgtttggaagaactgattctttgtttgcaataattttggcctagagacttcaaatagtagcacacattaagaacctgttacagctcattgttgagctgaatttttcctttttgtattttcttagcagagctcctggtgatgtagagtataaaacagttgtaacaagacagctttcttagtcattttgatcatgagggttaaatattgtaatatggatacttgaaggactttatataaaaggatgactcaaaggataaaatgaacgctatttgaggactctggttgaaggagatttatttaaatttgaagtaatatattatgggataaaaggccacaggaaataagactgctgaatgtctgagagaaccagagttgttctcgtccaaggtagaaaggtacgaagatacaatactgttattcatttatcctgtacaatcatctgtgaagtggtggtgtcaggtgagaaggcgtccacaaaagaggggagaaaaggcgacgaatcaggacacagtgaacttgggaatgaagaggtagcaggagggtggagtgtcggctgcaaaggcagcagtagctgagctggttgcagctgctgatagccttcaggggaggacctgcccaggtatgccttccagtgatgcccaccagagaatacattctctattagtttttaaagagtttttgtaaaatgattttgtacaagtaggatatgaattagcagtttacaagtttacatattaactaataataaatatgtctatcaaatacctctgtagtaaaatgtgaaaaagcaaaaaaaaaaaaaaaaaaaaaa

SEQ ID NO: 2409 - DNA, 3403 bp, Homo sapiens
gattccagaagatactgtctggcgtgaaattagtctcagtagaaacataagtcccgcgcgtcttgtgctgcgcgtgcgcaagcttttgggccctcccgagaaagggaagtgcattctcgcttccgtagcggtctccgccggttggggggaagtaattccggttgttgcaccatggcgtccatggggaccctcgccttcgatgaatatgggcgccctttcctcatcatcaaggatcaggaccgcaagtcccgtcttatgggacttgaggccctcaagtctcatataatggcagcaaaggctgtagcaaatacaatgagaacatcacttggaccaaatgggcttgataagatgatggtggataaggatggagatgtgactgtaactaatgatggggccaccatcttaagcatgatggatgttgatcatcagattgccaagctgatggtggaactgtccaagtctcaggatgatgaaattggagatggaaccacaggagtggttgtcctggctggtgccttgttagaagaagcggagcaattgctagaccgaggcattcacccaatcagaatagccgatggctatgagcaggctgctcgtgttgctattgaacacctggacaagatcagcgatagcgtccttgttgacataaaggacaccgaacccctgattcagacagcaaaaaccacgctgggctccaaagtggtcaacagttgtcaccgacagatggctgagattgctgtgaatgccgtcctcactgtagcagatatggagcggagagacgttgactttgagcttatcaaagtagaaggcaaagtgggcggcaggctggaggacactaaactgattaagggcgtgattgtggacaaggatttcagtcacccacagatgccaaaaaaagtggaagatgcgaagattgcaattctcacatgtccatttgaaccacccaaaccaaaaacaaagcataagctggatgtgacctctgtcgaagattataaagcccttcagaaatacgaaaaggagaaatttgaagagatgattcaacaaattaaagagactggtgctaacctagcaatttgtcagtggggctttgatgatgaagcaaatcacttacttcttcagaacaacttgcctgcggttcgctgggtaggaggacctgaaattgagctgattgccatcgcaacaggagggcggatcgtccccaggttctcagagctcacagccgagaagctgggctttgctggtcttgtacaggagatctcatttgggacaactaaggataaaatgctggtcatcgagcagtgtaagaactccagagctgtaaccatttttattagaggaggaaataagatgatcattgaggaggcgaaacgatcccttcacgatgctttgtgtgtcatccggaacctcatccgcgataatcgtgtggtgtatggaggaggggctgctgagatatcctgtgccctggcagttagccaagaggcggataagtgccccaccttagaacagtatgccatgagagcgtttgccgacgcactggaggtcatccccatggccctctctgaaaacagtggcatgaatcccatccagactatgaccgaagtccgagccagacaggtgaaggagatgaaccctgctcttggcatcgactgtttgcacaaggggacaaatgatatgaagcaacagcatgtcatagaaaccttgattggcaaaaagcaacagatatctcttgcaacacaaatggttagaatgattttgaagattgatgacattcgtaagcctggagaatctgaagaatgaagacattgagaaaactatgtagcaagatccacttctgtgattaagtaaatggatgtctcgtgatgcatctacagttatttattgttacatccttttccagacactgtagatgctataataaaaatagctgtttggtaaccatagtttcacttgttcaaagctgtgtaatcgtgggggtaccatctcaactgcttttgtattcattgtattaaaagaatctgtttaaacaacctttatcttctcttcgggtttaagaaacgtttattgtaacagtaattaaatgctgccttaattgaaggggtttgggtggatttttttttctcaaaataagctgtagggactattttaacagcttaaacaggagctctcaagatgcactttcatattgagaggaatatgggcttgatcctcttcctatctaaatgggtgggccatttgattgtagagggtccaccacagaattatgggatgccttaagtgctgttactaggttgctcacagcctaacctggcgtgttgtttagggctgatggagacccatgtgagcctttgctttcctctggccccggccccaccctgaacacagctcatacacagaatcaggaccagcatgtgcagagctggccaccagcacaggcttagggcagttcagaacccacttgtttccctatcagagggacacagtgaagtggaggttaaagtaaattacaggaaataagggagaaatcttgcagttaccatgttcagatagagtgactgaaattaattgtacttactaaagtattaactagctaacagtgatgggccaagacgctccgagaactctaccgggattgtctgttctgacaacccagtgaggcagatacactttcttactgctcacatcttacaggtgagtactcataattggccagcatctcaccaccagcaagtagtagggccaggtcaatcccaggcagtctgaccccagagtggcccagctcatcccctactctgttatttgcttgttaatgattctctagattttctaaaataatgtttcttagcattgtgatgataaagctcatgatgaactttatcactagttatgccaccttaactagtcagatttcctagaattaggaaatggtgactcttgtctaaatttggttaagtgatgaatttgggttaccgtctcatgtgaacctggagattcaccagtcttaacttttgggtcattgtgttttctctacattcatgcattggatgttttgctaaataactcctgtggatttaggaatgtgtgctaatagcaatcttcctaattttcatgtttatatggaactatgcagttgagtattgaaagctttaaactgagtttatttacaaggactgagtctagcctacagagaacatacagcagccttctttggaccacagtcttatccgaggggtctgtggttgtatcagaagagccactaaaccaatccccctttccaaaattgaacctcacagacgttcctgttttttgtgattgagaaactggtcaatgaacaggaagacttagagatgtttcacaagcctttgatttttgtttcatttatttgtaataaacctcttccacgtga

SEQ ID NO: 2410 - DNA, 2986 bp, Homo sapiens
tagccacttcccataatgccgcgttccggaagttattgctttccaggggtcactctggcttcgactccgtcgctctcaattcgtcaccaggaggaagacggagctggctgcccagcccaaaggcccatgaggggatgcagttatgggctctgtcgccgtggattgttattttgtgtcagtaagtaatccataaagtgccaacatgggaaagaaacggacaaagggaaaaactgttccaatcgatgattcctctgaaactttagaacctgtgtgcagacacattagaaaaggattggaacaaggtaatttgaaaaaggctttagtgaatgtggaatggaatatctgccaagactgtaagactgacaataaagtgaaagataaagctgaagaagaaacagaagaaaagccttcagtttggctgtgtcttaaatgtggccatcagggctgtggcagaaattctcaggagcagcatgccttgaagcactatctgacgccaagatctgaacctcactgtctggttcttagtttggacaactggagtgtatggtgttacgtatgtgataatgaggtccagtattgtagttcaaaccagttgggtcaagtggttgattatgtcagaaaacaagccagcattacaactccaaagccagagaaagataatggaaatattgaacttgaaaataaaaaattagaaaaagagagtaagaatgaacaagagagagaaaagaaggaaaacatggctaaagagaatcctcccatgaattctccttgccaaataaccgtgaaaggactcagtaatttgggaaacacatgtttcttcaatgcagttatgcagaacttgtcacaaacaccagtgcttagagaactactaaaagaagtgaaaatgtctggaacaattgtaaaaattgaaccacctgatttggcattaacagaaccattagaaataaaccttgagcctccaggccctcttactttagccatgagccagtttcttaatgagatgcaagagaccaaaaagggggttgtgacaccgaaagaactcttttctcaggtctgtaaaaaagcagtgcggtttaaaggctatcagcagcaagacagccaggagctgcttcgctacttattggatgggatgagagcagaagaacaccaaagagtgagtaaaggaatacttaaagcatttggtaattctactgaaaagttggatgaagaactaaaaaataaagttaaagattatgagaagaaaaaatcaatgccaagttttgttgaccgcatctttggtggtgaactaactagtatgatcatgtgtgatcaatgcagaactgtctccttggttcatgaatctttccttgatttgtccctcccagttttagatgatcagagtggtaagaaaagtgtaaatgataaaaatctgaaaaagacagtggaggatgaagatcaagatagtgaggaagaaaaagataacgacagttacataaaagagagaagtgatattccttctggaacaagtaagcacttacagaaaaaagcaaagaaacaagccaaaaagcaagccaagaaccaacgaagacaacaaaaaattcaaggaaaagttcttcatttaaatgatatttgtactattgaccatcctgaagacagtgaatatgaagctgaaatgtcacttcaaggagaagtaaatattaaatccaaccatatttcacaagagggtgttatgcataaagaatattgtgtcaaccagaaagatttgaatggccaagcaaaaatgatcgaaagtgtaactgacaatcaaaaatccacagaggaagtagatatgaaaaatatcaacatggataatgatctggaggttttaacatcttctcccactaggaatttaaatggtgcctacctaacggaagggagcaatggagaagtggacatttccaatggtttcaaaaacctaaatttgaatgctgctcttcatcctgatgaaataaatatagagattctgaatgatagtcatactcctggaacaaaggtgtatgaggttgtaaatgaagatccagaaactgctttctgtactcttgcaaacagggaagttttcaatactgatgagtgttcaatccaacattgtttatatcagttcacccgtaatgagaaacttcgagatgcgaataaactgctttgtgaagtatgcacacggagacagtgtaatggaccaaaggcaaatataaaaggtgaaaggaagcatgtttacaccaatgccaaaaagcagatgctaatttctcttgctcctcctgttcttactcttcatttaaagagatttcagcaggctggttttaacctacgcaaagttaacaaacacataaagtttccggaaatcttagatttggctcctttttgcacccttaaatgtaagaatgttgcagaagaaaatacaagggtactctattccttatatggagttgttgaacacagtggtactatgaggtcggggcattacactgcctatgccaaggcaagaaccgcaaatagtcatctctctaatcttgttcttcacggtgatattccacaagattttgaaatggaatcaaaagggcagtggtttcacatcagcgacacacatgtgcaagctgtgcctacaactaaagtactaaactcacaagcgtacctcctattttatgagagaatactgtaataatatcaaaagcactttttctggaaacacatttatggcttttataatggctgaaataacgataaaaaaagactaattaaaatcatgttcacttaacattaaatacatgccagaagaaatcatgtttatttaaatattgaagggaaaaatacctaaaaatgtacaaaggttttatattgtcatagtggtttttattcctgctttgtttctggaaaggaaatcctgaattacttaagtactttgtgtttaatatatctgggtgatggatcacaacacatcaataaactgacttaccctaaaaaaaaaaaaaaaaaa

SEQ ID NO: 2411 - DNA, 3052 bp, Homo sapiens
tagccacttcccataatgccgcgttccggaagttattgctttccaggggtcactctggcttcgactccgtcgctctcaattcgtcaccaggaggaagacggagctggctgcccagcccaaaggcccatgaggggatgcagttatgggctctgtcgccgtggaacttgtttgcttcattcttatgtacctacctttgcaccttgtaatcatcctttatgcctcagattgttattttgtgtcagtaagtaatccataaagtgccaacatgggaaagaaacggacaaagggaaaaactgttccaatcgatgattcctctgaaactttagaacctgtgtgcagacacattagaaaaggattggaacaaggtaatttgaaaaaggctttagtgaatgtggaatggaatatctgccaagactgtaagactgacaataaagtgaaagataaagctgaagaagaaacagaagaaaagccttcagtttggctgtgtcttaaatgtggccatcagggctgtggcagaaattctcaggagcagcatgccttgaagcactatctgacgccaagatctgaacctcactgtctggttcttagtttggacaactggagtgtatggtgttacgtatgtgataatgaggtccagtattgtagttcaaaccagttgggtcaagtggttgattatgtcagaaaacaagccagcattacaactccaaagccagcagagaaagataatggaaatattgaacttgaaaataaaaaattagaaaaagagagtaagaatgaacaagagagagaaaagaaggaaaacatggctaaagagaatcctcccatgaattctccttgccaaataaccgtgaaaggactcagtaatttgggaaacacatgtttcttcaatgcagttatgcagaacttgtcacaaacaccagtgcttagagaactactaaaagaagtgaaaatgtctggaacaattgtaaaaattgaaccacctgatttggcattaacagaaccattagaaataaaccttgagcctccaggccctcttactttagccatgagccagtttcttaatgagatgcaagagaccaaaaagggggttgtgacaccgaaagaactcttttctcaggtctgtaaaaaagcagtgcggtttaaaggctatcagcagcaagacagccaggagctgcttcgctacttattggatgggatgagagcagaagaacaccaaagagtgagtaaaggaatacttaaagcatttggtaattctactgaaaagttggatgaagaactaaaaaataaagttaaagattatgagaagaaaaaatcaatgccaagttttgttgaccgcatctttggtggtgaactaactagtatgatcatgtgtgatcaatgcagaactgtctccttggttcatgaatctttccttgatttgtccctcccagttttagatgatcagagtggtaagaaaagtgtaaatgataaaaatctgaaaaagacagtggaggatgaagatcaagatagtgaggaagaaaaagataacgacagttacataaaagagagaagtgatattccttctggaacaagtaagcacttacagaaaaaagcaaagaaacaagccaaaaagcaagccaagaaccaacgaagacaacaaaaaattcaaggaaaagttcttcatttaaatgatatttgtactattgaccatcctgaagacagtgaatatgaagctgaaatgtcacttcaaggagaagtaaatattaaatccaaccatatttcacaagagggtgttatgcataaagaatattgtgtcaaccagaaagatttgaatggccaagcaaaaatgatcgaaagtgtaactgacaatcaaaaatccacagaggaagtagatatgaaaaatatcaacatggataatgatctggaggttttaacatcttctcccactaggaatttaaatggtgcctacctaacggaagggagcaatggagaagtggacatttccaatggtttcaaaaacctaaatttgaatgctgctcttcatcctgatgaaataaatatagagattctgaatgatagtcatactcctggaacaaaggtgtatgaggttgtaaatgaagatccagaaactgctttctgtactcttgcaaacagggaagttttcaatactgatgagtgttcaatccaacattgtttatatcagttcacccgtaatgagaaacttcgagatgcgaataaactgctttgtgaagtatgcacacggagacagtgtaatggaccaaaggcaaatataaaaggtgaaaggaagcatgtttacaccaatgccaaaaagcagatgctaatttctcttgctcctcctgttcttactcttcatttaaagagatttcagcaggctggttttaacctacgcaaagttaacaaacacataaagtttccggaaatcttagatttggctcctttttgcacccttaaatgtaagaatgttgcagaagaaaatacaagggtactctattccttatatggagttgttgaacacagtggtactatgaggtcggggcattacactgcctatgccaaggcaagaaccgcaaatagtcatctctctaatcttgttcttcacggtgatattccacaagattttgaaatggaatcaaaagggcagtggtttcacatcagcgacacacatgtgcaagctgtgcctacaactaaagtactaaactcacaagcgtacctcctattttatgagagaatactgtaataatatcaaaagcactttttctggaaacacatttatggcttttataatggctgaaataacgataaaaaaagactaattaaaatcatgttcacttaacattaaatacatgccagaagaaatcatgtttatttaaatattgaagggaaaaatacctaaaaatgtacaaaggttttatattgtcatagtggtttttattcctgctttgtttctggaaaggaaatcctgaattacttaagtactttgtgtttaatatatctgggtgatggatcacaacacatcaataaactgacttaccctaaaaaaaaaaaaaaaaaa

SEQ ID NO: 2412 - DNA, 2989 bp, Homo sapiens
tagccacttcccataatgccgcgttccggaagttattgctttccaggggtcactctggcttcgactccgtcgctctcaattcgtcaccaggaggaagacggagctggctgcccagcccaaaggcccatgaggggatgcagttatgggctctgtcgccgtggattgttattttgtgtcagtaagtaatccataaagtgccaacatgggaaagaaacggacaaagggaaaaactgttccaatcgatgattcctctgaaactttagaacctgtgtgcagacacattagaaaaggattggaacaaggtaatttgaaaaaggctttagtgaatgtggaatggaatatctgccaagactgtaagactgacaataaagtgaaagataaagctgaagaagaaacagaagaaaagccttcagtttggctgtgtcttaaatgtggccatcagggctgtggcagaaattctcaggagcagcatgccttgaagcactatctgacgccaagatctgaacctcactgtctggttcttagtttggacaactggagtgtatggtgttacgtatgtgataatgaggtccagtattgtagttcaaaccagttgggtcaagtggttgattatgtcagaaaacaagccagcattacaactccaaagccagcagagaaagataatggaaatattgaacttgaaaataaaaaattagaaaaagagagtaagaatgaacaagagagagaaaagaaggaaaacatggctaaagagaatcctcccatgaattctccttgccaaataaccgtgaaaggactcagtaatttgggaaacacatgtttcttcaatgcagttatgcagaacttgtcacaaacaccagtgcttagagaactactaaaagaagtgaaaatgtctggaacaattgtaaaaattgaaccacctgatttggcattaacagaaccattagaaataaaccttgagcctccaggccctcttactttagccatgagccagtttcttaatgagatgcaagagaccaaaaagggggttgtgacaccgaaagaactcttttctcaggtctgtaaaaaagcagtgcggtttaaaggctatcagcagcaagacagccaggagctgcttcgctacttattggatgggatgagagcagaagaacaccaaagagtgagtaaaggaatacttaaagcatttggtaattctactgaaaagttggatgaagaactaaaaaataaagttaaagattatgagaagaaaaaatcaatgccaagttttgttgaccgcatctttggtggtgaactaactagtatgatcatgtgtgatcaatgcagaactgtctccttggttcatgaatctttccttgatttgtccctcccagttttagatgatcagagtggtaagaaaagtgtaaatgataaaaatctgaaaaagacagtggaggatgaagatcaagatagtgaggaagaaaaagataacgacagttacataaaagagagaagtgatattccttctggaacaagtaagcacttacagaaaaaagcaaagaaacaagccaaaaagcaagccaagaaccaacgaagacaacaaaaaattcaaggaaaagttcttcatttaaatgatatttgtactattgaccatcctgaagacagtgaatatgaagctgaaatgtcacttcaaggagaagtaaatattaaatccaaccatatttcacaagagggtgttatgcataaagaatattgtgtcaaccagaaagatttgaatggccaagcaaaaatgatcgaaagtgtaactgacaatcaaaaatccacagaggaagtagatatgaaaaatatcaacatggataatgatctggaggttttaacatcttctcccactaggaatttaaatggtgcctacctaacggaagggagcaatggagaagtggacatttccaatggtttcaaaaacctaaatttgaatgctgctcttcatcctgatgaaataaatatagagattctgaatgatagtcatactcctggaacaaaggtgtatgaggttgtaaatgaagatccagaaactgctttctgtactcttgcaaacagggaagttttcaatactgatgagtgttcaatccaacattgtttatatcagttcacccgtaatgagaaacttcgagatgcgaataaactgctttgtgaagtatgcacacggagacagtgtaatggaccaaaggcaaatataaaaggtgaaaggaagcatgtttacaccaatgccaaaaagcagatgctaatttctcttgctcctcctgttcttactcttcatttaaagagatttcagcaggctggttttaacctacgcaaagttaacaaacacataaagtttccggaaatcttagatttggctcctttttgcacccttaaatgtaagaatgttgcagaagaaaatacaagggtactctattccttatatggagttgttgaacacagtggtactatgaggtcggggcattacactgcctatgccaaggcaagaaccgcaaatagtcatctctctaatcttgttcttcacggtgatattccacaagattttgaaatggaatcaaaagggcagtggtttcacatcagcgacacacatgtgcaagctgtgcctacaactaaagtactaaactcacaagcgtacctcctattttatgagagaatactgtaataatatcaaaagcactttttctggaaacacatttatggcttttataatggctgaaataacgataaaaaaagactaattaaaatcatgttcacttaacattaaatacatgccagaagaaatcatgtttatttaaatattgaagggaaaaatacctaaaaatgtacaaaggttttatattgtcatagtggtttttattcctgctttgtttctggaaaggaaatcctgaattacttaagtactttgtgtttaatatatctgggtgatggatcacaacacatcaataaactgacttaccctaaaaaaaaaaaaaaaaaa

SEQ ID NO: 2413 - DNA, 1938 bp, Homo sapiens
ccaagagctacgcggcggcggcggagcgcaggcctcgtgccgttacggccatcacggcggccgcagtggcgtcctggagccctcctcagtgctgaagctgctgaaagatggcagaagaagtggtggtagtagccaaatttgattatgtggcccaacaagaacaagagttggacatcaagaagaatgagagattatggcttctggatgattctaagtcctggtggcgagttcgaaattccatgaataaaacaggttttgtgccttctaactatgtggaaaggaaaaacagtgctcggaaagcatctattgtgaaaaacctaaaggataccttaggcattggaaaagtgaaaagaaaacctagtgtgccagattctgcatctcctgctgatgatagttttgttgacccaggggaacgtctctatgacctcaacatgcccgcttatgtgaaatttaactacatggctgagagagaggatgaattatcattgataaaggggacaaaggtgatcgtcatggagaaatgcagtgatgggtggtggcgtggtagctacaatggacaagttggatggttcccttcaaactatgtaactgaagaaggtgacagtcctttgggtgaccatgtgggttctctgtcagagaaattagcagcagtcgtcaataacctaaatactgggcaagtgttgcatgtggtacaggctctttacccattcagctcatctaatgatgaagaacttaatttcgagaaaggagatgtaatggatgttattgaaaaacctgaaaatgacccagagtggtggaaatgcaggaagatcaatggtatggttggtctagtaccaaaaaactatgttaccgttatgcagaataatccattaacttcaggtttggaaccatcacctccacagtgtgattacattaggccttcactcactggaaagtttgctggcaatccttggtattatggcaaagtcaccaggcatcaagcagaaatggcattaaatgaaagaggacatgaaggggatttcctcattcgtgatagtgaatcttcgccaaatgatttctcagtatcactaaaagcacaagggaaaaacaagcattttaaagtccaactaaaagagactgtctactgcattgggcagcgtaaattcagcaccatggaagaacttgtagaacattacaaaaaggcaccaatttttacaagtgaacaaggagaaaaattatatcttgtcaagcatttatcatgatactgctgaccagaagtgactgctgtgtagctgtaatttgtcatgtaattgaagactgagaaaatgttgggtccagtcgtgcttgattggaaattgttgtttctaaatctatatgagaattgacaataagtatttttattataactcagcccatacatatatactatgtatgcagtgcatctgcatagaacagttccttatccttggccttctgttttattgtttttttctttgctgttttccctttgcttctaatattacagttttgtattttgtaaacaaaaatcaaataatgcatatcagaatctttatatggaagaaatcctttattgcctttcctttgtttccttgtaaaggcaccctgttctgttatggtttttcattatataaaattattatatctatatatgacatatgctaaaatttcttggagagtgttaatcttttctgtgactaaatagcaataataagtggaaaattagaaattatttccaggtattatatttgtcacaggccattgtaaataccaagtatattgtgtctgccataatttttaaaaatacattcattgtcttcagtcatacagcaagacacatgagacatagattagaaaacatgttgtacaattttaatttacaactgttggaaataaaaatcacttaatttttttccaaaaaaaaaaaaaaaaaaaaaaaaa

SEQ ID NO: 2414 - DNA, 2490 bp, Homo sapiens
ccttgtggtgacaactggcggcagcgcgccgcgggcccgagacttagtctcgggccgccatggccagcgtccacgagagcctctacttcaatcccatgatgaccaatggggttgtgcacgccaatgtgttcggcatcaaggactgggtgacgccgtacaagatcgcggtgctggtgctgctgaacgagatgagccgcacaggcgagggcgccgtcagcctcatggagcggcggaggctcaaccagctgctcctgcccctgctgcagggcccagatattacactgtcaaaactttacaagttaattgaagagtcttgtccacagctggcaaattcagtgcagatcagaatcaaactgatggctgaaggcgagttgaaggatatggaacagttttttgatgacctttcagattctttctctggaactgaaccagaggttcacaaaacaagtgtagtaggtttgtttctgcgtcacatgatcttggcctacagtaagctttctttcagccaagtgtttaaactgtacactgcccttcagcagtacttccagaatggtgagaaaaagacagtggaggatgctgatatggaactgaccagtagagatgagggtgaaagaaaaatggaaaaagaagaacttgatgtatctgtaagagaagaggaggtatcttgcagtgggcctctgtcccaaaaacaagcagaattttttctttctcaacaggcttctttgctaaagaatgatgagactaaggccctcactccagcttccttgcagaaggaattaaacaatttgttgaaatttaatcctgattttgctgaagcgcattatctcagctacttaaacaacctccgtgtccaagatgttttcagttcaacacacagtctcctccattattttgatcgtctgattcttaccggagccgaaagcaaaagtaatggggaagagggctatggccggagcttgagatacgccgctctgaatcttgccgccctgcactgccgcttcggtcactatcaacaggcagagctcgccctgcaggaggcaattaggattgcccaggagtccaacgatcacgtgtgtctccagcactgtttgagctggctttatgtgctggggcagaagagatccgatagctatgttctgctggagcattctgtgaagaaggcagtacattttgggttaccgtacctcgcctccctgggaatacagtcccttgttcaacagagagcttttgctgggaagacggcaaacaagctgatggatgccctaaaggactccgacctcctgcactggaaacacagcctgtcagagctcatcgatatcagcatcgcacagaaaacggccatctggaggctgtatggccgcagcaccatggcactgcaacaggcccagatgttgctgagcatgaacagcctggaggcggtgaatgcgggcgtgcagcagaacaacacagagtcctttgctgtcgcactctgccacctcgcagagctacacgcggagcagggctgttttgctgcagcttctgaagtgttaaagcacttgaaggaacgatttccgcctaatagtcagcacgcccagttatggatgttatgtgatcaaaaaatacagtttgacagagcaatgaatgatggcaaatatcatttggctgattcacttgttacaggaatcacagctctcaatagcatagagggtgtttataggaaagcggttgtattacaagctcagaaccaaatgtcagaggcacataagcttttacaaaaattgttggttcattgtcagaaactgaagaacacagaaatggtgatcagtgtcctactgtccgtggcagagctgtactggcgatcttcctcccctaccatcgcgctgcccatgctcctgcaggctctggccctctccaaggagtaccggttacagtacttggcctctgaaacagtgctgaacttggcttttgcgcagctcattcttggaatcccagaacaggccttaagtcttctccacatggccatcgagcccatcttggctgacggggctatcctggacaaaggtcgtgccatgttcttagtggccaagtgccaggtggcttcagcagcttcctacgatcagccgaagaaagcagaagctctggaggctgccatcgagaacctcaatgaagccaagaactattttgcaaaggttgactgcaaagagcgcatcagggacgtcgtttacttccaggccagactctaccataccctggggaagacccaggagaggaaccggtgtgcgatgctcttccggcagctgcatcaggagctgccctctcatggggtacccttgataaaccatctctagagaggacatccctgctgggctgctgtgcagagtataagattttggacttgttcatgtcccctctctccctataaatgatgtatttgtgacaccctatcttgtcaataaacagcattctgattaaaaaaaaaaaaaaaaaaaaaaaaaaaaaaaaaaaaaaaaa

SEQ ID NO: 2415 - DNA, 2154 bp, Homo sapiens
atataaccgcgtggcccgcgcgcgcgcttccctcccggcgcagtcaccggcgcggtctatggctgcgacttctctaatgtctgctttggctgcccggctgctgcagcccgcgcacagctgctcccttcgccttcgccctttccacctcgcggcagttcgaaatgaagctgttgtcatttctggaaggaaactggcccagcagatcaagcaggaagtgcggcaggaggtagaagagtgggtggcctcaggcaacaaacggccacacctgagtgtgatcctggttggcgagaatcctgcaagtcactcctatgtcctcaacaaaaccagggcagctgcagttgtgggaatcaacagtgagacaattatgaaaccagcttcaatttcagaggaagaattgttgaatttaatcaataaactgaataatgatgataatgtagatggcctccttgttcagttgcctcttccagagcatattgatgagagaaggatctgcaatgctgtttctccagacaaggatgttgatggctttcatgtaattaatgtaggacgaatgtgtttggatcagtattccatgttaccggctactccatggggtgtgtgggaaataatcaagcgaactggcattccaaccctagggaagaatgtggttgtggctggaaggtcaaaaaacgttggaatgcccattgcaatgttactgcacacagatggggcgcatgaacgtcccggaggtgatgccactgttacaatatctcatcgatatactcccaaagagcagttgaagaaacatacaattcttgcagatattgtaatatctgctgcaggtattccaaatctgatcacagcagatatgatcaaggaaggagcagcagtcattgatgtgggaataaatagagttcacgatcctgtaactgccaaacccaagttggttggagatgtggattttgaaggagtcagacaaaaagctgggtatatcactccagttcctggaggtgttggccccatgacagtggcaatgctaatgaagaataccattattgctgcaaaaaaggtgctgaggcttgaagagcgagaagtgctgaagtctaaagagcttggggtagccactaattaactactgtgtcttctgtgtcacaaacagcactccaggccagctcaagaagcaaagcaggccaatagaaatgcaatatttttaatttattctactgaaatggtttaaaatgatgccttgtatttattgaaagcttaaatgggtgggtgtttctgcacatacctctgcagtacctcaccagggagcattccagtatcatgcagggtcctgtgatctagccaggagcagccattaacctagtgattaatatgggagacattaccatatggaggatggatgcttcactttgtcaagcacctcagttacacattcgccttttctaggattgcatttcccaagtgctattgcaataacagttgatactcattttaggtaccagaccttttgagttcaactgatcaaaccaaaggaaaagtgttgctagagaaaattggggaaaaggtgaaaaagaaaaaatggtagtaattgagcagaaaaaaattaatttatatatgtattgattggcaaccagatttatctaagtagaactgaattggctaggaaaaaagaaaaactgcatgttaatcattttcctaagctgtccttttgaggcttagtcagtttattgggaaaatgtttaggattattccttgctattagtactcattttatgtatgttacccttcagtaagttctccccattttagttttctaggactgaaaggattcttttctacattatacatgtgtgttgtcatatttggcttttgctatatactttaacttcattgttaaatttttgtattgtatagtttctttggtgtatcttaaaacctatttttgaaaaacaaacttggcttgataatcatttgggcagcttgggtaagtacgcaacttacttttccaccaaagaactgtcagcagctgcctgcttttctgtgatgtatgtatcctgttgacttttccagaaattttttaagagtttgagttactattgaatttaatcagactttctgattaaagggttttctttcttttttaataaaacacatctgtctggtatggta

SEQ ID NO: 2416 - DNA, 1942 bp, Homo sapiens
agggatctgaaacttgcccacccttcgggatattgcaggacgctgcatcatgagcgacagtaaatgtgacagtcagttttatagtgtgcaagtggcagactcaaccttcactgtcctaaaacgttaccagcagctgaaaccaattggctctggggcccaagggattgtttgtgctgcatttgatacagttcttgggataaatgttgcagtcaagaaactaagccgtccttttcagaaccaaactcatgcaaagagagcttatcgtgaacttgtcctcttaaaatgtgtcaatcataaaaatataattagtttgttaaatgtgtttacaccacaaaaaactctagaagaatttcaagatgtgtatttggttatggaattaatggatgctaacttatgtcaggttattcacatggagctggatcatgaaagaatgtcctaccttctttaccagatgctttgtggtattaaacatctgcattcagctggtataattcatagagatttgaagcctagcaacattgttgtgaaatcagactgcaccctgaagatccttgactttggcctggcccggacagcgtgcactaacttcatgatgaccccttacgtggtgacacggtactaccgggcgcccgaagtcatcctgggtatgggctacaaagagaacgttgatatctggtcagtgggttgcatcatgggagagctggtgaaaggttgtgtgatattccaaggcactgaccatattgatcagtggaataaagttattgagcagctgggaacaccatcagcagagttcatgaagaaacttcagccaactgtgaggaattatgtcgaaaacagaccaaagtatcctggaatcaaatttgaagaactctttccagattggatattcccatcagaatctgagcgagacaaaataaaaacaagtcaagccagagatctgttatcaaaaatgttagtgattgatcctgacaagcggatctctgtagacgaagctctgcgtcacccatacatcactgtttggtatgaccccgccgaagcagaagccccaccacctcaaatttatgatgcccagttggaagaaagagaacatgcaattgaagaatggaaagagctaatttacaaagaagtcatggattgggaagaaagaagcaagaatggtgttgtaaaagatcagccttcagatgcagcagtaagtagcaacgccactccttctcagtcttcatcgatcaatgacatttcatccatgtccactgagcagacgctggcctcagacacagacagcagtcttgatgcctcgacgggaccccttgaaggctgtcgatgataggttagaaatagcaaacctgtcagcattgaaggaactctcacctccgtgggcctgaaatgcttgggagttgatggaaccaaatagaaaaactccatgttctgcatgtaagaaacacaatgccttgccctattcagacctgataggattgcctgcttagatgataaaatgaggcagaatatgtctgaagaaaaaaattgcaagccacacttctagagattttgttcaagatcatttcaggtgagcagttagagtaggtgaatttgtttcaaattgtactagtgacagtttctcatcatctgtaactgttgagatgtatgtgcatgtgaccacaaatgcttgcttggacttgcccatctagcactttggaaatcagtatttaaatgccaaataatcttccaggtagtgctgcttctgaagttatctcttaatcctcttaagtaatttggtgtctgtccagaaaaagtcgatttatgtgtattaattggccatcatgatgttatcatatcttattcccttttatgctatgatttattctatcttttgtatttcagaagacatataattaaatctatttaataaataaaaatatatagctttaaaaaaaaaaaaaaaaaa

SEQ ID NO: 2417 - DNA, 1947 bp, Homo sapiens
agggatctgaaacttgcccacccttcgggatattgcaggacgctgcatcatgagcgacagtaaatgtgacagtcagttttatagtgtgcaagtggcagactcaaccttcactgtcctaaaacgttaccagcagctgaaaccaattggctctggggcccaagggattgtttgtgctgcatttgatacagttcttgggataaatgttgcagtcaagaaactaagccgtccttttcagaaccaaactcatgcaaagagagcttatcgtgaacttgtcctcttaaaatgtgtcaatcataaaaatataattagtttgttaaatgtgtttacaccacaaaaaactctagaagaatttcaagatgtgtatttggttatggaattaatggatgctaacttatgtcaggttattcacatggagctggatcatgaaagaatgtcctaccttctttaccagatgctttgtggtattaaacatctgcattcagctggtataattcatagagatttgaagcctagcaacattgttgtgaaatcagactgcaccctgaagatccttgactttggcctggcccggacagcgtgcactaacttcatgatgaccccttacgtggtgacacggtactaccgggcgcccgaagtcatcctgggtatgggctacaaagagaacgttgatatctggtcagtgggttgcatcatgggagagctggtgaaaggttgtgtgatattccaaggcactgaccatattgatcagtggaataaagttattgagcagctgggaacaccatcagcagagttcatgaagaaacttcagccaactgtgaggaattatgtcgaaaacagaccaaagtatcctggaatcaaatttgaagaactctttccagattggatattcccatcagaatctgagcgagacaaaataaaaacaagtcaagccagagatctgttatcaaaaatgttagtgattgatcctgacaagcggatctctgtagacgaagctctgcgtcacccatacatcactgtttggtatgaccccgccgaagcagaagccccaccacctcaaatttatgatgcccagttggaagaaagagaacatgcaattgaagaatggaaagagctaatttacaaagaagtcatggattgggaagaaagaagcaagaatggtgttgtaaaagatcagccttcagcacagatgcagcagtaagtagcaacgccactccttctcagtcttcatcgatcaatgacatttcatccatgtccactgagcagacgctggcctcagacacagacagcagtcttgatgcctcgacgggaccccttgaaggctgtcgatgataggttagaaatagcaaacctgtcagcattgaaggaactctcacctccgtgggcctgaaatgcttgggagttgatggaaccaaatagaaaaactccatgttctgcatgtaagaaacacaatgccttgccctattcagacctgataggattgcctgcttagatgataaaatgaggcagaatatgtctgaagaaaaaaattgcaagccacacttctagagattttgttcaagatcatttcaggtgagcagttagagtaggtgaatttgtttcaaattgtactagtgacagtttctcatcatctgtaactgttgagatgtatgtgcatgtgaccacaaatgcttgcttggacttgcccatctagcactttggaaatcagtatttaaatgccaaataatcttccaggtagtgctgcttctgaagttatctcttaatcctcttaagtaatttggtgtctgtccagaaaaagtcgatttatgtgtattaattggccatcatgatgttatcatatcttattcccttttatgctatgatttattctatcttttgtatttcagaagacatataattaaatctatttaataaataaaaatatatagctttaaaaaaaaaaaaaaaaaa

SEQ ID NO: 2418 - DNA, 1947 bp, Homo sapiens
agggatctgaaacttgcccacccttcgggatattgcaggacgctgcatcatgagcgacagtaaatgtgacagtcagttttatagtgtgcaagtggcagactcaaccttcactgtcctaaaacgttaccagcagctgaaaccaattggctctggggcccaagggattgtttgtgctgcatttgatacagttcttgggataaatgttgcagtcaagaaactaagccgtccttttcagaaccaaactcatgcaaagagagcttatcgtgaacttgtcctcttaaaatgtgtcaatcataaaaatataattagtttgttaaatgtgtttacaccacaaaaaactctagaagaatttcaagatgtgtatttggttatggaattaatggatgctaacttatgtcaggttattcacatggagctggatcatgaaagaatgtcctaccttctttaccagatgctttgtggtattaaacatctgcattcagctggtataattcatagagatttgaagcctagcaacattgttgtgaaatcagactgcaccctgaagatccttgactttggcctggcccggacagcgtgcactaacttcatgatgaccccttacgtggtgacacggtactaccgggcgcccgaagtcatcctgggtatgggctacaaagagaacgttgatatctggtcagtcgggtgcatcatggcagaaatggtcctccataaagtcctgttcccgggaagagactatattgatcagtggaataaagttattgagcagctgggaacaccatcagcagagttcatgaagaaacttcagccaactgtgaggaattatgtcgaaaacagaccaaagtatcctggaatcaaatttgaagaactctttccagattggatattcccatcagaatctgagcgagacaaaataaaaacaagtcaagccagagatctgttatcaaaaatgttagtgattgatcctgacaagcggatctctgtagacgaagctctgcgtcacccatacatcactgtttggtatgaccccgccgaagcagaagccccaccacctcaaatttatgatgcccagttggaagaaagagaacatgcaattgaagaatggaaagagctaatttacaaagaagtcatggattgggaagaaagaagcaagaatggtgttgtaaaagatcagccttcagcacagatgcagcagtaagtagcaacgccactccttctcagtcttcatcgatcaatgacatttcatccatgtccactgagcagacgctggcctcagacacagacagcagtcttgatgcctcgacgggaccccttgaaggctgtcgatgataggttagaaatagcaaacctgtcagcattgaaggaactctcacctccgtgggcctgaaatgcttgggagttgatggaaccaaatagaaaaactccatgttctgcatgtaagaaacacaatgccttgccctattcagacctgataggattgcctgcttagatgataaaatgaggcagaatatgtctgaagaaaaaaattgcaagccacacttctagagattttgttcaagatcatttcaggtgagcagttagagtaggtgaatttgtttcaaattgtactagtgacagtttctcatcatctgtaactgttgagatgtatgtgcatgtgaccacaaatgcttgcttggacttgcccatctagcactttggaaatcagtatttaaatgccaaataatcttccaggtagtgctgcttctgaagttatctcttaatcctcttaagtaatttggtgtctgtccagaaaaagtcgatttatgtgtattaattggccatcatgatgttatcatatcttattcccttttatgctatgatttattctatcttttgtatttcagaagacatataattaaatctatttaataaataaaaatatatagctttaaaaaaaaaaaaaaaaaa

SEQ ID NO: 2419 - DNA, 1942 bp, Homo sapiens
agggatctgaaacttgcccacccttcgggatattgcaggacgctgcatcatgagcgacagtaaatgtgacagtcagttttatagtgtgcaagtggcagactcaaccttcactgtcctaaaacgttaccagcagctgaaaccaattggctctggggcccaagggattgtttgtgctgcatttgatacagttcttgggataaatgttgcagtcaagaaactaagccgtccttttcagaaccaaactcatgcaaagagagcttatcgtgaacttgtcctcttaaaatgtgtcaatcataaaaatataattagtttgttaaatgtgtttacaccacaaaaaactctagaagaatttcaagatgtgtatttggttatggaattaatggatgctaacttatgtcaggttattcacatggagctggatcatgaaagaatgtcctaccttctttaccagatgctttgtggtattaaacatctgcattcagctggtataattcatagagatttgaagcctagcaacattgttgtgaaatcagactgcaccctgaagatccttgactttggcctggcccggacagcgtgcactaacttcatgatgaccccttacgtggtgacacggtactaccgggcgcccgaagtcatcctgggtatgggctacaaagagaacgttgatatctggtcagtcgggtgcatcatggcagaaatggtcctccataaagtcctgttcccgggaagagactatattgatcagtggaataaagttattgagcagctgggaacaccatcagcagagttcatgaagaaacttcagccaactgtgaggaattatgtcgaaaacagaccaaagtatcctggaatcaaatttgaagaactctttccagattggatattcccatcagaatctgagcgagacaaaataaaaacaagtcaagccagagatctgttatcaaaaatgttagtgattgatcctgacaagcggatctctgtagacgaagctctgcgtcacccatacatcactgtttggtatgaccccgccgaagcagaagccccaccacctcaaatttatgatgcccagttggaagaaagagaacatgcaattgaagaatggaaagagctaatttacaaagaagtcatggattgggaagaaagaagcaagaatggtgttgtaaaagatcagccttcagatgcagcagtaagtagcaacgccactccttctcagtcttcatcgatcaatgacatttcatccatgtccactgagcagacgctggcctcagacacagacagcagtcttgatgcctcgacgggaccccttgaaggctgtcgatgataggttagaaatagcaaacctgtcagcattgaaggaactctcacctccgtgggcctgaaatgcttgggagttgatggaaccaaatagaaaaactccatgttctgcatgtaagaaacacaatgccttgccctattcagacctgataggattgcctgcttagatgataaaatgaggcagaatatgtctgaagaaaaaaattgcaagccacacttctagagattttgttcaagatcatttcaggtgagcagttagagtaggtgaatttgtttcaaattgtactagtgacagtttctcatcatctgtaactgttgagatgtatgtgcatgtgaccacaaatgcttgcttggacttgcccatctagcactttggaaatcagtatttaaatgccaaataatcttccaggtagtgctgcttctgaagttatctcttaatcctcttaagtaatttggtgtctgtccagaaaaagtcgatttatgtgtattaattggccatcatgatgttatcatatcttattcccttttatgctatgatttattctatcttttgtatttcagaagacatataattaaatctatttaataaataaaaatatatagctttaaaaaaaaaaaaaaaaaa

SEQ ID NO: 2420 - DNA, 1128 bp, Homo sapiens
agtccgagtggagagagcgagctgagtggttgtgtggtcgcgtctcggaaaccggtagcgcttgcagcatggctgaccaactgactgaagagcagattgcagaattcaaagaagctttttcactatttgacaaagatggtgatggaactataacaacaaaggaattgggaactgtaatgagatctcttgggcagaatcccacagaagcagagttacaggacatgattaatgaagtagatgctgatggtaatggcacaattgacttccctgaatttctgacaatgatggcaagaaaaatgaaagacacagacagtgaagaagaaattagagaagcattccgtgtgtttgataaggatggcaatggctatattagtgctgcagaacttcgccatgtgatgacaaaccttggagagaagttaacagatgaagaagttgatgaaatgatcagggaagcagatattgatggtgatggtcaagtaaactatgaagagtttgtacaaatgatgacagcaaagtgaagaccttgtacagaatgtgttaaatttcttgtacaaaattgtttatttgccttttctttgtttgtaacttatctgtaaaaggtttctccctactgtcaaaaaaatatgcatgtatagtaattaggacttcattcctccatgttttcttcccttatcttactgtcattgtcctaaaaccttattttagaaaattgatcaagtaacatgttgcatgtggcttactctggatatatctaagcccttctgcacatctaaacttagatggagttggtcaaatgagggaacatctgggttatgccttttttaaagtagttttctttaggaactgtcagcatgttgttgttgaagtgtggagttgtaactctgcgtggactatggacagtcaacaatatgtacttaaaagttgcactattgcaaaacgggtgtattatccaggtactcgtacactatttttttgtactgctggtcctgtaccagaaacattttcttttattgttacttgctttttaaactttgtttagccacttaaaatctgcttatggcacaatttgcctcaaaatccattccaagttgtatatttgttttccaataaaaaaattacaatttaccc

SEQ ID NO: 2421 - DNA, 2164 bp, Homo sapiens
gaattcggctttaggaggtccccgggttgccggcggcgacagcgggggaagcatgactgctgtgggccgaaggtgccccgcgctggggtcccgaggggctgctggagagccagaggctggcagcgactatgtgaagttctccaaggagaagtacatcctggactcatcgccagagaaactccacaaggaattggaggaggagctcaaactcagcagcacggatctccgcagccatgcctggtaccatggccgcatcccccgagaggtctcggagaccttggtacaacgcaacggcgacttcctcatccgggactcgctcaccagcctgggcgactatgtgctcacgtgccgctggcgcaaccaggccttgcacttcaagatcaacaaggtggtggtgaaggcaggcgagagctacacacacatccagtacctgtttgagcaggagagctttgaccacgtgcccgccctcgtgcgctatcatgtgggcagccgcaaggctgtgtcagagcagagtggtgccatcatctactgcccggtgaaccgcaccttcccactgcgctacctcgaggccagctatggcctgggacaggggagtagcaagcctgctagccccgtcagcccctcaggccccaagggcagccacatgaagcggcgcagcgtcaccatgaccgatgggctcactgctgacaaggtcacccgcagcgatggctgccccaccagtacgtcgctgccccgccctcgggactccatccgcagctgtgccctcagcatggaccagatcccagacctgcactcacccatgtcgcccatctccgagagccctagctcccctgcctacagcactgtaacccgtgtccatgccgcccctgcagccccttctgccacagcattgcctgcctcccctgtcgcccgctgttccagtgagccccagctgtgtcccggaagtgccccaaagacccatggggagtcagacaagggcccccacaccagcccctcccacacccttggcaaggcctccccgtcaccatcactcagcagctacagtgacccggactctggccactactgccagctccagcctcccgtgcgtggcagccgagagtgggcagcgactgagacctccagccagcaggccaggagctatggggagaggctaaaggaactgtcagaaaatggggcccctgaaggggactggggcaagaccttcacagtccccatcgtggaagtcacttcttccttcaacccggccaccttccagtcactactgatccccagggataaccggccactggaggtgggccttctgcgcaaggtcaaggagctgctggcagaagtggatgcccggacgctggcccggcatgtcaccaaggtggactgcctggttgctaggatactgggcgttaccaaggagatgcagaccctaatgggagtccgctggggcatggaactgctcaccctcccccatggccggcagctacgcctagacctgctggaaaggttccacaccatgtccatcatgctggccgtggacatcctgggctgcaccggctctgcggaggagcgggcagcgctgctgcacaagaccattcagctggcggccgagctacgggggactatgggcaacatgttcagcttcgcggcggtcatgggtgccctggacatggctcagatttctcggctggagcagacatgggtgaccctgcggcagcgacacacagagggtgccatcctgtacgagaagaagctcaagccttttctcaagagcctcaacgagggcaaagaaggcccgccgctgagcaacaccacgtttcctcatgtgctgcccctcatcaccctgctggagtgtgactcggccccaccagagggccctgagccctggggcagcacggagcacggcgtggaggtggtgctggctcacctggaggccgcccgcacagtggcacaccacggaggcctgtaccacaccaatgctgaagtcaagctgcaggggttccaggcccggccggagctcctggaggtgttcagcacggagttccagatgcgccttctctggggcagtcagggtgccagcagcagccaggcccggcgctatgagaagttcgacaaggtcctcactgccctgtcccacaagctggaacctgctgtccgctccagcgagctgtga

SEQ ID NO: 2422 - DNA, 3114 bp, Homo sapiens
ccacgcgtccggccaagatgacagaggggaccaagaagaccagcaaaaagttcaagttcttcaagttcaagggctttgggagtctctccaacctccctcggtccttcactctgagacgatcctcagcttccatcagtaggcagtcccatttggagcctgacacctttgaagccacgcaggatgacatggtgacggtgcccaagagtcccccagcctatgcccgctccagtgacatgtacagccacatgggcaccatgcctcgccccagcatcaagaaagcacagaactcacaggctgcccggcaggcccaggaggcgggtcccaagcccaacttggtacccggaggtgtacccgaccccccaggcttggaggcagccaaagaggtgatggtgaaggccactggccctctagaggacaccccagcaatggaacccaacccttcagcagtggaggtagaccccatcagaaagcctgaggtccccacaggagacgtagaagaggagagacctcccagggacgtgcactcagaaagggctgctggagagccagaggctggcagcgactatgtgaagttctccaaggagaagtacatcctggactcatcgccagagaaactccacaaggaattggaggaggagctcaaactcagcagcacggatctccgcagccatgcctggtaccatggccgcatcccccgagaggtctcggagaccttggtacaacgcaacggcgacttcctcatccgggactcactcaccagcctgggcgactatgtgctcacgtgccgctggcgcaaccaggccttgcacttcaagatcaacaaggtggtggtgaaggcaggcgagagctacacacacatccagtacctgtttgagcaggagagctttgaccacgtgcccgccctcgtgcgctatcatgtgggcagccgcaaggctgtgtcagagcagagtggtgccatcatctactgcccggtgaaccgcaccttcccactgcgctacctcgaggccagctatggcctgggacaggggagtagcaagcctgctagccccgtcagcccctcaggccccaagggcagccacatgaagcggcgcagcgtcaccatgaccgatgggctcactgctgacaaggtcacccgcagcgatggctgccccaccagtacgtcgctgccccgccctcgggactccatccgcagctgtgccctcagcatggaccagatcccagacctgcactcacccatgtcgcccatctccgagagccctagctcccctgcctacagcactgtaacccgtgtccatgccgcccctgcagccccttctgccacagcattgcctgcctcccctgtcgcccgccgttccagtgagccccagctgtgtcccggaagtgccccaaagacccatggggagtcagacaagggcccccacaccagcccctcccacacccttggcaaggcctccccgtcaccatcactcagcagctacagtgacccggactctggccactactgccagctccagcctcccgtgcgtggcagccgagagtgggcagcgactgagacctccagccagcaggccaggagctatggggagaggctaaaggaactgtcagaaaatggggcccctgaaggggactggggcaagaccttcacagtccccatcgtggaagtcacttcttccttcaacccggccaccttccagtcactactgatccccagggataaccggccactggaggtgggccttctgcgcaaggtcaaggagctgctggcagaagtggatgcccggacgctggcccggcatgtcaccaaggtggactgcctggttgctaggatactgggcgttaccaaggagatgcagaccctaatgggagtccgctggggcatggaactgctcaccctcccccatggccggcagctacgcctagacctgctggaaaggttccacaccatgtccatcatgctggccgtggacatcctgggctgcaccggctctgcggaggagcgggcagcgctgctgcacaagaccattcagctggcggccgagctgcgggggactatgggcaacatgttcagcttcgcggcggtcatgggtgccctggacatggctcagatttctcggctggagcagacatgggtgaccctgcggcagcgacacacagagggtgccatcctgtacgagaagaagctcaagccttttctcaagagcctcaacgagggcaaagaaggcccgccgctgagcaacaccacgtttcctcatgtgctgcccctcatcaccctgctggagtgtgactcggccccaccagagggccctgagccctggggcagcacggagcacggcgtggaggtggtgctggctcacctggaggccgcccgcacagtggcacaccacggaggcctgtaccacaccaatgctgaagtcaagctgcaggggttccaggcccggccggagctcctggaggtgttcagcacggagttccagatgcgccttctctggggcagtcagggtgccagcagcagccaggcccggcgctatgagaagttcgacaaggtcctcactgccctgtcccacaagctggaacctgctgtccgctccagcgagctgtgaccccagggacatttcccctctgcagctgcggacagcgtcaggggcagaggggcacacaactttccccagagcaccccaaggacactgtgatcaacccgagaatgttctgggttcaactcaagcatctcccttgcacctccagggtcctgcgtggactctgggttccatcccacctgctacatgctcaccaggtctccattgaggaagaacaggaacgccggttcccccaccagcttttgctgctccccttcctgctggggttccctgttttcgagccatgggaggcaggctgctcacgcctcctcactctctgtctgtccctcaccaacaccaaggcctccatctcactgtaaataagtctctgttctgtaaatagatgtacagaagccatgttatttctttcatataataaacttttatgactcttaaaaaaaaaaaaaaaaaaaaaaaaaaaaaaaaaaaaaaaaaaaaaaaaaaaaaaaaaaaaaaaaaaaaaaaaaaaaaaaaaaaaaaa

SEQ ID NO: 2423 - DNA, 3609 bp, Homo sapiens
gaatcctgctttttttttttctttgagacacggtctcgctctgtcacccttgctggagtgcagtggtgcaatcacagatcacggcagtgtctaattcctgggctcaagtgaaccttttgcatcagcctcctgaatagctgagaccacaggatatgaaagatggcaagtccagatagaagtaaacggaagatattaaaagccaaaaagacaatgcccctaagttgccggaagcaagtagagatgctgaataagtcaaggaatgttgaagcgctgaaaacagcaattgggagtaatgttccaagcggtaatcagagtttcagtcctagtgtcataactaggacgactgaaataaccaaatgtagcccttctgaaaatggtgcatcctcattggactctaataaaaattcaatatcagagaaaagtaaagtattctctcagaattgcataaaaccagtagaagaaattgttcattcagaaacaaaattggaacaagttgtttgttcgtaccaaaagccaagtagaacaacagaatcccccagcagagtcttcacagaagaggcaaaagattcactgaacacttctgaaaacgattctgagcatcagacaaatgtaacaagatccctttttgagcatgagggggcttgtagtctaaagtccagttgctgtccacccagtgtattgagtggtgttgttcagatgccagagtctacagtaaccagtaccgtgggtgacaagaaaactgaccagatggttttccatttagaaacaaactccaattcagaatcacatgataaaaggcaaagtgacaacattttatgttcagaagactcaggttttgtgcctgttgagaaaacacctaatttggtgaattcagtcacttctaacaactgtgctgatgacattttgaaaactgatgagtgtagtagaaccagtatttcaaattgtgaaagtgcagactcaacatggcagtcatcacttgacactaataacaacagccattatcaaaagaagaggatgttttcagaaaacgaggaaaatgttaaacgcatgaaaacttcagagcaaattaatgaaaatatttgtgtaagtttggaaaggcaaacagcattcctggaacaggtcagacatttgattcagcaggagatctatagcataaattatgaactatttgataagaaactgaaagaattgaaccaacgcattgggaagacagagtgcagaaataagcatgaaggaatagctgataaacttttggcaaaaatagcaaaacttcaaagacgtattaaaacagtattattatttcaaaggaattgtttgaaaccaaacatgttatccagtaatggagcctctaaggttgcaaattcagaggctatgattttggataagaatcttgagtcagttaatagtccaattgaaaagtcttctgtgaattatgagccttctaacccttccgaaaaaggaagtaaaaaaattaatttgtcatcagatcaaaataagtctgtttctgaaagtaacaatgatgatgttatgttgatttctgtggaaagtcctaatttgacaactccaattacatcaaatccaacagataccagaaaaattacatcaggaaattctagcaattctcccaatgctgaagttatggctgtacagaagaaacttgattctataattgatttgacaaaagaaggcctatccaactgcaatacagaaagtccagtatcccccctggagtcacattcgaaagctgcttcaaactcaaaggaaacaaccccattggcacaaaatgcagtccaggttcctgagtcctttgagcacctgccacctctcccagaaccaccagcaccactacctgaattagtagacaaaacccgagacacacttcctccccagaagcctgagctcaaagtgaaacgggttttcagacccaatggcattgccctgacttggaatataaccaaaatcaatcccaagtgtgctcctgtagaaagctaccacctcttcctgtgtcatgagaactctaataataagttgatttggaagaagattggagaaattaaagctttaccactccccatggcctgtactttatctcagtttttagcttccaacagatactattttactgtccaatcaaaagatatttttggacgatatggaccattctgtgatataaaatctatccctgggttttctgaaaatcttacgtaaaaggtgtttaataatgatatactactttttttttcatatttgtttgtttgcaatgttactgtaatactatttgccattgtaaaaggccagctcagattgtgagccctttctattgggacagtcctcttctatatgttttaagtggccagtaatttaatgaatttctggtttgtattaaatatgtccttccaatggataagttctaaaacatacgctatcattggcccatgttgctgaggtgcattgtgaacaatacctttagtgactgtggaactgctgcttctatcagaagacctaggatacaagcagccactgtttcctccgttaacaatcagcttttagtaacctgctgtggtcagcatagctacaggaaaagtcagcccttgactgagggccagatcatccctggagtgcacctctactaagattttatgaaaagatgacatgttgggctgcatgataaaagttaattataaaaattaaaagatttttttttttgagatggaatattgctctgttgcccaggctggagtacagtggtcactgcaacctccatctccctggttcaagcaattctcctatgtcagcctcccaagtagctgggactatagtcacttgccaccatgcccggctaatttatttttagtagagatgaggtttcaccttgttggtcaggctggtctcaaactcctgacctcaggggatccacccgcctcggcctcccgaagtgctgggattataggcgtaagccaccatgcctggccaaaaattaaaagattttatgaaacgaaatggcttcccattctttctattcagcttctaagtgggctattcatttgtgctctcctcttttttgttttgttttgcactttgtcaatcatttggggaaatagcctggaggtctttcctgaatctgtttgtagacataataaaatttgtgtgctgtgtacacaaaaacataatgtatcttatgaaagcattacccaacctgtttgagttgagaatgcatttgtccacctttgatttgaggctttagtttgctgatttcctaaatgctaccctttgatcatttcctggccaccatcacaatactaaggggctcagatgtgtcttgtgcccacctcttcctgagaagagatggaagtggagctgtgactagtacaagcagcccaagaaactctgaacggggcccaatggaggcaaacttgagcaaataattgggatgataagaaacaaaaataatcccaactgtttgaaagttcgaaagaggggcattcttttctggtacatggtgagagttcaggctccagagactcaaaacggaatggttttccttggcattttgtaaatgctctcacatctgtagcaataaagctgttattttctgcaaaaaaaaaaaaa

SEQ ID NO: 2424 - DNA, 1750 bp, Homo sapiens
gctttctttccgtcgcagagagcatcggccggcgaccgttccggcggccattgcgaaaacttccccacggctactgcgtccacgtggcggtggcgtggggactccctgaaagcagagcggcagggcgcccggaagtcgtgagtcgagtcttcccgggctaatccatgccgggttggaggctgctgacgcaggtcggcgcccaggtgctgggtcgactcggggacggcctgggtgctgccctgggcccggggaacagaacacacatctggctttttgttagaggtcttcatggaaagagtggtacatggtgggatgagcatctttctgaagaaaatgtcccattcattaagcagttggtctctgatgaagataaagcccaattagcaagtaaactgtgtcctctgaaagatgaaccatggcctatacatccttgggaaccaggttcctttagagttggtcttattgccttgaagctgggcatgatgcctttatggaccaaggatggtcaaaagcatgtggtcacattacttcaggtacaagactgtcatgtcttaaaatatacgtcaaaggaaaactgtaatggaaaaatggcaaccctgtctgtaggaggaaaaactgtatcacgttttcgtaaagctacatccatattggaattttaccgggaacttggattgccgccgaaacagacagttaaaatctttaatataacagataatgctgcaattaaaccaggcactcctctttatgctgctcactttcgtccaggacagtatgtggatgtcacagccaaaactattggtaaaggttttcaaggtgtcatgaaaagatggggatttaaaggccagcctgctacgcatggtcaaacgaaaacccacaggagacctggagctgttgcaactggtgatattggcagagtctggcctggaactaaaatgcctggaaaaatgggaaacatatacaggacagaatatggactgaaagtgtggagaataaacacaaagcacaacataatctatgtaaatggctctgtacctggacataaaaattgcttagtaaaggtcaaagattctaaactgcctgcatataaggatctcggtaaaaatctaccattccctacatattttcctgatggagatgaagaggaactgccagaagatttgtatgatgaaaacgtgtgtcagcccggtgcgccttctattacatttgcctaacatctttggacgtggcagaaccttacatattctgtgagcttcgatgagccagagtgatatcataaccaccagaaatcatactctcctttcttagtcacaacaaaatcacacatgtcatctttgtcaagggcataaatatatcattcatacccccattaaattttgttagaaaaattaccacattaaatatatgagttaagtagattggatttgctgaaattggtgttgggcatattagcaaaatattcttaatttgtggactcgattcttttttactacatatttcccaagttatcttaagatgtctgtaaatttaacttttattaaagttttgtcaatctttgtgaaatagtggttgtggaacagtagaaaaccatatggggactatagtgcaacctatttgggtaaagaaaccatttgctaaaatggagaaagtaaatagatttttatttaaattacagaaacatgttaaaggccggacaaaggaaagacaataaaatcataaattatcggtcctgtttaaaaaaaaaaaaaaaaaa

SEQ ID NO: 2425 - DNA, 1480 bp, Homo sapiens
ggtgactgacggcgccggccgcccctgcccgtcgcccgcccgctgctgccgcccgcccggggtgtggagcccggccgctgctcgcgggctgagtgtctgtcgctgctgccgcctccacccagcctccgccatggacctcttcggggacctgccggagcccgagcgctcgccgcgcccggctgccgggaaagaagctcagaaaggacccctgctctttgatgacctccctccggccagcagtactgactcaggatcagggggacctttgctttttgatgatctcccacccgctagcagtggcgattcaggttctcttgccacatcaatatcccagatggtaaagactgaagggaaaggagcaaagagaaaaacctccgaggaagagaagaatggcagtgaagagcttgtggaaaagaaagtttgtaaagcctcttcggtgatctttggtctgaagggctatgtggctgagcggaagggtgagagggaggagatgcaggatgcccacgtcatcctgaacgacatcaccgaggagtgtaggcccccatcgtccctcattactcgggtttcatattttgctgtttttgatggacatggaggaattcgagcctcaaaatttgctgcacagaatttgcatcaaaacttaatcagaaaatttcctaaaggagatgtaatcagtgtagagaaaaccgtgaagagatgccttttggacactttcaagcatactgatgaagagttccttaaacaagcttccagccagaagcctgcctggaaagatgggtccactgccacgtgtgttctggctgtagacaacattctttatattgccaacctcggagatagtcgggcaatcttgtgtcgttataatgaggagagtcaaaaacatgcagccttaagcctcagcaaagagcataatccaactcagtatgaagagcggatgaggatacagaaggctggaggaaacgtcagggatgggcgtgttttgggcgtgctagaggtgtcacgctccattggggacgggcagtacaagcgctgcggtgtcacctctgtgcccgacatcagacgctgccagctgacccccaatgacaggttcattttgttggcctgtgatgggctcttcaaggtctttaccccagaagaagccgtgaacttcatcttgtcctgtctcgaggatgaaaagatccagacccgggaagggaagtccgcagccgacgcccgctacgaagcagcctgcaacaggctggccaacaaggcggtgcagcggggctcggccgacaacgtcactgtgatggtggtgcggatagggcactgaggggtggcgcgcggccaggagcacgcatggtattgacttaaaaggttcattttgtgtgtgtgcacattgtgtgttttgtgtactcctgtgggactcccatggttgtaaataaaggtttctctttttttttcctaaaaaaaaaaaaaaaaaaaaaaaaaaaaaaaaaaaaaa

SEQ ID NO: 2426 - DNA, 1943 bp, Homo sapiens
ggtgactgacggcgccggccgcccctgcccgtcgcccgcccgctgctgccgcccgcccggggtgtggagcccggccgctgctcgcgggctgagtgtctgtcgctgctgccgcctccacccagcctccgccatggacctcttcggggacctgccggagcccgagcgctcgccgcgcccggctgccgggaaagaagctcagaaaggacccctgctctttgatgacctccctccggccagcagtactgactcaggtacagtcttcaggctctcccaggtgtgtgtcaacgtctctactcatcctgggattgtagttgtctcaatctttttccctttcccccattttcaacacacagatgttttaggtgttggactgtctttaagttttgaatccatggcatcaggtaaggcagaaaaatctgctagtcgctagccctgagaagtactgcgaggaaatgtggagcagttttctctggttcatttgagtatttattttactacctgaagtacaatttaactttttaaggcagatttttatttcctttgaaataataggactttaaaataggttcaagatattattcattgcagtatgagttgccactggattgacgcaaagttttgagtttatttcagtaacctacataggtgtcctggtgggatggattctgaaacttaagtcttacatattttttgtgggctcactaagtgttctgctgtgtttcaggatcagggggacctttgctttttgatgatctcccacccgctagcagtggcgattcaggttctcttgccacatcaatatcccagatggtaaagactgaagggaaaggagcaaagagaaaaacctccgaggaagagaagaatggcagtgaagagcttgtggaaaagaaacctcttcggtgatctttggtctgaagggctatgtggctgagcggaagggtgagagggaggagatgcaggatgcccacgtcatcctgaacgacatcaccgaggagtgtaggcccccatcgtccctcattactcgggtttcatattttgctgtttttgatggacatggaggaattcgagcctcaaaatttgctgcacagaatttgcatcaaaacttaatcagaaaatttcctaaaggagatgtaatcagtgtagagaaaaccgtgaagagatgccttttggacactttcaagcatactgatgaagagttccttaaacaagcttccagccagaagcctgcctggaaagatgggtccactgccacgtgtgttctggctgtagacaacattctttatattgccaacctcggagatagtcgggcaatcttgtgtcgttataatgaggagagtcaaaaacatgcagccttaagcctcagcaaagagcataatccaactcagtatgaagagcggatgaggatacagaaggctggaggaaacgtcagggatgggcgtgttttgggcgtgctagaggtgtcacgctccattggggacgggcagtacaagcgctgcggtgtcacctctgtgcccgacatcagacgctgccagctgacccccaatgacaggttcattttgttggcctgtgatgggctcttcaaggtctttaccccagaagaagccgtgaacttcatcttgtcctgtctcgaggatgaaaagatccagacccgggaagggaagtccgcagccgacgcccgctacgaagcagcctgcaacaggctggccaacaaggcggtgcagcggggctcggccgacaacgtcactgtgatggtggtgcggatagggcactgaggggtggcgcgcggccaggagcacgcatggtattgacttaaaaggttcattttgtgtgtgtgcacattgtgtgttttgtgtactcctgtgggactcccatggttgtaaataaaggtttctctttttttttcctaaaaaaaaaaaaaaaaaaaaaaaaaaaaaaaaaaaaaa

SEQ ID NO: 2427 - DNA, 5220 bp, Homo sapiens
cagtcgctccgagcggccgcgagcagagccgcccagccctgtcagctgcgccgggacgataaggagtcaggccagggcgggatgacactcattgattctaaagcatctttaatctgccaggcggagggggctttgctggtctttcttggactattccagagaggacaactgtcatctgggaagtaacaacgcaggatgccccctggggtggactgccccatggaattctggaccaaggaggagaatcagagcgttgtggttgacttcctgctgcccacaggggtctacctgaacttccctgtgtcccgcaatgccaacctcagcaccatcaagcagctgctgtggcaccgcgcccagtatgagccgctcttccacatgctcagtggccccgaggcctatgtgttcacctgcatcaaccagacagcggagcagcaagagctggaggacgagcaacggcgtctgtgtgacgtgcagcccttcctgcccgtcctgcgcctggtggcccgtgagggcgaccgcgtgaagaagctcatcaactcacagatcagcctcctcatcggcaaaggcctccacgagtttgactccttgtgcgacccagaagtgaacgactttcgcgccaagatgtgccaattctgcgaggaggcggccgcccgccggcagcagctgggctgggaggcctggctgcagtacagtttccccctgcagctggagccctcggctcaaacctgggggcctggtaccctgcggctcccgaaccgggcccttctggtcaacgttaagtttgagggcagcgaggagagcttcaccttccaggtgtccaccaaggacgtgccgctggcgctgatggcctgtgccctgcggaagaaggccacagtgttccggcagccgctggtggagcagccggaagactacacgctgcaggtgaacggcaggcatgagtacctgtatggcaactacccgctctgccagttccagtacatctgcagctgcctgcacagtgggttgacccctcacctgaccatggtccattcctcctccatcctcgccatgcgggatgagcagagcaaccctgccccccaggtccagaaaccgcgtgccaaaccacctcccattcctgcgaagaagccttcctctgtgtccctgtggtccctggagcagccgttccgcatcgagctcatccagggcagcaaagtgaacgccgacgagcggatgaagctggtggtgcaggccgggcttttccacggcaacgagatgctgtgcaagacggtgtccagctcggaggtgagcgtgtgctcggagcccgtgtggaagcagcggctggagttcgacatcaacatctgcgacctgccccgcatggcccgtctctgctttgcgctgtacgccgtgatcgagaaagccaagaaggctcgctccaccaagaagaagtccaagaaggcggactgccccattgcctgggccaacctcatgctgtttgactacaaggaccagcttaagaccggggaacgctgcctctacatgtggccctccgtcccagatgagaagggcgagctgctgaaccccacgggcactgtgcgcagtaaccccaacacggatagcgccgctgccctgctcatctgcctgcccgaggtggccccgcaccccgtgtactaccccgccctggagaagatcttggagctggggcgacacagcgagtgtgtgcatgtcaccgaggaggagcagctgcagctgcgggaaatcctggagcggcgggggtctggggagctgtatgagcacgagaaggacctggtgtggaagctgcggcatgaagtccaggagcacttcccggaggcgctagcccggctgctgctggtcaccaagtggaacaagcatgaggatgtggcccagatgctctacctgctgtgctcctggccggagctgcccgtcctgagcgccctggagctgctagacttcagcttccccgattgccacgtaggctccttcgccatcaagtcgctgcggaaactgacggacgatgagctgttccagtacctgctgcagctggtgcaggtgctcaagtacgagtcctacctggactgcgagctgaccaaattcctgctggaccgggccctggccaaccgcaagatcggccacttccttttctggcacctccgctccgagatgcacgtgccgtcggtggccctgcgcttcggcctcatcctggaggcctactgcaggggcagcacccaccacatgaaggtgctgatgaagcagggggaagcactgagcaaactgaaggccctgaatgacttcgtcaagctgagctctcagaagacccccaagccccagaccaaggagctgatgcacttgtgcatgcggcaggaggcctacctagaggccctctcccacctgcagtccccactcgaccccagcaccctgctggctgaagtctgcgtggagcagtgcaccttcatggactccaagatgaagcccctgtggatcatgtacagcaacgaggaggcaggcagcggcggcagcgtgggcatcatctttaagaacggggatgacctccggcaggacatgctgaccctgcagatgatccagctcatggacgtcctgtggaagcaggaggggctggacctgaggatgaccccctatggctgcctccccaccggggaccgcacaggcctcattgaggtggtactccgttcagacaccatcgccaacatccaactcaacaagagcaacatggcagccacagccgccttcaacaaggatgccctgctcaactggctgaagtccaagaacccgggggaggccctggatcgagccattgaggagttcaccctctcctgtgctggctattgtgtggccacatatgtgctgggcattggcgatcggcacagcgacaacatcatgatccgagagagtgggcagctgttccacattgattttggccactttctggggaatttcaagaccaagtttggaatcaaccgcgagcgtgtcccattcatcctcacctatgactttgtccatgtgattcagcaggggaagactaataatagtgagaaatttgaacggttccggggctactgtgaaagggcctacaccatcctgcggcgccacgggcttctcttcctccacctctttgccctgatgcgggcggcaggcctgcctgagctcagctgctccaaagacatccagtatctcaaggactccctggcactggggaaaacagaggaggaggcactgaagcacttccgagtgaagtttaacgaagccctccgtgagagctggaaaaccaaagtgaactggctggcccacaacgtgtccaaagacaacaggcagtagtggctcctcccagccctgggcccaagaggaggcggctgcgggtcgtggggaccaagcacattggtcctaaaggggctgaagagcctgaactgcacctaacgggaaagaaccgacatggctgccttttgtttacactggttatttatttatgacttgaaatagtttaaggagctaaacagccataaacggaaacgcctccttcattcagcggcggtgctgggccccccgaggctgcacctggctctcggctgaggattgtcaccccaagtcttccagctggtggatctgggcccagcaaagactgttctcctcccgagggaaccttcttcccaggcctcccgccagactgcctgggtcctggcgcctggcggtcacctggtgcctactgtccgacaggatgcctcgatcctcgtgcgacccaccctgtgtatcctccctagactgagttctggcagctccccgaggcagccggggtaccctctagattcagggatgcttgctctccacttttcaagtgggtcttgggtacgagaattccctcatctttctctactgtaaagtgattttgtttgcaggtaagaaaataatagatgactcaccacacctctacggctggggagatcaggcccagccccataaaggagaatctacgctggtcctcaggacgtgttaaagagatctgggcctcatgtagctcaccccggtcacgcatgaaggcaaaagcaggtcagaagcgaatactctgccattatctcaaaaatctttttttttttttttttgagatggggtcttcctctgttgcccaggctggagtgcagtggtgcaatcttggctcactgtaacctccgcctcccaggttcaagtgattcttcttgcctcagcctcctgagtagctgggattacaggtgtgcaccacccgtacccagctaatttttgtattttagtagagacgggggtttcaccatgttggctgggctggtctcgaactcctgacctcaggtgatccacccgcctgagcctcccaaagtgctgggattacaggcatgagccaccacgcccggcccactctgccattgtctaagccacctctgaaagcaggttttaacaaaaggatgaggccagaactcttccagaaccatcacctttgggaacctgctgtgagagtgctgaggtaccagaagtgtgagaacgagggggcgtgctgggatctttctctctgactatacttagtttgaaatggtgcaggcttagtcttaagcctccaaaggcctggatttgagcagctttagaaatgcaggttctagggcttctcccagccttcagaagccaactaactctgcagatggggctaggactgtgggcttttagcagcccacaggtgatcctaacatatcaggccatggactcaggacctgcccggtgatgctgttgatttctcaaaggtcttccaaaactcaacagagccagaagtagccgcccgctcagcggctcaggtgccagctctgttctgattcaccaggggtccgtcagtagtcattgccacccgcggggcacctccctggccacacgcctgttcccagcaagtgctgaaactcactagaccgtctgcctgtttcgaaatggggaaagccgtgcgtgcgcgttatttatttaagtgcgcctgtgtgcgcgggtgtgggagcacactttgcaaagccacagcgtttctggttttgggtgtacagtcttgtgtgcctggcgagaagaatattttctatttttttaagtcatttcatgtttctgtctggggaaggcaagttagttaagtatcactgatgtgggttgagaccagcactctgtgaaaccttgaaatgagaagtaaaggcagatgaaaagaaaaaaaaaaaaaaa

SEQ ID NO: 2428 - DNA, 8890 bp, Homo sapiens
atggcggagccgcgcagagtagcgttcattagcttgtcaccggtgcggcggcgcgaggccgagtacccggggcccgagcgtgagcccgagtacccccgcgagcccccccggctggagccgcagccgtaccgcgagccggcccgggcggagccgccggccccgcgggagcctgccccccgctcggacgcgcagcccccgtcgcgggagaagccgctcccccagcgcgaggtcagccgcgccgagccgcccatgtcgctgcagcgggagcccccgcggcccgagccgccgccgccgttcccgccgctgcccttgcagccgcccccgccgcgggagtcggcttcccgggctgagcagccgccgcggccgccgagggagacggtgcgcctggagctggtgcttaaggaccccaccgacgagagctgcgtggagttcagttacccggagctgctgctgtgcggagaacaacggaagaagctcattcacacagaagacccatttaatgatgaacatcaggagaggcaagaggtggaaatgttggctaagaagtttgaaatgaaatatggtgggaaaccccgtaaacaccggaaggatcggctacaagatttaattgatataggctttggctatgatgagacagatccatttattgataactcagaggcttatgatgaattagttcccgcttctctaacaacaaaatatggaggcttttatatcaacactggcactctacagtttcgccaagcttcagatactgaagaagatgatattacagacaaccaaaagcacaagccacccaaggtccccaaaataaaagaagatgatattgagatgaagaagcggaagcggaaagaggaaggggaaaaggagaagaagccaaggaaaaaagttcccaaacaactgggagttgtggctctaaattcacacaagtctgaaaaaaagaagaaacgttataaagattctctttctctagctgccatgattagaaaattccagaaagagaaggatgcattaaagaaggagtctaaccccaaagtcccagtgaccttgtcaaccccttctctgaataaacccccatgtgctgctgcagcactggggaatgacgtcccggacttaaatctgagcagcggtgatccagaccttcccatttttgttagcacaaatgaacatgagctgtttcaggaagctgaaaatgccctagagatgctagatgattttgacttcgacagattactggatgctgcttctgatggtagccccctatctgagtcggggggtgaaaatggaaccaccacccagccaacctacacttctcaggttatgcccaaagtggtacctacactcccagagggtctacctgtacttcttgaaaaacgtatcgaagaccttcgtgtagctgccaaactttttgatgaagaaggaaggaaaaaattctttacacaggatatgaataatattcttctggacattgagttacagctacaagaactaggccctgtcattcgcagtggtgtctactcccaccttgaagcttttgtgccatgcaataaagaaacactagtaaaacgtctgaagaagttacatctcaatgtccaggatgatcgtttaagagaacctctgcaaaaactgaaactggctgttagcaatgtcatgcctgaacagctatttaaataccaggaggactgccaggctcgtagtcaagctaagtgtgccaaattgcagacagatgaagaacgagaaaaaaatggatctgaagaggatgatgatgagaaaccaggaaaacgtgtcataggaccaagaaagaaattccactgggatgacactatcagaactttgttatgtaaccttgttgagatcaaattgggatgctatgagttagaaccaaataaaagccagtctgctgaagattatcttaagtcttttatggagacagaagtgaagcccctgtggcctaagggctggatgcaggcaagaatgctttttaaggaaagccggagtgttcataatcatcttacttctgctccggcaaagaaaaaggtgattcctgcacctaaacccaaagtaaaggaggtgatggtaaagacccttcctctccattctttccccactatgcttaaggagtgtagtccaaaaaaggaccagaaaactccaacatccctggtggcttcggttagcggtcctccaacgagctccagcacagctgccattgctgcagctagctctagctctgcaccagcccaagaaaccatctgcctcgacgactcactagatgaagacctttctttccattcaccttcactggatcttgtttctgaagctttagcggttatcaacaatgggaacaagggccctccagttggctcaaggataagcatgccaaccacaaagcctcgtccaggactgagagaagaaaaattagcaagtatcatgagtaagctgccactagctactcccaaaaaactagattctactcagactacacattcttcaagtcttattgctggtcacacagggccagtaccaaagaaaccccaggatttagctcatactggcatctcttcaggccttattgctggttcttccattcagaaccctaaagtttctttagaacctttgccagccaggctacttcaacaaggacttcagaggtcaagccagattcacacttcttcctcttcacagacccatgtctcctcttcttcccaagcccaaattgctgcctcttctcatgctctgggaacatccgaggcccaagatgcttcttcgttaacacaagtaacaaaggtgcaccagcattcagctgtccagcagaactatgtgtctccattacaggccaccatcagtaaatcccagaccaaccccgtcgtgaagttaagtaataatccccaactctcctgttcctcctcacttattaagacttcagataagccacttatgtaccgccttcccttatctaccccctcacctggaaatggttctcaagggtcccaccccctggtttctaggacagtacctagcaccactacctccagtaactatttagccaaggctatggtgtcacagatctccacgcagggtttcaaatctcccttctcgatggctgcctccccaaaacttgccgcatctcccaagcctgccacatctcctaaacccctgccctcgcctaagccttctgcctcacccaagccctctctgtcagctaagccttcagtatcaactaaacttatttctaaatccaacccaactcccaagcctactgtatccccaagtagttccagtccaaatgcactagttgcccagggtagccactccagcactaacagcccagtccataaacagcccagtggaatgaacatcagcagacagtctcccaccttgaatttattgccctctagtcgcacttcaggccttccacctacaaaaaatcttcaggccccctcaaagctaacaaactcatcatccactggaactgttgggaagaacagcttgagtggaattgcaatgaatgtacctgccagcagaggtagcaaccttaactcaagcggagctaataggactagtctgtctgggggaacaggaagtggaacacagggtgctaccaaaccattgtctactccacatagaccatccactgcctcagggtcttcagtggtaacagccagtgtgcagtccacagcaggagcatcattattggctaatgcctcacctctgactctcatgacatcacctttgtctgtaacaaatcaaaatgtgactccttttgggatgctgggtggccttgttccagtgaccatgcccttccagtttcccttggagatatttggctttggaacggacacagctggagtgacaaccacctcgggatctacctcagccgctttccaccatagcctaactcagaatttactaaagggtttacagccaggaggagctcagcatgcagcaacgctttcccactcacctctgcctgcacacttacagcaagcatttcacgatggaggccaaagtaaaggggacactaaattaccacggaaatctcagtgactgcccagcaagcaaaggagacgaaatgtttagttgactgatggaatctacctgatgggaaagtacttatgtggtcatagggctgctgtttctgtcgatgtttacattctctcgtcccaagcactgtggtgaggaggaaaaagaaaagaaaacattacttgagcaaagccaggtgcaggaggaagaaatgcttttgtgcaaagttagtgacctttggtctcttctaaagaatgacagagttaccgtattaacagacttgaaagagactcagttgtcaaacccacagaaatacaaatttgatttttcccgggggaggaagaaggaagtgaagagaatttgggtaaactccatccatcctgggggttggatctgaacacttacagacataattggtaataaaaggcattaaaaactggaattaggccagtttgtcaggaataatgatcatgtctatttgaatggactgtgtagcagatttgccacaaaaagaaataataatgattctatctccgatagacagtagctgcatagcacaccctcgaaaatcctgaacaaacttgaatctcctccagtgtgtagcaacttccctcaatcagtggactaaagatccttcaggaaagttattttagcacagtgatatatattattaaatcatctagatttttaaaaatcaggaagttgagcctgttgctcttaagagatgaaacctagatgtcccctttttgtaaaagggtcaatttcatcttccgttcagaagcaggtacttaactcttttcttcaggtgatttgtgcatctagtattgactggttaattcttatttccattcttgatgttaaaatgtgactgtgttcacatttttctcctgagaaatggggatctttacagggttattgctttgctgcttttagcccttgcagcaacataaactctaagtttccccagttcatctaacttcacaacttctccttctgttcttttagctagtggtccttcaggtgattattagctattggtataaacaggtagaagtgtacactatgtttcttcattggtcattcaaatggcatgaatatagtttttgaatttttaagatggtattttaaagggaggaatcacattaggatcacaatcacgacatatttttactccctgtatccagtgtagtgaaattgtttggagcatttgagatcctaaagcttcactatttactcagtgtattggtatgtgagtaaatctgcagaaaataagactccttagttattatagcttccttatgcaaatagcatattcaacaaaggatgttaagggaaaaatttatggttctccttggatacatttgatttgatgggtttttttgccgcattattctagttttttaagcttctgaatattttcatactatatcagagaatggtgtaaactctaaatggtataagcttcatccatttataatgacactaacctaaaaaaaatagactggtagtgacaagatttattgcatatgtgtttattatacattaccctataccattagatttactcaattaagagtattaaccaggcccttttttcttttatacacaaaagtcccagataccctacaggactgtgaataaataaccacagatcggttcagatctgtatgcctatattttgacttcaaagtcacattggcttgcttcatagcgaaaaagttaataaataactgaaaactttagttccaagaacttgttacagtaaagggaaaggattatttcaaaggaatcactgatataatttcttgactctaagaatttagtttatcaataaaacaaatatggatgtagtatgaaccccagtagatattttggaaggatactgggaggatgttgcagagaggtttgacttgaattcagtatgtttgatgaagatttgcttggtttcaattaaggaagcttgcccaatttttttaattttttcaaatgtagtggacctcttgcttttacgaaatatgaataaaaaggtctttgcttcatactaggggaagtgatgggattttcctttgggaaggtagcctttgttttacttctcataccacaagagaagtcgaagtgcgtattaatttctcttcctgaatacttgtatatatgtttgtctgtatgtatatatacatacacacatacattcatataaatgactagtttgagtcaaaaaatcatttgaatttcttaaaaccatcaattctgaatcatgccatatgaagatccctggtgactgtcatcattagaaaagaacaagataatcagttcttttccctgtaacattttatactaaccagtaaaaatatctgaaggcccttggctccaagaatacaatgtggagattcttctgtgttctctttagtcttgattccttgaggactactgtcagatccctaccttaaacccccacctgcactgacgacttacattcatttcagtcaggaccccccttttatgttgtatgaatcagtcaaacatcgttgtatttctgtatagataaagtatgatcagagagtttctacatgtaaatagtaatctatttctttcctagatcataacattgaaaaaggtgcccatactttatggtcacctgtctttaccgtttttattactaaaaacaaacatataaattggttattttttagcacagagacttgtgactcatactgtatttttgcacttaaaaatcaaattatgttattttttaaaatggtgagtcattggaaaggatatctatagagcaacgtgtatttctgaagagcattagcaacatccaaatgcaaaaataatcagcacacatgattatatcccactccttgggattcttgattcaggaagattaagctgtttgttttcaactgttttatattttaaattgccttcactgatatataagctgttactgtacatacaagttaatcctcagtattcacaagcaataacagtcagcagggttgtcctcggagatagctgtgctgagcctcagttggagactgggagcaaagtgtcaagctcattcagagcatccagaataaatgcaagcaataatttccattataattcaattataattcttgtatgcttttgaggtcagagggtaaatgaaatcgtgattttaaaacagcctgaagaaaaaggttttgggaaaggaaatgaggctaatctgtagtcataaaattctgatactttgcggaaattagaagatggtgatagtgcattcttttgtgcccaccccccctctgatggatgttgttagcccaaattacatttttcatatcatggacattgaatagggtttattgaatcaggaaggtaaggggaagaaccgggcacatatgtgttggaatactgtgggtttgacacctggttgaaaacaacttattggacatgatttttaacccaggatatttttttcccaaagcagatctaaattgtttactacccagggttggaaagggcaggcacctctaatctagtctttgtcctctggttgccctctcccacacccctttccacctatacttggttcaagacattttctgaaacgaaaattctgctgttgttcaaactgccattggttatgagaactctgcgtcctttgggatcatctcttagaactccagtgatctatcatatttgctgctacatttgtaaaatgaactttgcctgtattggttgactttaatttacagttctttatttctaggatgttttgtcctctagtttgactcatgtatagaattaggatactttattttaggagtgtaccgtaaaagcacactggtccctttgttgtttttattatttaggtttggaatttgtttgctttttttttgtttgttttttgttttgtttctgtttttgtttttttttaaagttggaaatagaagaatgagaaaaatctataatcaggccaaacttgagaactttcctgtgcttcagcactgtaattctgctgacctaatgttctcaaaagaggcacttttactttctattgtgcatgtatgattgttgttttttgcttttgagggggcttttgtgtttgtaataatgaagcagaagaaaagtgcagtagtagataaatgatcacaacatgttatgcaattttattttataaaattttaaggggaaaagtttaactctttgtaaatcatttcttagctctggtaaaatgcttatattactcctctaaaacatgctcaattcaggcctttgtctttgttaagtgccttttttctttcttttttcctctcttttgaaactgttgtcacattatcttaaagtacagactgataagtcaggggattcaggaggaagaatctcacacttgtcaacatcatgtcatgctgtgtaaccctcttcctttgctttctatgtatatggatatatgtgtaagatacatacattacatatatataaaactaggagctgctgtaccattgcatcctttccaaacactcccctttccatgtttgcaaaacttctgccttgtttattccattgcttttagttgattaaagtgggtggattagaaaagtatcttttcggccgggtgcggtggctcacgcctgtaatcccagctctttgggaggctgaggcaggtggatcacgaggtcaggagatcgagaccatcctggctaatatggtgaaaccccgtctctactaaaaatacaaaaaattagccaggcgtggtggcaggcgcctgtagtcccagctacttgggaggctgaggcaggagaatgacataaacccgggaggcggaagttgcagtgagctgagatcgcgccactgcactccagcctgggcgacagagcaagactccgtc

SEQ ID NO: 2429 - DNA, 8890 bp, Homo sapiens; identical to SEQ ID NO: 2428

SEQ ID NO: 2430 - DNA, 8890 bp, Homo sapiens; identical to SEQ ID NO: 2428

SEQ ID NO: 2431 - DNA, 2500 bp, Homo sapiens
cggggggatcttggctgtgtgtctgcggatctgtagtggcggcggcggcggcggcggcggggaggcagcaggcgcgggagcgggcgcaggagcaggcggcggcggtggcggcggcggttagacatgaacgccgcctcggcgccggcggtgcacggagagccccttctcgcgcgcgggcggtttgtgtgattttgctaaaatgcatcaccaacagcgaatggctgccttagggacggacaaagagctgagtgatttactggatttcagtgcgatgttttcacctcctgtgagcagtgggaaaaatggaccaacttctttggcaagtggacattttactggctcaaatgtagaagacagaagtagctcagggtcctgggggaatggaggacatccaagcccgtccaggaactatggagatgggactccctatgaccacatgaccagcagggaccttgggtcacatgacaatctctctccaccttttgtcaattccagaatacaaagtaaaacagaaaggggctcatactcatcttatgggagagaatcaaacttacagggttgccaccagcagagtctccttggaggtgacatggatatgggcaacccaggaaccctttcgcccaccaaacctggttcccagtactatcagtattctagcaataatccccgaaggaggcctcttcacagtagtgccatggaggtacagacaaagaaagttcgaaaagttcctccaggtttgccatcttcagtctatgctccatcagcaagcactgccgactacaatagggactcgccaggctatccttcctccaaaccagcaaccagcactttccctagctccttcttcatgcaagatggccatcacagcagtgacccttggagctcctccagtgggatgaatcagcctggctatgcaggaatgttgggcaactcttctcatattccacagtccagcagctactgtagcctgcatccacatgaacgtttgagctatccatcacactcctcagcagacatcaattccagtcttcctccgatgtccactttccatcgtagtggtacaaaccattacagcacctcttcctgtacgcctcctgccaacgggacagacagtataatggcaaatagaggaagcggggcagccggcagctcccagactggagatgctctggggaaagcacttgcttcgatctattctccagatcacactaacaacagcttttcatcaaacccttcaactcctgttggctctcctccatctctctcagcaggcacagctgtttggtctagaaatggaggacaggcctcatcgtctcctaattatgaaggacccttacactctttgcaaagccgaattgaagatcgtttagaaagactggatgatgctattcatgttctccggaaccatgcagtgggcccatccacagctatgcctggtggtcatggggacatgcatggaatcattggaccttctcataatggagccatgggtggtctgggctcagggtatggaaccggccttctttcagccaacagacattcactcatggtggggacccatcgtgaagatggcgtggccctgagaggcagccattctcttctgccaaaccaggttccggttccacagcttcctgtccagtctgcgacttcccctgacctgaacccaccccaggacccttacagaggcatgccaccaggactacaggggcagagtgtctcctctggcagctctgagatcaaatccgatgacgagggtgatgagaacctgcaagacacgaaatcttcggaggacaagaaattagatgacgacaagaaggatatcaaatcaattactagcaataatgacgatgaggacctgacaccagagcagaaggcagagcgtgagaaggagcggaggatggccaacaatgcccgagagcgtctgcgggtccgtgacatcaacgaggctttcaaagagctcggccgcatggtgcagctccacctcaagagtgacaagccccagaccaagctcctgatcctccaccaggcggtggccgtcatcctcagtctggagcagcaagtccgagaaaggaatctgaatccgaaagctgcgtgtctgaaaagaagggaggaagagaaggtgtcctcggagcctccccctctctccttggccggcccacaccctggaatgggagacgcatcgaatcacatgggacagatgtaaaagggtccaagttgccacattgcttcattaaaacaagagaccacttccttaacagctgtattatcttaaacccacataaacacttctccttaacccccatttttgtaatataagacaagtctgagtagttatgaatcgcagacgcaagaggtttcagcattcccaattatcaaaaaacagaaaaacaaaaaaaagaaagaaaaaagtgcaacttgagggacgactttctttaacatatcattcagaatgtgcaaagcagtatgtacaggctgagacacagcccagagactgaacggc

SEQ ID NO: 2432 - DNA, 2591 bp, Homo sapiens
agttcagcccgcgccgctcctgcgggtcggactggggctgtggcggaaattgacaatggcccttcagctatgctaggtctataatgggaagtgtcacagttcggtatttctgttatgggtgcctttttacatctgcgacctggacagttttgctttttgtttatttcaacttcagtgaagtgactcagccacttaagaatgtgcccgtcaaggggtctgggccccacggaccatctccaaaaaaattctatccccgtttcactcgaggcccaagtcgagtgctcgagccacagttcaaagcaaacaaaattgacgatgtgatagacagtcgtgttgaagatccagaagaaggccacttgaaattctcttctgaattaggtatgatttttaatgaacgcgatcaagagttgagagacttgggctatcagaaacatgcttttaatatgcttatcagtgaccgcttgggctaccacagagatgtgccagacacaaggaatgcagcatgtaaagaaaagttctacccacctgacctgccagctgctagtgttgttatctgtttctataatgaagcgttttctgccttgcttcggacagtgcacagtgtcatagaccgcacgccagcacacctgcttcatgagatcatccttgtggatgatgatagtgactttgatgatttgaaaggagaactagatgaatatgtccaaaaatacctccctggaaaaattaaagtcataagaaatacaaagcgtgaggggttgattcgagggagaatgattggcgcggcccacgcgacaggagaagtccttgtgttcctggacagccactgtgaagtgaatgtgatgtggctgcagcccttgctggccgccatccgtgaggaccggcacaccgtggtgtgcccagtgattgacatcatcagcgccgacacgctggcctacagctcgtcccctgtcgtccgcggagggttcaactggggactgcacttcaaatgggatcttgtccccctttctgagctaggacgagcggagggagccactgcaccaataaagtcaccaacaatggctggaggtttgtttgccatgaacagacagtatttccatgaacttggacagtatgatagtggcatggatatctggggaggagaaaatttggaaatatcatttcggatctggatgtgtggcggtaagctcttcatcatcccttgctctagagtaggacacattttccgaaaaaggcgaccatatggatctcccgaaggccaggacaccatgacacacaactctttgcggctggcacatgtctggttggatgaatacaaggagcagtatttttccttaagacctgacctgaagacgaaaagctatggcaatatcagtgagcgtgtggaactgagaaagaagttgggctgtaaatcatttaaatggtatttggataatgtatacccagagatgcagatatctgggtcccacgccaaaccccaacaacccatttttgtcaatagagggccaaaacgacccaaagtccttcaacgtggaaggctctatcacctccagaccaacaaatgcctggtggcccagggccgcccaagtcagaagggaggtctcgtggtgcttaaggcctgtgactacagtgacccaaatcagatctggatctataatgaagagcatgaattggttttaaatagtctcctttgtctagatatgtcagagactcgctcatcagacccgccacggctcgtgaaatgccacgggtcaggaggatcccagcagtggacctttgggaaaaacaatcggctataccaggtgtcggttggactgtgcctgagagcagtggatcccctgggtcagaagggctctgtcgccatggcgatctgcgatggctcctcttcacagcagtggcatttggaaggttaaggtggatgctgtggcgggaacgttgcttcatcaggcgttgcctccggtgtggagtttggggctttaggaaagcctgggttgggtggagcagaaccatcttggagaagatgacagttccctgtcctcccggagatgcctgggtgtgttagcagaggtgacacgtgtctgacagagacgggagctctgagtgtccacgggtgaagaagtgagtgtccacgggtgaagaagtgagtatgtttcacctggacattaaggtgatgtttgagctgctgttaaggaatttcttgcttatagaggcaaaccacagtatcattttaactctagaattgggcttgtacagaaggataaaacccaggaaaatggatatttctattcagatttatttatgcctctttttaatcccctttaatgatgcagtggtttttatctgatcaggaacttgtcatgatttcctttcttagacttcataggagatagtgctttaaaaaaaaaaaaaaacttctattatttgtttagtatgttgtaagtagatcattttaaaaaactgaatctatattatgtttaacttcagaaggcatcatttataagacagtatggcagttaattataaaattattttgatgaattatgatacaatctacataataaagaatccttttgattaaaaaaaaaaaaaaaaaa

SEQ ID NO: 2433 - DNA, 2488 bp, Homo sapiens
cggcccaacgaggcgctggtggtttcagggggctgttgtggttccgactataaacagtacgtgtttggcggctgggcctgggcctggtggtgtatctccgacactcagaggatttccctagagattatgacgttgcagccccgctgcgaggacgtagagacggccgagggggtagctttaactgtgacgggtgtcgcccaggtgaagatcatgacggagaaggaactcctggccgtggcttgtgagcagtttctgggtaagaatgtgcaggacatcaaaaacgtcgtcctgcagaccctggagggacatctgcgctccatcctcgggaccctgacagtggagcagatttatcaggaccgggaccagtttgccaagctggtgcgggaggtggcagcccctgatgttggccgcatgggcattgagatcctcagcttcaccatcaaggacgtgtatgacaaagtggactatctgagctccctgggcaagacgcagactgccgtggtgcagagagatgctgacattggcgtggccgaggctgaacgggacgcaggcatccgggaagctgagtgcaagaaggagatgctggatgtgaagttcatggcagacaccaagattgctgactctaagcgagccttcgagctgcaaaagtcagccttcagtgaggaggttaacatcaagacagctgaggcccagttggcctatgagctgcagggggcccgtgaacagcagaagatccggcaggaagagattgagattgaggttgtgcagcgcaagaaacagattgccgtggaggcacaggagatcctgcgtacggacaaggagctcatcgctacagtgcgccggcctgccgaggccgaggcccaccgcatccagcagattgccgagggtgaaaaggtgaagcaggtcctcttggcacaggcagaggctgagaagatccgcaaaatcggggaggcggaagcggcagtcatcgaggcgatgggcaaggcagaggctgagcggatgaagctcaaggcagaagcctaccagaaatacggggatgcagccaagatggccttggtgctagaggccctgccccagattgctgccaaaatcgctgccccacttaccaaggtcgatgagattgtggtcctcagtggagacaacagtaaggtcacatcagaagtgaaccgactgctggccgagctgcctgcctctgtgcatgccctcacaggcgtggacctgtctaagatacccctgatcaagaaggccactggtgtgcaggtgtgaggctcctacaggcccactctcttcagcagccacccggccctccctccagcacccgttttaatcccacagaacaacgggaacgttactgactctggtgccttatctcgaagggaccagaagtgctgcgtgttcaggccatctctggctgtcttcctgtctctcctgtctgtccacctcctcctcttcctctcctttaccccactttcactgccactttcatcaggtttgtgtctcatctccctgcgtgtcttttcctttgtctgtctttttctttcccccatgcacatcatgtagattaagctgaagatgtttattacaatcactctctgtggggggtggccctgctgctcctcagaatcctggtgccttgaagttctctgtgcatctgtccatcctccctatggccctggccagagctcagcatgggcaggggttctgggtaggacggtcactgtcctctctcctggactggtcttcccagccctaaaccctgccccaggaagcccacagcctcacctgctgctgcccctctaggtctgggcagccatgacctgcagggcccagagacactgtccttcccctcatccacccaaggccccagccagcgctcataccctgtcctttctccctgaccccaagggcacagaggcaaggcctcctgtctacagcagcttcctcagtttcctactgccttaggaggcccctgcttgtgctcagggaaggcctcttcatgggcatgttcctgctggggcggtgcggtttggtcccaactctgctaagttttctgagatgagggtctagccctgttggggacagaaaagtgtgtagaccttcttcctgctagggctgcactgtcctgggtgttgggcccttctggtggacaaggctgtgccaaccctgtacagaatcgagtgctgtagcctggccagaccccagagcccttgtgccatctttcttcctggccagagtgatggggttccagccatggggaagcaacccaatcctctgtctccttgctccaatggaggcagaagagcccaggacccaagcgtcttggcaggggtgctgtgaatgtccagtggtcccagctccccaccctggccctgccccagcctgtgtagctcttcctgcatgtggatgctgcatgtctggtctggggcttggatgttgcactgccccactgcctgtcccttctggtaaaataaagaactcttaatgcccg

SEQ ID NO: 2434 - DNA, 1766 bp, Homo sapiens
ccacgcgtccggaaccctgaggaacagacgttccctcgcggccctggcacctccaaccccagatatgctgctgctgctgctgctgcccctgctctgggggagggagagggtggaaggacagaagagtaaccggaaggattactcgctgacgatgcagagttccgtgaccgtgcaagagggcatgtgtgtccatgtgcgctgctccttctcctacccagtggacagccagactgactctgacccagttcatggctactggttccgggcagggaatgatataagctggaaggctccagtggccacaaacaacccagcttgggcagtgcaggaggaaactcgggaccgattccacctccttggggacccacagaccaaaaattgcaccctgagcatcagagatgccagaatgagtgatgcggggagatacttctttcgtatggagaaaggaaatataaaatggaattataaatatgaccagctctctgtgaacgtgacagccttgacccacaggcccaacatccttatccccggtaccctggagtctggctgcttccagaatctgacctgctctgtgccctgggcctgtgagcaggggacgccccctatgatctcctggatggggacctctgtgtcccccctgcacccctccaccacccgctcctcagtgctcaccctcatcccacagccccagcaccacggcaccagcctcacctgtcaggtgaccttgcctggggccggcgtgaccacgaacaggaccatccaactcaatgtgtcctaccctcctcagaacttgactgtgactgtcttccaaggagaaggcacagcatccacagctctggggaacagctcatctctttcagtcctagagggccagtctctgcgcttggtctgtgctgttgacagcaatccccctgccaggctgagctggacctggaggagtctgaccctgtacccctcacagccctcaaaccctctggtactggagctgcaagtgcacctgggggatgaaggggaattcacctgtcgagctcagaactctctgggttcccagcacgtttccctgaacctctccctgcaacaggagtacacaggcaaaatgaggcctgtatcaggagtgttgctgggggcggtcgggggagctggagccacagccctggtcttcctctccttctgtgtcatcttcattgtagtgaggtcctgcaggaagaaatcggcaaggccagcagcggacgtgggagacataggcatgaaggatgcaaacaccatcaggggctcagcctctcagggtaacctgactgagtcctgggcagatgataacccccgacaccatggcctggctgcccactcctcaggggaggaaagagagatccagtatgcacccctcagctttcataagggggagcctcaggacctatcaggacaagaagccaccaacaatgagtactcagagatcaagatccccaagtaagaaaatgcagaggctcgggcttgtttgagggttcacgacccctccagcaaaggagtctgaggctgattccagtagaattagcagccctcaatgctgtgcaacaagacatcagaacttattcctcttgtctaactgaaaatgcatgcctgatgaccaaactctccctttccccatccaatcggtccacactccccgccctggcctctggtacccaccattctcctctgtacttctctaaggatgactactttagattccgaatatagtgagattgtaacgtgaaaaaaaaaaaaaaagg

SEQ ID NO: 2435 - DNA, 1476 bp, Homo sapiens
cccacgcgtccggaacagacgttccctcgcggccctggcacctccaaccccagatatgctgctgctgctgctgctgcccctgctctgggggagggagagggtggaaggacagaagagtaaccggaaggattactcgctgacgatgcagagttccgtgaccgtgcaagagggcatgtgtgcccatgtgcgctgctccttctcctacccagtggacagccagactgactctgacccagttcatggctactggttccgggcagggaatgatataagctggaaggctccagtggccacaaacaacccagcttgggcagtgcaggaggaaactcgggaccgattccacctccttggggacccacagaccaaaaattgcaccctgagcatcagagatgccagaatgagtgatgcggggagatacttctttcgtatggagaaaggaaatataaaatggaattataaatatgaccagctctctgtgaacgtgacagaccctcctcagaacttgactgtgactgtcttccaaggagaaggcacagcatccacagctctggggaacagctcatctctttcagtcctagagggccagtctctgcgcttggtctgtgctgttgacagcaatccccctgccaggctgagctggacctggaggagtctgaccctgtacccctcacagccctcaaaccctctggtactggagctgcaagtgcacctgggggatgaaggggaattcacctgtcgagctcagaactctctgggttcccagcacgtttccctgaacctctccctgcaacaggagtacacaggcaaaatgaggcctgtatcaggagtgttgctgggggcggtcgggggagctggagccacagccctggtcttcctctccttctgtgtcatcttcattgtagtgaggtcctgcaggaagaaatcggcaaggccagcagcggacgtgggagacataggcatgaaggatgcaaacaccatcaggggctcagctctcagggtaacctgactgagtcctgggcagatgataacccccgacaccatggcctggctgcccactcctcaggggaggaaagagagatccagtatgcacccctcagctttcataagggggagcctcaggacctatcaggacaagaagccaccaacaatgagtactcagagatcaagatccccaagtaagaaaatgcagaggctcgggcttgtttgagggttcacgacccctccagcaaaggagtctgaggctgattccagtagaattagcagccctcaatgctgtgcaacaagacatcagaacttattcctcttgtctaactgaaaatgcatgcctgatgaccaaactctccctttccccatccaatcggtccacactccccgccctggcctctggtacccaccattctcctctgtacttctctaaggatgactactttagattccgaatatagtgagattgtaacgtgaaaaaaaaaaaaaaaa

SEQ ID NO: 2436 - DNA, 2443 bp, Homo sapiens
ccacacttcccgcctccctaaaacgcacaccccgctagccatgggcagccgcgaccacctgttcaaagtgctggtggtgggggacgccgcagtgggcaagacgtcgctggtgcagcgatattcccaggacagcttcagcaaacactacaagtccacggtgggagtggattttgctctgaaggttctccagtggtctgactacgagatagtgcggcttcagctgtgggatattgcagggcaggagcgcttcacctctatgacacgattgtattatcgggatgcctctgcctgtgttattatgtttgacgttaccaatgccactaccttcagcaacagccagaggtggaaacaggacctagacagcaagctcacactacccaatggagagccggtgccctgcctgctcttggccaacaagtgtgatctgtccccttgggcagtgagccgggaccagattgaccggttcagtaaagagaacggtttcacaggttggacagaaacatcagtcaaggagaacaaaaatattaatgaggctatgagagtcctcattgaaaagatgatgagaaattccacagaagatatcatgtctttgtccacccaaggggactacatcaatctacaaaccaagtcctccagctggtcctgctgctagtagtgtttggcttattttccatcccagttctgggaggtcttttaagtctcttccctttggttgcccacctgaccattttattaagtacatttgaattgtctcctgactactgtccagtaaggaggcccattgtcacttagaaaagacacctggaacccatgtgcatttctgcatctcctggattagcctttcacatgttgctgactcacattagtgccagttagtgccttcggtgtaagatcttctcatcagccctcaatttgtgatccggaattttgtgagaaggattagaaatcagcacctgcgttttagagatcataattctcacctacttctgagcttatttttccatttgatattcattgatatcatgacttccaattgagaggaaaatgagatcaaatgtcatttcccaaatttcttgtaggccgttgtttcagattctttctgtcttggaatgtaaacatctgattctggaatgcagaaggaggggtctgggcatctgtggatttttggctactagaagtgtcccagaagtcactgtatttttgaaacttctaacgtcataattaagtttctcttgtcttggcatcaagaatagtcaagttttttggccgggcatggtggctcatgcctgtaatcccagcacttggggaggccaaggcaggcggatcacatgaggccaggaattcgagaccaacctggtcagcatggcaaaaccccgtctctactaaaagtacaaaaattagccaggcgtgatggcacgtgtctgtaatcccagctactctggagactgaggtgggagaatcgcttgagactgggaggcagaggttgcagtgaaccgagatcatgccaccgcacttcagcctgggtgacagagaaggactccgtctcaaaaaaaaaagaaaaaagaatagtcatttttaaactacctatctcatgcaatgaaagcattttcttccacaaagagcttaatcctcatgataggattgcctagtgtctcccatttgcaggtttctgggttgatgtcttaatgcataatactgcaagtgacatcagctggctgtgatgcttcgaaataggtctgctcctcacagctttgggaatctgaatggaagaagaaaagagagaagttaacaacctccactggggcaactttgtgaacatgtaggcacttagtcataggaaacatattatgtgcaggtcctagcctggggtaggaaagtagatagacagaaaatcattaggtaatttaagtactaaattgggcagggctttttagtatcaaatcactactagaccgtttaatttgttaaattatctctaggatggtgatttataacctacccaaagttatcgatattcttactaaactctgaggcctgaagttctgtgatagaccttaaataagtgtcctaagtcagtggttcccaaatctggctggtcgggaatacctgggaagtttgttaaaattttttaaaaatgttttaagatttttgggtcctgagccaggcgtggtggctcacacctgtaatcccagcactttgggaggctgaggcaggtggatcgcctgaggtcaggagttcaagatcaacctggccaacatactgaaaccccgtctctactaaaaataagaaaaattagctgggcgtggtggcgggcacctgtaatcccagctacttgggaggctgaggcaggagaatcacttgaacctgggagttagaggttgcagtgagctgagatcacaccattgcgcttcagcctgggcaacaagagtgaaactccatctcc

SEQ ID NO: 2437 - DNA, 1709 bp, Homo sapiens
aaacagcggacggaggggccggcggtggcggagccggagcaagcaggggttcggcggcattacctgtacccattcaccggcggctaccggcggcggcgcgcagcgtgtcaggcggagagacccgccgccaggaatgaatctgaagtctgctgcagtaaaacacagaaggctttaaaatgttttcttgcataaaattcaaaacttttaagtagctgcttatgagaatagggaaggcagaaagctaatgtctgtctcaagatacaggacagctgtttgctcatcaacctcaactgtgtgtgcaactgaggaacatggctcaagaaactaatcacagccaagtgcctatgctttgttccactggctgtggattttatggaaaccctcgtacaaatggcatgtgttcagtatgctataaagaacatcttcaaagacagaatagtagtaatggtagaataagcccacctgcaacctctgtcagtagtctgtctgaatctttaccagttcaatgcacagatggcagtgtgccagaagcccagtcagcattagactctacatcttcatctatgcagcccagccctgtatcaaatcagtcacttttatcagaatctgtagcatcttctcaattggacagtacatctgtggacaaagcagtacctgaaacagaagatgtgcaggcttcagtatcagacacagcacagcagccatctgaagagcaaagcaagtctcttgaaaaaccgaaacaaaaaaagaatcgctgtttcatgtgcaggaagaaagtgggacttactgggtttgaatgccggtgtggaaatgtttactgtggtgtacaccgttactcagatgtacacaattgctcttacaattacaaagccgatgctgctgagaaaatcagaaaagaaaatccagtagttgttggtgaaaagatccaaaagatttgaactcctgctggaatacaaaattcttgagcatctgcaaactaaaaattgacttgaggttttttttttcctagtcattgggaatgtagagcagtgtatcttgcatgtcatcggaagaatagatttttgttttggttttgttttgaaaatgactctgaacatttatttccattgcaatttctgtggctgaggagacttaaactttacaagtattatccttttaagatcattttaattttagttgagtgcagagggcttttataacaaacgtgcagaaattttggagggctgtgatttttccagtattaaacatgcatgcattaatcttgcagtttattttctcattgtgtatgtatatatcgcttttctctgcagcacgatttctcttttgataatgccctttagggcacaactagttatcagtaactgaatgtatcttaatcattatggctgcttctgttttttcattaacaaaggttattcatatgttagcatatagtttctttgcacccactatttatgtctgaatcatttgtcacaagagagtgtgtgctgatgagattgtaagtttgtgtgtttaaacttttttttgagcgagggaagaaaaagctgtatgcatttcattgctgtctacaggtttctttcagattatgttcatgggtttgtgtgtatacaatatgaagaatgatctgaagtaattgtgctgtatttatgtttattcaccagtctttgattaaattaaatgaaaaaaaaaaaaaaaaaaaaaaaaaaaaa

SEQ ID NO: 2438 - DNA, 4051 bp, Homo sapiens
gagggccgcgccggggcagagccgcgcgggcgggcgaggcgcgtgccggccgcaggagctccgggttgccgccgccgccgccgcccgcagcccacgtgcggccgctgctgcgcccgagctcacgccccgcggccgctttgttgctcccggccggcctgcacgatgcacacgccggacttcgcaggcccagacgacgcgcgcgcagttgacatcatggacatatgtgagtccatcctggagaggaagcggcatgacagcgaaaggtctacttgcagcatcttggagcagacagacatggaagctgtcgaggctcttgtttgtatgagctcctggggtcaaagatcccagaaaggtgacctgttgcggataagacccctcacgcctgtctctgactctggggatgtcaccaccactgtgcatatggatgcagccacacctgaactaccaaaagacttccattctttatcgactctgtgcataactcctcctcagagccctgatctcgtggagccatcgacaaggacacctgtttctccccaagtaacagattccaaagcatgtacagccacggatgttctccagtcctctgccgtagtggccagagctctgagcgggggcgcggagaggggcttgctgggtttggagccagtgcccagctctccctgcagggccaaggggactagcgtgatccgacacactggggagagccctgctgcctgctttcccaccatccagactccagattgccggctttctgacagcagagaaggagaagagcagcttctgggacactttgaaactttgcaggacacacacctcacggacagtttactcagcactaacttggtgtcctgtcagccctgcttgcacaagtctggtggcctgctgctcactgacaaaggccagcaggcagggtggcctggtgcagttcagacttgctcaccaaagaattatgaaaatgacctgcccaggaaaaccacccctctgatttctgtctctgtccctgctccccctgtcctttgccagatgatccctgtgactggacaaagtagcatgttaccagcttttttgaagccccctccccagttgtctgtggggactgtgagacccatcctagctcaggctgctccagcgcctcaacctgtgttcgtgggacctgctgtgcctcagggagctgtgatgttggtcctgccccagggagccctccctccgcctgccccctgtgcagccaatgtcatggctgccgggaataccaagttgttgccccttgcccctgctccagtgttcatcacctctagccaaaactgtgtccctcaggtagacttttcccgaaggaggaactatgtttgcagcttcccaggttgccggaagacctacttcaaaagttcccaccttaaggcccatcttcgcactcacacaggggagaagcctttcaactgcagctgggatggctgtgataaaaagtttgctcgttcggatgagctgtcacgccaccgcagaactcacacaggggagaagaagtttgtgtgcccggtgtgtgaccgacgtttcatgcgcagtgaccacctgacgaagcatgcccggcgccacatgacgaccaagaagatcccaggctggcaggcagaggttggcaagctgaacagaatcgcctctgcagagagcccggggagcccactggtgagcatgccagcctctgcctgaaaggtccattaggacatcactcatgggatttttaaaaagcctctttccaggaatggaactgatggattcctctcccactgcctcacccaaaaaaaacggtcttggcggcctaggggaagatcggggagctggttttgatgaaagtatgttaacttttcttttccacttgggaccctgttcagtatcttttgtagtttcagaagtttttttgttttggttttttttttaaagaaatggtagaaaatttgataatctgaatcaccagcattcaaacaaatatttcggcaataaagtttacaaaatctggatttttacaaccttttctattgatgttttgtagaaataagacagggtactaatttttatactggtttttagaaaaatatttatattgttggtgctcaaatcaccaatttctagctagatcattttgcagccttcttttcagtgtttaataacaaagtttttcctaatggcccttcttttagtaaactggacatgttattccactacaaaaaccacaagttatctggccttttagatctttttggaatcggacctggttgagtaaggacctcttaaaagggaaaaataaattttgccgtcagcttcttcataacgttttcaaggaaattctaggcaatcattcctgtcaccaaagaactaaaattttggttgactggaactagtgagctgtgtccatggtgtgtcatgaaggatgtaccccagagagtaacatgagccactgggcagatcccagggaccagtacttgctgcaggatctagtctgtaatagtcttggccatggctctgctgaaagcaagccattcagtttcttgtttgtacctaaaacaccaaaaaagaaacactcaaatccagctgctttgtcaattgtcagttctgactccttttgctgtggccttatccgtactatattgtgggtagagtaacttctcagaaaaaaaggaaatgtctgtattggttggatgaaactccaccagagcacagcttagctggggcgagatgcatgtgaaggcaggcagtgccaagattccgcttcctttgtttgccaaatactagaaacacaaggaaatgcaagttacgctaaatggcagtaatactacccaactgcctttctgttcattttgtttgaaggaaattgttttgaccaaacagaaaattacttggaatggtgtgttttacagtctacctagaaaatagatggacaatatttttcaactgtatgagcacgtagataaccgagagaatgtggccacctgtgttcaagaagccactgatactggtttttgttaaacattggaagttcaggcaatggaataaatgtaggaacatacagaatgttgcactaatttggtagcctgggaattttttttattgtgcagtatgtatttaaattttgtctatgttaattaccagcatttacctttatttaaatgatggtaaggtggaatattgaataaaattaggttttgtgttttgttctttgtagtctgataaaatctccacctggtcattcattgtgtgtgacttgatacctgttaacttgccccttagtatcagctgttacttgacacaaatgtgtgtgttattcagaggttttcagtctggacactccataggtgagtgtcgtgtcttcgtgagacagcacagttgtctcatgttgtgcatagttcatgtttcctcaccacccagtcctttctcctgctcatcaaaatcagcatacacatttttgactgtacacactataaatggcatcaaatttggatatttttcttaattatgacatgcaaagtaatgtgagtcctgccagtattctggtggataaggtcttttgagtatttggttgcttgtcacaacattctccaagcagtgatatttctaaagaggagatacatgttgaaaacggttttaatttacacttccatttcctgattacatttggaaatactttgtgtaaaccatcccccttccacctccatttgtctgttgaaagattttaagttggaaacagttcctgtctgaaaactcttctgagaaccacaaaccttgtgtatggattcggcatggagccctcagctggcggctctgggtgctgacggccgctggagaggtgggctcccctcgtgcactttattgcctgggcagttttgcttgatcttttgtgactttgagccttttaagtagtttgaatgataagacttaaaatgtttcataattatgttttatgtaacagactttgacattatttaaacgagcatgtgtaatgtaacttttctctttgaatcatataaaacttgattttacattgaaaaaaaaaaaaaaaaaaaaa

SEQ ID NO: 2439 - DNA, 3889 bp, Homo sapiens
gagactgagtattctaccttgtaaatactgttatttgtatatactgtaaatgatgacatcggtgggcactaaccgagcccggggaaactgggaacaacctcaaaaccaaaaccagacacagcacaagcagcggccacaggccactgcagaacaaattagacttgcacagatgatttcggaccataatgatgctgactttgaggagaaggtgaaacaattgattgatattacaggcaagaaccaggatgaatgtgtgattgctttgcatgactgcaatggagatgtcaacagagctatcaatgttcttctggaaggaaacccagacacgcattcctgggagatggtcgggaagaagaagggagtctcaggccagaaggatggtggccagacggaatccaatgaggaaggcaaagaaaatcgagaccgggacagagactatagtcggcgacgtggtgggccaccaagacgggggagaggtgccagccgtggacgagagtttcgaggtcaggaaaatggattggatggcaccaagagtggagggccttctggaagaggaacagaaagaggcagaaggggccgtggccgaggcagaggtggctctggtaggcgaggaggaaggttttctgctcaaggaatgggaacctttaacccagctgattatgcagagccagccaatactgatgataactatggcaatagcagcggcaatacgtggaacaacactggccactttgaaccagatgatgggacgagtgcatggaggactgcaacagaggagtgggggactgaagattggaatgaagatctttctgagaccaagatcttcactgcctctaatgtgtcttcagtgcctctgcctgcggagaatgtgacaatcactgctggtcagagaattgaccttgctgttctgctggggaagacaccatctacaatggagaatgattcatctaatctggatccgtctcaggctccttctctggcccagcctctggtgttcagtaattcgaagcagactgccatatcacagcctgcttcagggaacacattttctcatcacagtatggtgagcatgttagggaaaggatttggtgatgtcggtgaagctaaaggcggcagtactacaggctcccagttcttggagcaattcaagactgcccaagccctggctcagttggcagctcagcattctcagtctggaagcaccaccacctcctcttgggacatgggctcgacgacacaatccccatcactggtgcagtatgatttgaagaacccaagtgattcagcagtgcacagcccctttacaaagcgccaggcttttaccccatcttcaaccatgatggaggtgttccttcaggagaagtcacctgcagtggctacctccacagctgcacctccacctccgtcttctcctctgccaagcaaatccacatcggctccacagatgtcgcctggatcttcagacaaccagtcctctagccctcagccggctcaccagaaactgaaacagcagaagaaaaaagcctccttgacttctaagattcctgctctggctgtggagatgcctggctcagcagatatctcagggctaaacctgcagtttggggcattgcagtttgggtcagagcctgtcctttctgattatgagtccacccccaccacgagcgcctcttcaagccaggctccaagtagcctgtataccagcacggccagtgaatcatcctctacaatttcatctaaccagagtcaggagtctggttatcagagcggcccaattcagtcgacaacctatacctcccaaaataatgctcagggccctctttatgaacagagatccacacagactcggcggtaccccagctccatctcttcatcaccccaaaaggacctgactcaggcaaagaatggcttcagttctgtgcaggccacgcagttacagaccacacaatctgttgaaggtgctacaggctctgcagtgaaatctgattcaccttccacttctagcatcccccctctcaatgaaacggtatctgcagcttccttactgacgacaaccaatcagcattcatcctccttgggtggcttgagccacagtgaggagattccaaatactaccaccacacaacacagcagcacgttatctacgcagcagaataccctttcatcatcaacatcttctgggcgcacttcgacatccactcttttgcacacaagtgtggagagtgaggcgaatctccattcttcctccagcactttttccaccacatccagcacagtctctgcacctcccccagtggtcagtgtctcctccagtctcaatagtggcagtagcctgggcctcagcctaggcagcaactccactgtcacagcctcgactcgaagctcagttgctacgacttcaggaaaagctcctcccaacctccctcctggggtcccgccgttgttgcctaatccgtatattatggctccagggctgttacatgcctacccgccacaagtatatggttatgatgacttgcagatgcttcagacaagatttccattggattactacagcatcccatttcccacacccactactccgctgactgggagggatggtagcctggccagcaacccttattctggtgacctcacaaagttcggccgtggggatgcctcctccccagccccggccacaaccttggcccaaccccaacagaaccagacgcagactcaccataccacgcagcagacattcctgaacccggcgctgcctcctggctacagttacaccagcctgccatactatacaggggtcccgggcctccccagcaccttccagtatgggcctgctgtgttccctgtggctcctacctcttccaagcagcatggtgtgaatgtcagtgtgaatgcatcggccacccctttccaacagccgagtggatatgggtctcatggatacaacactggtgtttcagtcacctccagtaacacgggcgtgccagatatctcgggttctgtgtactccaaaacccagcagtcctttgagaaacaaggttttcattccggtactcctgctgcttccttcaacttgccttcagccctaggaagtgggggccccatcaatccggccacagctgctgcctacccacctgccccctttatgcacattctgaccccccatcagcagccgcattctcagatccttcaccatcacctgcagcaggatggccagacgggcagcgggcaacgtagccagaccagctccatcccgcagaagccccagaccaacaagtctgcctacaacagctacagctggggggccaactgaggccctgaccctcttctcccggtcccatcttctgagagggcttctcagcctggaaactatggaaacagcatcaaagagaaaggaatgtggggggtttccgctgccccccacccccagcggcccaccccatgcctcagcttcatgtctgtcccattcctataccatccccaccctgttgtatgtattataggatttgtattttctccttttttttcccccttccattccttctcccctcttgcattcaagattatgaaactttgctatgggccctgcacttcctttgcttcctcctgttcaccctggtggtgtacggatgaggcggggaggtgggacccccaaacatatatcagcccaacagccctaagtctccttctttattattaggaaaacaacaacaacaacaaacaaaaaaatggcgtcatgaatatgaacagcattgtcagatgaattagttgaagtggttttttttttgtttttttttttttttttgtactgtgtcctcaaatttaatggattaatgtgtcttgtatatataaaaagaaaacctctaccttcaaaaaaaaaaaaaaaaaa

SEQ ID NO: 2440 - DNA, 2144 bp, Homo sapiens
ttttcggcaaccccggccgaacggccacccagaggctgtgctgagctggcgcagcggcagcagcatgagccggaccctcgcatcggccgtgctcctgtcgagtcccgactactacgagaggctgggccaactccagcacgggctgcgggacagtgaaaagaagagattggacctggaaaagaaactttatgaatataatcagtctgatacatgcagagttaagctgaaatatgtaaaactaaagaattatctgaaggaaatatgtgaatctgaaaagaaggctcatactcgaaaccaagaatatttaaagcgatttgagcgtgtccaagctcatgtcgtacacttcaccacaaatacagagaagcttcaaaaactgaagctcgaatatgagactcaaattaagaagatgctatgctcaaaagatagcctgggactaaaagaggaactgacagatgaagacagagaaaaggttgcagtgcacgaggggattaactcaggaacagccatgtcaagaggattgtatcaaccagcaacaatctttatgggccgccaaatgtcagccatcttaagcatgagagatttcagtacagagcacaaatctccccagcccacaaagaacttttcaattcctgacccacattcacaccgacagacagcccagagcagtaatgtgacagacagctgtgtagtacaaactagtaatgacacacagtgcttaaataagtctgacaacatagatggaaaggcatctcttcagattggtgagaaaatgccagtcacagccagtgtattgtctgaggaggaacaaactcattgcttggagataggaagtaacacacgtcatggcaagagtaatttatctgaaggcaaaaagtctgctgaactcaattccccgttacgggaaagattaagtccagagaacagaaccactgatttaaagtgtgacagttccagcggatcagagggagaaatactgacacgggaacatattgaagttgaggaaaaaagagccagcccgccagtctctccgataccagtttcagaatactgtgaatctgaaaataagtggtctcaagagaagcattctccttgggaaggtgtttcagatcatcttgctcacagggaaccaaagtcacaaaagcccttcagaaaaatgcaggaagaggaggaggaaagttggagcaccagcagagaccttaccatttcaataagtgaagatgatctgattttagagagcccagaaccacagccaaatccaggtggcaagatggagggagaagatggaatagaggccttaaaattaatccatgctgagcaagaaagagttgccctatccactgaaaaaaattgtattttgcaaaccctaagctctcctgattcagaaaaggaatcctccactaacgcaccaacaagagaacctggacaaacaccagactcagacgtaccgagggcacaggtgggtcagcatgttgccaccttgaaagaacatgataattctgtcaaagaagaggcaacagcattattgagaaaagcccttacagaagagtgtggccgtaggtcagctattcacagtagtgaatcatcttgcagcttgccatctattctgaatgacaatagtggaataaaggaagccaaacctgctgtatggctcaacagtgttcctacaagggaacaagaagtttcaagtggctgtggagacaagagcaagaaagaaaatgtggctgcagatatcccaatcacagaaacagaagcctatcagttgctgaagaaggccacccttcaggataatacaaatcaaactgaaaacaggtttcaaaagacagatgcttctgtgtcacacttgtcaggtttgaatattggcagcggtgcattcgagacaaagacagctaacaaaattgcttcggaagctagtttttcatctagtgaaggaagtcctttgtcaaggcatgaaaacaaaaagaaacccgtgatcaattcaaaatctaatgccctctgggatgagtctgatgacagtaactcagaaattgaggctgctttacgccccagaaaccataacaccgatgattctgatgatttttatgactaacgtgctgtgacattggtttcaaataaagtctttaaacaaactaaaaaaaaaaaaaaaa

SEQ ID NO: 2441 - DNA, 1626 bp, Homo sapiens
ctttgtggtttggtctcagggaagtagcaggcgccggttgagagaactacggccctgtcggaaggtaacctccggtgcaaacgaccatcggcggcaggcgagcggtacgcttggcgtccgggccttcctgggcccgtctgaggaaacttgctgctcgaggccaggctgcctaggacctgtcccttttttctatactggctcccacatccgggttttttctccgggacggcccttcggatgcttgggccaatgggaatcgccatttagggtgctccgcccaccgggtcgcgtagagcatcctggaagtcgtagtaaatctctcgagagttctctccgcacgcgggctggagaagcgggtcctacgcacgctttgttgtcgcgctttgcctccgtccttccccctactcccgccttacctgacttccttttcggaggaagatccttgagcagccgacgttgggacaaaggatttggagaaacccagggctaaagtcacgtttttcctcctttaagacttacctcaacacttcactccatggcagttcccgagacccgccctaaccacactatttatatcaacaacctcaatgagaagatcaagaaggatgagctaaaaaagtccctgtacgccatcttctcccagtttggccagatcctggatatcctggtatcacggagcctgaagatgaggggccaggcctttgtcatcttcaaggaggtcagcagcgccaccaacgccctgcgctccatgcagggtttccctttctatgacaaacctatgcgtatccagtatgccaagaccgactcagatatcattgccaagatgaaaggcaccttcgtggagcgggaccgcaagcgggagaagaggaagcccaagagccaggagaccccggccaccaagaaggctgtgcaaggcgggggagccacccccgtggtgggggctgtccaggggcctgtcccgggcatgccgccgatgactcaggcgccccgcattatgcaccacatgccgggccagccgccctacatgccgccccctggtatgatccccccgccaggccttgcacctggccagatcccaccaggggccatgcccccgcagcagcttatgccaggacagatgccccctgcccagcctctttctgagaatccaccgaatcacatcttgttcctcaccaacctgccagaggagaccaacgagctcatgctgtccatgcttttcaatcagttccctggcttcaaggaggtccgtctggtacccgggcggcatgacatcgccttcgtggagtttgacaatgaggtacaggcaggggcagctcgcgatgccctgcagggctttaagatcacgcagaacaacgccatgaagatctcctttgccaagaagtagcaccttttccccccatgcctgccccttcccctgttctggggccacccctttcccccttggctcagccccctgaaggtaagtccccccttgggggccttcttggagccgtgtgtgagtgagtggtcgccacacagcattgtacccagagtctgtccccagacattgcacctggcgctgttaggccggaattaaagtggctttttgaggtttggtttttcacaaaaaaaaaaaaaaaaaaaaaa

SEQ ID NO: 2442 - DNA, 1657 bp, Homo sapiens
gctcacaggaagccacgcacccttgaaaggcaccgggtccttcttagcatcgtgcttcctgagcaagcctggcattgcctcacagaccttcctcagagccgctttcagaaaagcaagctgcttctggttgggcccagacctgccttgaggagcctgtagagttaaaaaatgaaccccacggatatagcagacaccaccctcgatgaaagcatatacagcaattactatctgtatgaaagtatccccaagccttgcaccaaagaaggcatcaaggcatttggggagctcttcctgcccccactgtattccttggtttttgtatttggtctgcttggaaattctgtggtggttctggtcctgttcaaatacaagcggctcaggtccatgactgatgtgtacctgctcaaccttgccatctcggatctgctcttcgtgttttccctccctttttggggctactatgcagcagaccagtgggtttttgggctaggtctgtgcaagatgatttcctggatgtacttggtgggcttttacagtggcatattctttgtcatgctcatgagcattgatagatacctggcaattgtgcacgcggtgttttccttgagggcaaggaccttgacttatggggtcatcaccagtttggctacatggtcagtggctgtgttcgcctcccttcctggctttctgttcagcacttgttatactgagcgcaaccatacctactgcaaaaccaagtactctctcaactccacgacgtggaaggttctcagctccctggaaatcaacattctcggattggtgatccccttagggatcatgctgttttgctactccatgatcatcaggaccttgcagcattgtaaaaatgagaagaagaacaaggcggtgaagatgatctttgccgtggtggtcctcttccttgggttctggacaccttacaacatagtgctcttcctagagaccctggtggagctagaagtccttcaggactgcacctttgaaagatacttggactatgccatccaggccacagaaactctggcttttgttcactgctgccttaatcccatcatctacttttttctgggggagaaatttcgcaagtacatcctacagctcttcaaaacctgcaggggcctttttgtgctctgccaatactgtgggctcctccaaatttactctgctgacacccccagctcatcttacacgcagtccaccatggatcatgatctccatgatgctctgtagaaaaatgaaatggtgaaatgcagagtcaatgaactttccacattcagagcttacttaaaattgtattttagtaagagattcctgagccagtgtcaggaggaaggcttacacccacagtggaaagacagcttctcatcctgcaggcagctttttctctcccactagacaagtccagcctggcaagggttcacctgggctgaggcatccttcctcacaccaggcttgcctgcaggcatgagtcagtctgatgagaactctgagcagtgcttgaatgaagttgtaggtaatattgcaaggcaaagactattcccttctaacctgaactgatgggtttctccagagggaattgcagagtactggctgatggagtaaatcgctaccttttgctgtggcaaatgggccctct

SEQ ID NO: 2443 - DNA, 8209 bp, Homo sapiens
atggagaacagtcaccccccccaccaccaccaccagcagcccccgccgcagcccggcccttcgggcgagaggaggaaccaccattggagaagttacaagttgatgattgacccggctctgaaaaaggggcatcataaactgtaccgctacgatgggcagcatttcagcctggcgatgtccagcaaccgcccggtggaaattgtcgaagatccccgggtcgtcgggatctggaccaaaaacaaggagctggagctgtcggtgcccaaattcaagatcgatgagttctacgtgggcccggtgcctccgaagcaggtgacatttgccaagctgaatgataacatccgtgaaaacttcctgagggacatgtgcaagaagtatggggaggtggaggaggtggagattttgtacaaccccaagaccaagaagcacctgggcatcgccaaggtggtctttgccacggtccggggagccaaggatgccgttcagcacttgcacagcacttccgtcatgggcaacattatccacgtggagctggacaccaaaggggaaacccgaatgcggttctatgaactgttggtcactggccgatacaccccccagaccctcccagtgggcgagctggacgctgtctctccaatcgtgaatgagaccctgcagctgtcagatgccctgaagcgcctcaaggatggaggcctgtctgcaggctgtggctccggctcctcctctgtcacccccaatagcggtgggacacccttctcccaggacacagcttattccagctgccgcctggacacacccaactcctatggacagggcaccccgctcacaccgcgcctgggcacccctttctcacaggactccagctactccagccgccagcccacaccctcatacctcttcagccaggaccctgcagtgaccttcaaggcccggcgccacgagagcaagttcacggacgcctacaaccgccgccacgaacatcattatgtacacaattctcccgcggtcactgcggtggccggggccacagccgctttccggggttcctcggacctcccgttcggagcagtcggcggcactgggggcagcagcggtcccccgttcaaggctcaaccacaggattcagccacatttgcccacactccaccacccgcccaagcaacccctgctcctggattcaagtctgctttctctccgtatcagaccccagtggcccacttccctccacccccggaagagcccaccgccacagccgcttttggggcccgcgacagtggggagttccggagggcaccggcgcccccacccctgccacctgctgagcctctggccaaggagaagccaggcacgccacccggcccgccgccccccgacaccaacagcatggagctgggcggccggcccaccttcggctggagtcctgagccctgtgacagccctggcacgcccacgctggagtcgtcccctgcagggccagagaaaccccacgacagcctggactcgcgcatcgagatgctgctgaaggagcagcgcaccaagctgctcttcctgagggagccggactcggacaccgagctgcagatggagggcagccccatctcctcctcctcctcccagctctccccactggccccctttggcaccaactcccagccaggcttccggggccccacgcccccctcgtcacgcccctccagcaccggcctggaggatatcagcccaacacccctcccagactccgacgaggacgaggagctcgacctgggccttgggcctcggcctccacctgagccaggccccccggaccctgctgggcttctgagccagacagctgaggtggccttggacctggttggagacagaaccccgacctcagagaagatggatgagggccagcagtcctcaggcgaggacatggagatctcggatgacgagatgccctcggcccccatcaccagcgctgactgccccaagcccatggtggtgaccccaggagcggcagccgtggcagccccttctgtgctagccccaaccctgccgctgcccccgccacctggcttccccccgctgccccccccaccaccaccacccccaccgcagcctggcttccccatgcccccaccgctgcccccaccgccgcccccaccccctccagcccaccctgctgtgacagtgcccccaccacccttgccagcgccgcctggagtcccgcccccacccatcctgccaccactgcccccctttccgccgggcctgttccctgtgatgcaggtggacatgagccacgtgctgggtggccagtggggcggcatgcccatgtccttccagatgcaaacgcaggtgctcagccggctgatgacgggccagggcgcctgcccctacccgcccttcatggccgctgcggccgccgctgcctcagctgggctccagtttgtcaacctgccgccctaccggggccccttctccctgagcaactccggcccaggccgcgggcagcactggccaccactgcccaagtttgacccgtcagtgcctccaccaggctacatgccacgccaggaggacccacacaaagccacggtggatggcgtcctgctggtggtcctcaaagaactcaaggccatcatgaagcgtgacctgaaccgcaagatggtggaagtggtggctttccgggcctttgacgagtggtgggacaagaaggagcggatggccaaggcctcgctgaccccggtgaagtcgggcgagcacaaggacgaggacaggccgaagcccaaggaccgcatcgcctcgtgcctgctggagtcatggggcaagggcgagggcctgggctacgagggcctgggcctgggcattgggctgcgtggggccattcgcctgccctccttcaaggtcaagaggaaggagccaccagacaccacctcatctggcgaccagaagcggctgcggccctcgacctctgtggatgaggaagatgaagagtccgagcgagagcgagaccgggatatggcagacaccccctgtgagctcgccaagcgggaccccaagggcgtgggtgtgcggcggcggccggcgcggcctctggagctggacagtggtggggaggaggacgagaaggagtcattgtcggaggaacaggagagcaccgaggaggaagaggaggcggaggaggaggaggaggaggaagatgacgacgatgacgacagtgatgaccgggacgagtctgagaacgatgacgaggacacagccctgtcagaggcgagtgagaaggacgaaggggactcggatgaagaggagacagtgagcattgtaacctccaaggccgaagccacgtcgtccagtgagagttccgagtcttctgagtttgagtcaagctccgagtcctcgccctcatcctcggaggatgaggaggaggtagtggccagggaagaggaggaagaagaggaggaggaggagatggtggccgaggaaagcatggcttctgcaggccctgaggactttgagcaggacggggaggaagcggctctggccccgggggcacctgcagtggactcgttgggcatggaagaggaggtggacatcgagactgaggctgtggcccctgaggagcggccctccatgctggacgagccccccttgcctgtgggtgttgaagagccagcggactccagggagccgcctgaggaaccaggcctgagccaggaaggggccatgttgctgtctccagagccccctgccaaggaggtggaggctcgacccccattgtcccctgagcgagctccagaacatgacctggaagtggagccggagccccctatgatgctccccttgccgctgcaaccaccattgccgcccccacgaccaccccggccacccagcccaccgccggagcctgagaccacagatgcctcacacccatctgtccctccggagccccttgccgaggaccaccccccgcatactccaggcctctgtggcagcctggccaagtcgcagagcacagagacggtgccagccacaccaggcggggagcccccgctatcagggggcagcagtggcctgtccctgagctctccgcaagtgcccggcagccccttctcctacccagccccgtcccctagcttgagcagtgggggcctccctcggacacctggccgggacttcagcttcacacccaccttctccgagcccagcgggcccttgctcctgcccgtctgcccactccccactggccgacgcgatgaacgctccgggcccctggcctccccggtgctcctggagacgggcctgcccctccctctgccccttcccctgcccttgcccttggcattgcccgccgtcttgcgggcccaggctcgtgcgcccaccccgctgccacccctgctgcccgcccccctggcctcttgccctcccccaatgaagaggaagccgggccggccccggcgatccccaccatctatgctctccttggatgggcccttggtccgaccaccagcaggggccgcccttggaagggaactcctgctcctgccgggccagccacagacccccgtcttccccagcacccatgacccccggacggtgaccctggacttccggaacgcggggatcccagcccctccaccaccccttcccccccagccacccccacccccacctcccccacctgtagagcccaccaagctgccctttaaggagctagacaaccagtggccctccgaggccattcctccgggcccccgtgggcgcgatgaggtcactgaggaatacatggagttggccaagagccgggggccgtggcgccggccacctaagaagcgccatgaggacctggtgccacctgcgggctcgcccgaactctcgccaccccagcccctcttccggccccgctcggagtttgaggagatgaccatcctgtatgacatctggaacggtggcatcgatgaggaggacatccgcttcctgtgtgtcacctacgagcgactgctacagcaggacaatggcatggactggcttaacgacacgctctgggtctaccatccctccaccagcctctcttcagctaagaagaagaaacgggacgatggcatccgcgagcacgtgacgggctgtgcccgcagtgagggcttctacaccatcgacaagaaggacaagctcagatacctcaacagcagccgtgccagcaccgatgagccccccgcagacacccagggcatgagcatcccagcacagccccacgcctccacccgggcaggctcggagcggcgttcggagcagcgccgcctgctgtcctccttcactggcagctgtgacagtgacctgctcaagttcaaccagctcaagttccggaagaaaaagctcaagttctgcaagagccacattcacgactggggcttgttcgccatggagcccatcgcggctgacgagatggtcatcgagtacgtgggccagaatatccgtcaggtgatcgcagacatgcgggagaagcgttatgaggacgagggcatcgggagcagctacatgttccgggtggaccatgacaccatcatcgacgccaccaagtgcggcaacttcgcgcgcttcatcaaccacagctgcaaccccaactgctatgccaaggtgatcacggtggagtcacagaagaagatagtcatctactcgaagcagcacattaacgtcaatgaggagattacctatgactataagttccccatcgaggacgtcaagatcccctgcctctgtggctccgagaactgccgggggaccctcaactaggccccggcaccagactcaaaggatgtcagccgtagccctgggactcccgagcgtggagcccctggccccggggcccggccccccgcgcccgcccccatttcaggtgctgtcctctacccagcggccattcagggcctggcgccccacactaccccctggagcccctggctccggcccctccgcgggaaagggcttctctgtcgttcagcccacgtctctctcattttaacaaacgcccctttcaggatttctgtttaactccagcatcagcttctctctctccgtctctcctcccctctctctcttctctgtctcttctctctcccaccatcaccctcggcctcttcctgtgaatgctgctacgttgttttgtcttctctatttttttcctcgttgtgagaaaagacatttaaccgttgaaatgtgaaggtggaatcagagaggggccccgcgggggtctgcagaggcctcagtgtggctgtgcgtggcccgtgtcctggaagccacccggacctggacgcagggccaggtgctgtgggaaggatggaggcccccacggccttgacctcagaacactacgccctgaaagcgcccctcactgcccgtgggcacagtgaggagaccccacacctttccccacccgagctgcagcctgttccttccccagaggcctggggcaccactgacccggtggaccctgatggagctaagctgtcccaggcaggggtctccgctctgggctttccctgccacctcacaccccagcaccccctaaaccttgggttcaatgtttactttctcattcggatgccagcaacgcgggagcctctcggaggccccagtgcaggtgaggggcgctgagaacgcgggcagccactctcttctgcccttgccttcgccctgggtgggacagggctcccaagggcaggcgggtcccccagtcccgccattacgggttgtcagaccgtctgcgtgtggcattttttggcttataagcttcacccactcacccccaacccacaccccacatccccctgccggcagcccctcaacctaagaaggccagagcatatttattttcggagggagcagattacttctcccagagaaaggaaaatcttggaaaagatttaaaaacacaaatctaagccttgacggtttttttttcccttttgacccccttcccatctcttcagaatttattcccatggcttttttttttcttgtgcgtgtataaaatcaaaaggaaggggaaaaaggtttttgaagttcagaaccaacttctgtatatagaggctgccgcaaaggactttctcttgggaacattgtttcttgtagaaacatgcgggaagacattttttgctcatttctttgtacttccaaaaaaaaaggaaaaaaaagacaaaagcaagtccccccgtaccccagaaagcagaggaggcgtgtaaataatttctggaaagtgactgttgtgacccggagtcctcatcaagatgagcgcgctccatgagggagctgctcccaccctgcggacgcaggcggccggagcctctggtatctcagcttgtgtcaagcttgttatcatgtaaattctgtacaaagaattgttatttttctcttttttgttgttggtggttttgttgtgtgttttttgttgttttttttttattcctttcccccaggccctctctatttgagactgtgcccgccggtttcaagatcaaggaaattggtggcaacaagacacagatggggtacctgggcacagcggcgaacttctcttccgtttgcggttttctgcctaattgtgcaactgaggaaataatttatttttcacatgaggaaatgcgtagcttgtagagacggctgattcaagttacatgtacagcctccaaagggctgtctccattctgtccccttcccataaaagaagtgggggtgttcgagaagaccagggaagggacccttgcctcacccctccccctggcctcaccttgctcccagccatcgtgcccagtgttaacctcggctggccttcactaaggggactagacctccctctccccaggagccccagccccagagtggtttgcaataatcaagatatgtgtcgagtcatttttctttcaactccctcatttttcattgaacaaatctctgcttttcaagagttgggggtttctgctattttttgctttctctccctccccctgcaaagatgagaaccaatgagttttagggatgtttgtgcgggtagactccatcatccatatgtaacttgttttgaagagaagtgtttccgttgtgtgtcttgatgtaaatatttgttcatatttttgtgaattcaatactatgtaccattgtattatagtaacttttataaagcaaaccataaatatactgacttttcttacagatacgccaaaaagaaaaaaaa

SEQ ID NO: 2444 - DNA, 8209 bp, Homo sapiens
atggagaacagtcaccccccccaccaccaccaccagcagcccccgccgcagcccggcccttcgggcgagaggaggaaccaccattggagaagttacaagttgatgattgacccggctctgaaaaaggggcatcataaactgtaccgctacgatgggcagcatttcagcctggcgatgtccagcaaccgcccggtggaaattgtcgaagatccccgggtcgtcgggatctggaccaaaaacaaggagctggagctgtcggtgcccaaattcaagatcgatgagttctacgtgggcccggtgcctccgaagcaggtgacatttgccaagctgaatgataacatccgtgaaaacttcctgagggacatgtgcaagaagtatggggaggtggaggaggtggagattttgtacaaccccaagaccaagaagcacctgggcatcgccaaggtggtctttgccacggtccggggagccaaggatgccgttcagcacttgcacagcacttccgtcatgggcaacattatccacgtggagctggacaccaaaggggaaacccgaatgcggttctatgaactgttggtcactggccgatacaccccccagaccctcccagtgggcgagctggacgctgtctctccaatcgtgaatgagaccctgcagctgtcagatgccctgaagcgcctcaaggatggaggcctgtctgcaggctgtggctccggctcctcctctgtcacccccaatagcggtgggacacccttctcccaggacacagcttattccagctgccgcctggacacacccaactcctatggacagggcaccccgctcacaccgcgcctgggcacccctttctcacaggactccagctactccagccgccagcccacaccctcatacctcttcagccaggaccctgcagtgaccttcaaggcccggcgccacgagagcaagttcacggacgcctacaaccgccgccacgaacatcattatgtacacaattctcccgcggtcactgcggtggccggggccacagccgctttccggggttcctcggacctcccgttcggagcagtcggcggcactgggggcagcagcggtcccccgttcaaggctcaaccacaggattcagccacatttgcccacactccaccacccgcccaagcaacccctgctcctggattcaagtctgctttctctccgtatcagaccccagtggcccacttccctccacccccggaagagcccaccgccacagccgcttttggggcccgcgacagtggggagttccggagggcaccggcgcccccacccctgccacctgctgagcctctggccaaggagaagccaggcacgccacccggcccgccgccccccgacaccaacagcatggagctgggcggccggcccaccttcggctggagtcctgagccctgtgacagccctggcacgcccacgctggagtcgtcccctgcagggccagagaaaccccacgacagcctggactcgcgcatcgagatgctgctgaaggagcagcgcaccaagctgctcttcctgagggagccggactcggacaccgagctgcagatggagggcagccccatctcctcctcctcctcccagctctccccactggccccctttggcaccaactcccagccaggcttccggggccccacgcccccctcgtcacgcccctccagcaccggcctggaggatatcagcccaacacccctgccagactccgacgaggacgaggagctcgacctgggccttgggcctcggcctccacctgagccaggccccccggaccctgctgggcttctgagccagacagctgaggtggccttggacctggttggagacagaaccccgacctcagagaagatggatgagggccagcagtcctcaggcgaggacatggagatctcggatgacgagatgccctcggcccccatcaccagcgctgactgccccaagcccatggtggtgaccccaggagcggcagccgtggcagccccttctgtgctagccccaaccctgccgctgcccccgccacctggcttccccccgctgccccccccaccaccaccacccccaccgcagcctggcttccccatgcccccaccgctgcccccaccgccgcccccaccccctccagcccaccctgctgtgacagtgcccccaccacccttgccagcgccgcctggagtcccgcccccacccatcctgccaccactgcccccctttccgccgggcctgttccctgtgatgcaggtggacatgagccacgtgctgggtggccagtggggcggcatgcccatgtccttccagatgcaaacgcaggtgctcagccggctgatgacgggccagggcgcctgcccctacccgcccttcatggccgctgcggccgccgctgcctcagctgggctccagtttgtcaacctgccgccctaccggggccccttctccctgagcaactccggcccaggccgcgggcagcactggccaccactgcccaagtttgacccgtcagtgcctccaccaggctacatgccacgccaggaggacccacacaaagccacggtggatggcgtcctgctggtggtcctcaaagaactcaaggccatcatgaagcgtgacctgaaccgcaagatggtggaagtggtggctttccgggcctttgacgagtggtgggacaagaaggagcggatggccaaggcctcgctgaccccggtgaagtcgggcgagcacaaggacgaggacaggccgaagcccaaggaccgcatcgcctcgtgcctgctggagtcatggggcaagggcgagggcctgggctacgagggcctgggcctgggcattgggctgcgtggggccattcgcctgccctccttcaaggtcaagaggaaggagccaccagacaccacctcatctggcgaccagaagcggctgcggccctcgacctctgtggatgaggaagatgaagagtccgagcgagagcgagaccgggatatggcagacaccccctgtgagctcgccaagcgggaccccaagggcgtgggtgtgcggcggcggccggcgcggcctctggagctggacagtggtggggaggaggacgagaaggagtcattgtcggaggaacaggagagcaccgaggaggaagaggaggcggaggaggaggaggaggaggaagatgacgacgatgacgacagtgatgaccgggacgagtctgagaacgatgacgaggacacagccctgtcagaggcgagtgagaaggacgaaggggactcggatgaagaggagacagtgagcattgtaacctccaaggccgaagccacgtcgtccagtgagagttccgagtcttctgagtttgagtcaagctccgagtcctcgccctcatcctcggaggatgaggaggaggtagtggccagggaagaggaggaagaagaggaggaggaggagatggtggccgaggaaagcatggcttctgcaggccctgaggactttgagcaggacggggaggaagcggctctggccccgggggcacctgcagtggactcgttgggcatggaagaggaggtggacatcgagactgaggctgtggcccctgaggagcggccctccatgctggacgagccccccttgcctgtgggtgttgaagagccagcggactccagggagccgcctgaggaaccaggcctgagccaggaaggggccatgttgctgtctccagagccccctgccaaggaggtggaggctcgacccccattgtcccctgagcgagctccagaacatgacctggaagtggagccggagccccctatgatgctccccttgccgctgcaaccaccattgccgcccccacgaccaccccggccacccagcccaccgccggagcctgagaccacagatgcctcacacccatctgtccctccggagccccttgccgaggaccaccccccgcatactccaggcctctgtggcagcctggccaagtcgcagagcacagagacggtgccagccacaccaggcggggagcccccgctatcagggggcagcagtggcctgtccctgagctctccgcaagtgcccggcagccccttctcctacccagccccgtcccctagcttgagcagtgggggcctccctcggacacctggccgggacttcagcttcacacccaccttctccgagcccagcgggcccttgctcctgcccgtctgcccactccccactggccgacgcgatgaacgctccgggcccctggcctccccggtgctcctggagacgggcctgcccctccctctgccccttcccctgcccttgcccttggcattgcccgccgtcttgcgggcccaggctcgtgcgcccaccccgctgccacccctgctgcccgcccccctggcctcttgccctcccccaatgaagaggaagccgggccggccccggcgatccccaccatctatgctctccttggatgggcccttggtccgaccaccagcaggggccgcccttggaagggaactcctgctcctgccgggccagccacagacccccgtcttccccagcacccatgacccccggacggtgaccctggacttccggaacgcggggatcccagcccctccaccaccccttcccccccagccacccccacccccacctcccccacctgtagagcccaccaagctgccctttaaggagctagacaaccagtggccctccgaggccattcctccgggcccccgtgggcgcgatgaggtcactgaggaatacatggagttggccaagagccgggggccgtggcgccggccacctaagaagcgccatgaggacctggtgccacctgcgggctcgcccgaactctcgccaccccagcccctcttccggccccgctcggagtttgaggagatgaccatcctgtatgacatctggaacggtggcatcgatgaggaggacatccgcttcctgtgtgtcacctacgagcgactgctacagcaggacaatggcatggactggcttaacgacacgctctgggtctaccatccctccaccagcctctcttcagctaagaagaagaaacgggacgatggcatccgcgagcacgtgacgggctgtgcccgcagtgagggcttctacaccatcgacaagaaggacaagctcagatacctcaacagcagccgtgccagcaccgatgagccccccgcagacacccagggcatgagcatcccagcacagccccacgcctccacccgggcaggctcggagcggcgttcggagcagcgccgcctgctgtcctccttcactggcagctgtgacagtgacctgctcaagttcaaccagctcaagttccggaagaaaaagctcaagttctgcaagagccacattcacgactggggcttgttcgccatggagcccatcgcggctgacgagatggtcatcgagtacgtgggccagaatatccgtcaggtgatcgcagacatgcgggagaagcgttatgaggacgagggcatcgggagcagctacatgttccgggtggaccatgacaccatcatcgacgccaccaagtgcggcaacttcgcgcgcttcatcaaccacagctgcaaccccaactgctatgccaaggtgatcacggtggagtcacagaagaagatagtcatctactcgaagcagcacattaacgtcaatgaggagattacctatgactataagttccccatcgaggacgtcaagatcccctgcctctgtggctccgagaactgccgggggaccctcaactaggccccggcaccagactcaaaggatgtcagccgtagccctgggactcccgagcgtggagcccctggccccggggcccggccccccgcgcccgcccccatttcaggtgctgtcctctacccagcggccattcagggcctggcgccccacactaccccctggagcccctggctccggcccctccgcgggaaagggcttctctgtcgttcagcccacgtctctctcattttaacaaacgcccctttcaggatttctgtttaactccagcatcagcttctctctctccgtctctcctcccctctctctcttctctgtctcttctctctcccaccatcaccctcggcctcttcctgtgaatgctgctacgttgttttgtcttctctatttttttcctcgttgtgagaaaagacatttaaccgttgaaatgtgaaggtggaatcagagaggggccccgcgggggtctgcagaggcctcagtgtggctgtgcgtggcccgtgtcctggaagccacccggacctggacgcagggccaggtgctgtgggaaggatggaggcccccacggccttgacctcagaacactacgccctgaaagcgcccctcactgcccgtgggcacagtgaggagaccccacacctttccccacccgagctgcagcctgttccttccccagaggcctggggcaccactgacccggtggaccctgatggagctaagctgtcccaggcaggggtctccgctctgggctttccctgccacctcacaccccagcaccccctaaaccttgggttcaatgtttactttctcattcggatgccagcaacgcgggagcctctcggaggccccagtgcaggtgaggggcgctgagaacgcgggcagccactctcttctgcccttgccttcgccctgggtgggacagggctcccaagggcaggcgggtcccccagtcccgccattacgggttgtcagaccgtctgcgtgtggcattttttggcttataagcttcacccactcacccccaacccacaccccacatccccctgccggcagcccctcaacctaagaaggccagagcatatttattttcggagggagcagattacttctcccagagaaaggaaaatcttggaaaagatttaaaaacacaaatctaagccttgacggtttttttttcccttttgacccccttcccatctcttcagaatttattcccatggcttttttttttcttgtgcgtgtataaaatcaaaaggaaggggaaaaaggtttttgaagttcagaaccaacttctgtatatagaggctgccgcaaaggactttctcttgggaacattgtttcttgtagaaacatgcgggaagacattttttgctcatttctttgtacttccaaaaaaaaaggaaaaaaaagacaaaagcaagtccccccgtaccccagaaagcagaggaggcgtgtaaataatttctggaaagtgactgttgtgacccggagtcctcatcaagatgagcgcgctccatgagggagctgctcccaccctgcggacgcaggcggccggagcctctggtatctcagcttgtgtcaagcttgttatcatgtaaattctgtacaaagaattgttatttttctcttttttgttgttggtggttttgttgtgtgttttttgttgttttttttttattcctttcccccaggccctctctatttgagactgtgcccgccggtttcaagatcaaggaaattggtggcaacaagacacagatggggtacctgggcacagcggcgaacttctcttccgtttgcggttttctgcctaattgtgcaactgaggaaataatttatttttcacatgaggaaatgcgtagcttgtagagacggctgattcaagttacatgtacagcctccaaagggctgtctccattctgtccccttcccataaaagaagtgggggtgttcgagaagaccagggaagggacccttgcctcacccctccccctggcctcaccttgctcccagccatcgtgcccagtgttaacctcggctggccttcactaaggggactagacctccctctccccaggagccccagccccagagtggtttgcaataatcaagatatgtgtcgagtcatttttctttcaactccctcatttttcattgaacaaatctctgcttttcaagagttgggggtttctgctattttttgctttctctccctccccctgcaaagatgagaaccaatgagttttagggatgtttgtgcgggtagactccatcatccatatgtaacttgttttgaagagaagtgtttccgttgtgtgtcttgatgtaaatatttgttcatatttttgtgaattcaatactatgtaccattgtattatagtaacttttataaagcaaaccataaatatactgacttttcttacagatacgccaaaaagaaaaaaaa

SEQ ID NO: 2445 - DNA, 2717 bp, Homo sapiens
gcgcttccggtgcgacgctgtctctccatgccaggactgagttgtgggggagggaggcggttagcgggctttagcgccttttctggcggcggtagatttgaagcgcttcaaaggaccggacccagagaagaggaaaactctaccggtgcaggagcacagggatcagttgtccttgtttttttttggtcttttcttcatttgaagattaagtattggagccatgggaataaaggttcaacgtcctcgatgtttttttgacattgccattaacaatcaacctgctggaagagttgtctttgaattattttctgatgtgtgccccaaaacatgcgagaactttcgttgtctttgtacaggtgaaaaggggaccgggaaatcaactcagaaaccattacattataagagttgtctctttcacagagttgtcaaggattttatggttcaaggtggtgacttcagtgaaggaaatggacgaggaggggaatctatctatggaggattttttgaagacgagagtttcgctgttaaacacaacaaagaatttctcttgtcaatggccaacagagggaaggatacaaatggttcacagttcttcataacaacgaaaccaactcctcatttagatgggcatcatgttgtttttggacaagtaatctctggtcaagaagttgtaagagagattgaaaaccagaaaacagatgcagctagcaaaccgtttgcggaggtacggatactcagttgtggagagctgattcccaaatctaaagttaagaaagaagaaaagaaaaggcataaatcatcatcatcttcctcctcctcatctagtgactcagatagctcaagtgattctcagtcctcttctgattcctctgattccgaaagtgctactgaagagaaatcaaagaaaagaaaaaagaaacatcggaaaaattcccgaaaacacaagaaagaaaagaaaaagcgaaagaaaagcaagaagagtgcatctagtgagagtgaagctgaaaatcttgaagcacaaccccagtctactgtccgtccagaagagatccctcctatacctgaaaatagattcctaatgagaaaaagtcctcctaaagctgatgagaaggaaaggaaaaacagagagagagaaagggaaagagagtgtaatccacctaactcccagcctgcttcataccagagacgacttttagttactagatctggcaggaaaattaaaggaagaggaccaaggcgttatcgaactccttccagatccagatcaagggatcgtttcagacgtagtgagactcctccacattggaggcaagagatgcagagagctcaaagaatgagggtatcaagtggtgaaagatggatcaagggggataagagtgagttgaatgaaataaaagaaaatcagagaagtccagttagagtaaaagagagaaaaataacagatcacaggaatgtatctgagagtccaaacagaaaaaatgaaaaggagaagaaagttaaagaccataaatctaacagcaaagagagagacatcagaagaaattcagaaaaagatgacaagtataaaaacaaagtgaagaaaagggccaaatctaaaagtaggagtaagagcaaagagaaatcaaagagtaaagaaagagattcaaaacataatagaaatgaagaaaagaggatgaggtcaaggagtaaaggaagggatcatgaaaatgttaaagaaaaagaaaagcagtctgattctaaaggaaaagatcaggaaaggagtagaagtaaagagaagtctaaacagttagaatcaaagagtaatgagcatgatcacagtaaaagtaaggaaaaggatagacgcgcacaatccaggagtagagaatgtgatataactaaaggtaaacacagttataatagcagaacaagagaacgaagcagaagtagggacagaagcagaagagtgcgatcaagaacccatgacagagatcgcagcagaagcaaggagtaccatagatacagagaacaggaatacaggagaagaggacggtcacgaagccgagagagaagaacaccaccaggaagatcaagaagtaaagataggaggagaaggaggagagactcacggagctcagagagagaagaaagtcaaagcagaaacaaagacaaatacagaaaccaagagagtaagagctcacacagaaaagaaaattctgagagtgagaaaagaatgtactctaaaagtcgtgatcataatagctcaaataacagcagggaaaaaaaggctgatagagatcaaagtcccttctcaaaaataaaacaaagcagtcaggacaatgaattaaagtcctccatgttgaaaaataaggaggatgagaagatcagatcctcagtggaaaaagaaaaccaaaaatcaaaaggtcaagaaaatgaccatgtacatgaaaaaaataaaaaatttgatcatgaatcaagccctggaacagatgaagacaaaagcggatgagtgagttatataaacttacttccattctgtttcggattttaagtttgagagacttgctaatgaatctcctttatgttgttttccttttcattgtttttggattgttttatgtttgtccttttttttcttaatgtggatttcattgagttgattttttgataatctgcaatctggataatttgtactgctaaagttttaataaactcgacatgagaaaaacaaaaaaaaaaaa

SEQ ID NO: 2446 - DNA, 3273 bp, Homo sapiens
actggagtctctgagcagccattgaaggggaaggaactgcgggtgtgtgtgtgtatgtgtgtgtgtatgtgtgtgcgcgcgtgcgtgcgtgtgtgtgcgcgcgctagtgtgtggacaaggaggtgggggcagctgagttagagtcccaactcttggactccatttgctattctcttctttctcccccacacctatctggtggtggtagtgggcgtttatatttgcgttccttttcattcatttctaaatctcttaaaaattttgggttgggggtattggggaaggcaggaaagggaaaaggagagtagtagctgaagagcaagaggaggacatggagatgaagaagaagattaacctggagttaaggaacagatccccggaggaggtgacagagttagtccttgataattgcctgtgtgtcaatggggaaattgaaggcctgaatgatactttcaaagaactagaatttctgagtatggctaatgtggaactaagttcgctggcccggcttcccagcttaaataaacttcgaaaattggagcttagtgataatataatttctggaggcttggaagtcctggcagagaaatgtccaaatcttacctacctcaatctgagtggaaacaaaataaaagatctcagtacagtagaagctctgcaaaatcttaaaaatttgaaaagtcttgacctgtttaactgtgagatcacaaacctggaagattatagagaaagtatttttgaactactgcagcaaatcacatacttagatggatttgatcaggaggataatgaagcgccggactctgaagaggaggatgatgaggatggcgatgaagatgatgaagaggaagaggaaaatgaagctggtccaccggaaggatatgaggaagaggaggaggaagaggaagaggaggatgaggatgaggatgaagatgaagatgaagcaggttcagagttgggagagggagaagaggaagtgggcctctcatacttaatgaaagaagaaattcaggatgaagaagatgatgatgactatgttgaagaaggggaagaagaggaagaagaggaagaaggaggtcttcgaggggagaagaggaaacgagatgctgaagacgatggagaggaagaagatgactagatcattctaagaccagattctctaatgtttctgggtgtgcaatagagtgatcacatctttgtttcttcatgtacgatagctatccctacagaagataatgtgtaactttttataggaaaagtgtggttttactatttttgccttatcattccaaataagaactagtctgttaatgatcatattgtatgtagagaaaaattttcattgactcccattgtggaattccctagcaatttatttagacttaattttttaaattcaagcttactgtattagtcatttttagcccataattaaaacatgatcacttttacacaggtgtagtatggtgcatttcattccttatttataaattaactgaaattacagtttgctataatataaaatgacaatagtctcttgagtggtaagttggttatttttttagaggtgatccaggaatctttagtttgaaggcagttaccttttttttttttttttttttgactaagagtgtttggttgcttttttgtcacaagtaacttggaaaatagaagcagaatagtaaaggttctattcagcaacatagttcatggattttgtggaggttctattcagtaatatggttcatggatttagtggtgactgataagattttatttttgaaggaaaaattgcttatactaagtccagagacatgcaggtgagcccttttgtcaggctgcaaatcatgacatgccgatggttgtttattttgtttttaggtgtgcattctttttcttcttagcaattcctttatgatcaccttcccttcttgtttcactccctcccgctctctcaaaaggaacttgggaaacttgtgaaacccaggaaaacctttagtcttatacctcaactacctttcagtcctgtctgggttttaaataagtgaagtagaagaaattgagtattttctgacataagaatatattatcaatacagttttatgcagtaagctctccttaccataaatgtttcttggttgacaacatctaagacaatattagtgggatgaagaaagaaaagcaggggtgcttttggaagcagtgttagtgttcctcaaaagtcggaacaattgcctgttgatatattaataagacattaaagtcaaattttaatgttggcctctcaaatgatttggataccactctgcaaagtatttctaacctttaattcccagttttaaaacagatataataatagcatttaattggaatatactaggcagctggaaaagtatttgaaactaaattgacattaaaattaagatttgttttcaagtggatgtccattaaaagtagaaaaatatttgggataagtgagtgtgtatttccttacatggctactaaataaaatataatgagtatacaagtatatctcctcttttgctatggaggctccatgttcaaggcaatggctttttaaatcttggctatctaaaattttttccctttgttttgaatatttgtaagtttttaagaagttagtgtcagcaaattaattgaagttatgcttctatactgggacatatttaaatactgagtatagtactgctgctactgcttctacaatgtaaaatgtatgacttggtgttttaaagtaaaaattatgatgttacttgtggagaaactaaaaatgttgtacaactgaccgaaagaaaacccttggggataagtttagtgaggggattggaatccccaaaaagataacatttttcttctgcttttaaaaactgaaattccctgttctagttcctaacaattctcattacatactatgccagattacaaaatacttatttttaaaatgaaatctatatattgactttcttatcaatcatcttactgtgcaatcaaaattagagtactttggtttgaaaacaacacttagagcctccagataacttttaagacttatttagctttgtgggtggtattttcatgcaaataagtaagggtgggttttatattttgtagaagttttcggtcctattttaatgcttttgtatggcagtatgtatatattgtgttaagttcctcaagaatctccttaaaaactttgaagttaatacttttgtgcaactgtgttttgaataaagccatgacagtgttaaaaac

SEQ ID NO: 2447 - DNA, 4205 bp, Homo sapiens
gaagcgggctgggaggcgtcggcggcggcagcgcacgtggtgacgtgcgagggggtgcggcgcgagcggtcggcggcggcggaggcagtgtctcccggtcgcgcgtggaggtcggtcgctcagagctgctgggcgcagtttctccgcctgctgcttcggcgcggctgtatcggcgagcgagcgagttcccgcgagttctcggtggcgctcccccttcctttcagtctccacggactggcccctcgtccttctacttgaccgctcccgtcttccgccgccttctggcgctttccgttgggccgattcccgcccgcttcctcctgcttcccatcgaagctctagaaatgaatgtttccatctcttcagagatgaaccagattatgatgcatcattatcacagaagaaattcgtgtctatagcttttaaggacttgattacatcattttcaagcctgatagttttggaatcaccattagagcttaagacacacctgccttcatttcaaccacctgtcttcataccctgacgaagtgcaccttttaacactcctttgtccttggattacttaagagttcccagaaatacatttgccaccaacagagtagccaaatttataaggaaaaatgattcccaatggatatttgatgtttgaggatgaaaattttattgagtcttctgttgccaaattaaatgccctgaggaaaagtggccagttctgtgatgttcgacttcaggtctgtggccatgaaatgttagcacacagagcagtgctagcttgctgcagtccctatttatttgaaatctttaatagtgatagtgatcctcatggaatttctcacgttaaatttgatgatctcaatccagaagctgttgaagtcttgttgaattatgcctacactgctcagttgaaagcagataaggaattggtaaaagatgtttattctgcagcaaaaaagctgaagatggatcgagtaaagcaggtttgtggtgattatttactgtctagaatggatgttaccagctgcatctcttaccgaaattttgcaagttgtatgggagactcccgtttgttgaataaggttgatgcttatattcaggagcatttgttacaaatttctgaagaggaggagtttcttaagcttccaaggctaaagttggaggtaatgcttgaagataatgtttgcttgcccagcaatggcaaattatatacaaaggtaatcaactgggtgcagcgtagcatctgggagaatggagacagtctggaagagctgatggaagaggttcaaaccttgtactactcagctgatcacaagctgcttgatgggaacctactagatggacaggctgaggtgtttggcagtgatgatgaccacattcagtttgtgcagaaaaagccaccacgtgagaatggccataagcagataagtagcagttcaactggatgtctctcttctccaaatgctacagtacaaagccctaagcatgagtggaaaatcgttgcttcagaaaagacttcaaataacacttacttgtgcctggctgtgctggatggtatattctgtgtcatttttcttcatgggagaaacagcccacagagctcaccaacaagtactccaaaactaagtaagagtttaagctttgagatgcaacaagatgagctaatcgaaaagcccatgtctcctatgcagtacgcacgatctggtctgggaacagcagagatgaatggcaaactcatagctgcaggtggctataacagagaggaatgtcttcgaacagtcgaatgctataatccacatacagatcactggtcctttcttgctcccatgagaacaccaagagcccgatttcaaatggctgtactcatgggccagctctatgtggtaggtggatcaaatggccactcagatgacctgagttgtggagagatgtatgattcaaacatagatgactggattcctgttccagaattgagaactaaccgttgtaatgcaggagtgtgtgctctgaatggaaagttatacatcgttggtggctctgatccatatggtcaaaaaggactgaaaaattgtgatgtatttgatcctgtaacaaagttgtggacaagctgtgcccctcttaacattcggagacaccagtctgcagtctgtgagcttggtggttatttgtacataatcggaggtgcagaatcttggaattgtctgaacacagtagaacgatacaatcctgaaaataatacctggactttaattgcacccatgaatgtggctaggcgaggagctggagtggctgttcttaatggaaaactgtttgtatgtggtggctttgatggttctcatgccatcagttgtgtggaaatgtatgatccaactagaaatgaatggaagatgatgggaaatatgacttcaccaaggagcaatgctgggattgcaactgtagggaacaccatttatgcagtgggaggattcgatggcaatgaatttctgaatacggtggaagtctataaccttgagtcaaatgaatggagcccctatacaaagattttccagttttaacaaatttaagaccctctcaaactaacaggcttagtgatgtaattatggttagtagaggtacacttgtgaataaagagggtgggtgggtatagatgttgctaacagcaacacaaagcttttgcatattgcatactattaaacatgctgtacatactttttgggtttatttggaaaggaatgcaaagatgaaggtctgttttgtgtacttttaagactttggttattttactttttggaaaagaataaaccaagaattgattgggcacatcatttcaagaagtcccctctcctccacatttgttttgccaatttgcacattaaatgactcttccctcaaatgtgtactatggggtaaaaggggtagggtttaaagatgtagacagttgggttttttaagggccctttttcaataactggaacactctataacaaaggatacttatttaaatagatgacattgactatttttgtttttattaaaaggaagcttacatgcctaccaatatttaatcttttatgattgcctttttataactttttatattctcagcagagtgctttaccaattgaagtaaaatgtggcaggctggagttattgaagcagagtggcagtcttcagtttgcagagtaggggtctgtcttttaaactctgagtgcaaacttcagagttcttgccttggctgcagtttttttccttcaagaatgcagtactaacatttatttgagtggagttactgaacagtaacatagctgtgatttttggtatttgaaacactggttttaaatattttgacttgttgagggtatgttttatatagcaagacattatatagcagtaaaaaatggtgttttatcttctatataattcctgtttttattattaacaaaacagtcctaaatagcagccctcaattgtgaaaaaatttactttaaactacattaggttgtgaatgcaggttttatcagaactatgtttttgttcagtttatctgttcatatggataaatattggttgggatgacttggtgtctaatgtgtagtgctacacacctaacttatggggccaaaatagcatgtcctaatgcttgctgctgatttaaacacattaaaggtactttgcaggaaatccttgcaccatgggattaatatccaattgctgcttgtacactcattcattactaaaagttttgagaaatttttttttccagtaatgagcttaagaaatttgtggaaaataactcacctggcatcttacatctgaaataaggaatgatataaggtttttttttctcacagaagatgaagcacacaggaacctaatgggccaactgggatgaggtgactattctgagatgactattcagtggctaacttgggttaggaagaaaataattaggtattttctccaaatgttcactggtactctgccactttatttctctcatctgttacacaaagaaccaccaggaaagcaaatcagtttggttggtaactctgtaattcctaactatcactggtttggttctggactaaaactacattgacagattgaatttgcctaatatgatgactgtttttaatatggatctgtatgtgttctattcagcacaaggaaataaaattttagttgaggattcagcactaaaaaaaaaa

SEQ ID NO: 2448 - DNA, 4346 bp, Homo sapiens
gaagcgggctgggaggcgtcggcggcggcagcgcacgtggtgacgtgcgagggggtgcggcgcgagcggtcggcggcggcggaggcagtgtctcccggtcgcgcgtggaggtcggtcgctcagagctgctgggcgcagtttctccgcctgctgcttcggcgcggctgtatcggcgagcgagcgagttcccgcgagttctcggtggcgctcccccttcctttcagtctccacggactggcccctcgtccttctacttgaccgctcccgtcttccgccgccttctggcgctttccgttgggccgattcccgcccgcttcctcctgcttcccatcgaagctctagaaatgaatgtttccatctcttcagagatgaaccagattatgatgcatcattatcacagaagaaattcgtgtctatagcttttaaggacttgattacatcattttcaagcctgatagttttggaatcaccattagagcttaagacacacctgccttcatttcaaccacctgtcttcataccctgacgaagtgcaccttttaacactcctttgtccttggattacttaagagttcccagaaatacatttgccaccaacagagtagccaaatttataaggaaaaatgattcccaatggatatttgatgtttgaggatgaaaattttattgagtcttctgttgccaaattaaatgccctgaggaaaagtggccagttctgtgatgttcgacttcaggtctgtggccatgaaatgttagcacacagagcagtgctagcttgctgcagtccctatttatttgaaatctttaatagtgatagtgatcctcatggaatttctcacgttaaatttgatgatctcaatccagaagctgttgaagtcttgttgaattatgcctacactgctcagttgaaagcagataaggaattggtaaaagatgtttattctgcagcaaaaaagctgaagatggatcgagtaaagcaggtttgtggtgattatttactgtctagaatggatgttaccagctgcatctcttaccgaaattttgcaagttgtatgggagactcccgtttgttgaataaggttgatgcttatattcaggagcatttgttacaaatttctgaagaggaggagtttcttaagcttccaaggctaaagttggaggtaatgcttgaagataatgtttgcttgcccagcaatggcaaattatatacaaaggtaatcaactgggtgcagcgtagcatctgggagaatggagacagtctggaagagctgatggaagaggtttattaacaaaactaggatacccaagactgaagaaacaagaagaaacctcaagtgtattgacacgtaaagaagcagcagtcctgccccagttctcctaagaaaaatccgctgtgggcagagaacgatgatgatttaatggttcaaaccttgtactactcagctgatcacaagctgcttgatgggaacctactagatggacaggctgaggtgtttggcagtgatgatgaccacattcagtttgtgcagaaaaagccaccacgtgagaatggccataagcagataagtagcagttcaactggatgtctctcttctccaaatgctacagtacaaagccctaagcatgagtggaaaatcgttgcttcagaaaagacttcaaataacacttacttgtgcctggctgtgctggatggtatattctgtgtcatttttcttcatgggagaaacagcccacagagctcaccaacaagtactccaaaactaagtaagagtttaagctttgagatgcaacaagatgagctaatcgaaaagcccatgtctcctatgcagtacgcacgatctggtctgggaacagcagagatgaatggcaaactcatagctgcaggtggctataacagagaggaatgtcttcgaacagtcgaatgctataatccacatacagatcactggtcctttcttgctcccatgagaacaccaagagcccgatttcaaatggctgtactcatgggccagctctatgtggtaggtggatcaaatggccactcagatgacctgagttgtggagagatgtatgattcaaacatagatgactggattcctgttccagaattgagaactaaccgttgtaatgcaggagtgtgtgctctgaatggaaagttatacatcgttggtggctctgatccatatggtcaaaaaggactgaaaaattgtgatgtatttgatcctgtaacaaagttgtggacaagctgtgcccctcttaacattcggagacaccagtctgcagtctgtgagcttggtggttatttgtacataatcggaggtgcagaatcttggaattgtctgaacacagtagaacgatacaatcctgaaaataatacctggactttaattgcacccatgaatgtggctaggcgaggagctggagtggctgttcttaatggaaaactgtttgtatgtggtggctttgatggttctcatgccatcagttgtgtggaaatgtatgatccaactagaaatgaatggaagatgatgggaaatatgacttcaccaaggagcaatgctgggattgcaactgtagggaacaccatttatgcagtgggaggattcgatggcaatgaatttctgaatacggtggaagtctataaccttgagtcaaatgaatggagcccctatacaaagattttccagttttaacaaatttaagaccctctcaaactaacaggcttagtgatgtaattatggttagtagaggtacacttgtgaataaagagggtgggtgggtatagatgttgctaacagcaacacaaagcttttgcatattgcatactattaaacatgctgtacatactttttgggtttatttggaaaggaatgcaaagatgaaggtctgttttgtgtacttttaagactttggttattttactttttggaaaagaataaaccaagaattgattgggcacatcatttcaagaagtcccctctcctccacatttgttttgccaatttgcacattaaatgactcttccctcaaatgtgtactatggggtaaaaggggtagggtttaaagatgtagacagttgggttttttaagggccctttttcaataactggaacactctataacaaaggatacttatttaaatagatgacattgactatttttgtttttattaaaaggaagcttacatgcctaccaatatttaatcttttatgattgcctttttataactttttatattctcagcagagtgctttaccaattgaagtaaaatgtggcaggctggagttattgaagcagagtggcagtcttcagtttgcagagtaggggtctgtcttttaaactctgagtgcaaacttcagagttcttgccttggctgcagtttttttccttcaagaatgcagtactaacatttatttgagtggagttactgaacagtaacatagctgtgatttttggtatttgaaacactggttttaaatattttgacttgttgagggtatgttttatatagcaagacattatatagcagtaaaaaatggtgttttatcttctatataattcctgtttttattattaacaaaacagtcctaaatagcagccctcaattgtgaaaaaatttactttaaactacattaggttgtgaatgcaggttttatcagaactatgtttttgttcagtttatctgttcatatggataaatattggttgggatgacttggtgtctaatgtgtagtgctacacacctaacttatggggccaaaatagcatgtcctaatgcttgctgctgatttaaacacattaaaggtactttgcaggaaatccttgcaccatgggattaatatccaattgctgcttgtacactcattcattactaaaagttttgagaaatttttttttccagtaatgagcttaagaaatttgtggaaaataactcacctggcatcttacatctgaaataaggaatgatataaggtttttttttctcacagaagatgaagcacacaggaacctaatgggccaactgggatgaggtgactattctgagatgactattcagtggctaacttgggttaggaagaaaataattaggtattttctccaaatgttcactggtactctgccactttatttctctcatctgttacacaaagaaccaccaggaaagcaaatcagtttggttggtaactctgtaattcctaactatcactggtttggttctggactaaaactacattgacagattgaatttgcctaatatgatgactgtttttaatatggatctgtatgtgttctattcagcacaaggaaataaaattttagttgaggattcagcactaaaaaaaaaa

SEQ ID NO: 2449 - DNA, 1174 bp, Homo sapiens
ccccgcgcagcccggcccgacccgcggcgatggcccagcccggggacccgcggcgcctctgcaggctggtgcaggagggccggctgcgcgccctgaaggaggagctgcaggcggccgggggctgcccggggccggccggggataccctcctgcactgcgccgcgcgccacgggcatcgggacgtgctggcctatctggccgaggcctggggcatggacatcgaggccaccaaccgagactacaagcggcctctgcacgaggcggcctccatgggccaccgagactgcgtgcgctacctgctgggccggggggcagcggtcgactgcctgaagaaggccgactggactcctctgatgatggcctgcacaaggaagaacctgggggtgatccaggagctggtggaacatggcgccaatccactcctgaagaacaaagatggctggaacagtttccacattgccagtcgagaaggcgaccctctgatcctccagtacctgctcactgtttgcccaggtgcctggaagacagagagcaaaattagaaggactcctctgcatactgcagcaatgcatggccatttggaggcagtcaaggtgcttcttaagaggtgccaatatgaaccagactacagagacaactgtggcgtcaccgccttgatggacgcaatccagtgtgggcacatcgacgtcgctaggctgctcctcgatgaacatggggcttgcctttcagcagaagacagcctgggtgcccaggctctgcacagggcagctgtcacagggcaggacgaagccatccgattcttggtctctgaacttggcgtcgatgtagatgtgagagccacatcaacccacctcacagcacttcattatgcagctaaggaaggacatacaagtacaattcagactctcttatccttgggagctgacatcaattctaaagatgaaaaaaatcgatcagccctgcatctggcctgtgcaggtcagcacttggcctgtgccaagtttctcctgcagtcgggactgaaggattctgaagacatcacgggcaccctggctcagcagctcccaaggagagcagatgtccttcagggctctggccatagcgcaatgacataaggatgtttccaagaggaggcaataaagtgcatggtaattcaaaaaaaaaaaaaaaaaaa

SEQ ID NO: 2450 - DNA, 1069 bp, Homo sapiens
ccccgcgcagcccggcccgacccgcggcgatggcccagcccggggacccgcggcgcctctgcaggctggtgcaggagggccggctgcgcgccctgaaggaggagctgcaggcggccgggggctgcccggggccggccggggataccctcctgcactgcgccgcgcgccacgggcatcgggacgtgctggcctatctggccgaggcctggggcatggacatcgaggccaccaaccgagactacaagcggcctctgcacgaggcggcctccatgggccaccgagactgcgtgcgctacctgctgggccggggggcagcggtcgactgcctgaagaaggccgactggactcctctgatgatggcctgcacaaggaagaacctgggggtgatccaggagctggtggaacatggcgccaatccactcctgaagaacaaagatggctggaacagtttccacattgccagtcgagaaggcgaccctctgatcctccagtacctgctcactgtttgcccaggtgcctggaagacagagagcaaaattagaaggactcctctgcatactgcagcaatgcatggccatttggaggcagtcaaggtgcttcttaagaggtgccaatatgaaccagactacagagacaactgtggcgtcaccgccttgatggacgcaatccagtgtgggcacatcgacgtcgctaggctgctcctcgatgaacatggggcttgcctttcagcagaagacagcctgggtgcccaggctctgcacagggcagctgtcacaggacatacaagtacaattcagactctcttatccttgggagctgacatcaattctaaagatgaaaaaaatcgatcagccctgcatctggcctgtgcaggtcagcacttggcctgtgccaagtttctcctgcagtcgggactgaaggattctgaagacatcacgggcaccctggctcagcagctcccaaggagagcagatgtccttcagggctctggccatagcgcaatgacataaggatgtttccaagaggaggcaataaagtgcatggtaattcaaaaaaaaaaaaaaaaaaa

SEQ ID NO: 2451 - DNA, 1095 bp, Homo sapiens
ccccgcgcagcccggcccgacccgcggcgatggcccagcccggggacccgcggcgcctctgcaggctggtgcaggagggccggctgcgcgccctgaaggaggagctgcaggcggccgggggctgcccggggccggccggggataccctcctgcactgcgccgcgcgccacgggcatcgggacgtgctggcctatctggccgaggcctggggcatggacatcgaggccaccaaccgagactacaagcggcctctgcacgaggcggcctccatgggccaccgagactgcgtgcgctacctgctgggccggggggcagcggtcgactgcctgaagaaggccgactggactcctctgatgatggcctgcacaaggaagaacctgggggtgatccaggagctggtggaacatggcgccaatccactcctgaagaacaaagatggctggaacagtttccacattgccagtcgagaaggcgaccctctgatcctccagtacctgctcactgtttgcccaggtgcctggaagacagagagcaaaattagaaggactcctctgcatactgcagcaatgcatggccatttggaggcagtcaaggtgcttcttaagaggtgccaatatgaaccagactacagagacaactgtggcgtcaccgccttgatggacgcaatccagtgtgggcacatcgacgtcgctaggctgctcctcgatgaacatggggcttgcctttcagcagaagacagcctgggtgcccaggctctgcacagggcagctgtcacagggcaggacgaagccatccgattcttggtctctgaacttggcgtcgatgtagatgtgagagccacatcaacccacctcacagcacttcattatgcagctaagccctgcatctggcctgtgcaggtcagcacttggcctgtgccaagtttctcctgcagtcgggactgaaggattctgaagacatcacgggcaccctggctcagcagctcccaaggagagcagatgtccttcagggctctggccatagcgcaatgacataaggatgtttccaagaggaggcaataaagtgcatggtaattcaaaaaaaaaaaaaaaaaaa

SEQ ID NO: 2452 - DNA, 2121 bp, Homo sapiens
ccccgcgcagcccggcccgacccgcggcgatggcccagcccggggacccgcggcgcctctgcaggctggtgcaggagggccggctgcgcgccctgaaggaggagctgcaggcggccgggggctgcccggggccggccggggataccctcctgcactgcgccgcgcgccacgggcatcgggacgtgctggcctatctggccgaggcctggggcatggacatcgaggccaccaaccgagactacaagcggcctctgcacgaggcggcctccatgggccaccgagactgcgtgcgctacctgctgggccggggggcagcggtcgactgcctgaagaaggccgactggactcctctgatgatggcctgcacaaggaagaacctgggggtgatccaggagctggtggaacatggcgccaatccactcctgaagaacaaagatggctggaacagtttccacattgccagtcgagaaggcgaccctctgatcctccagtacctgctcactgtttgcccaggtgcctggaagacagagagcaaaattagaaggactcctctgcatactgcagcaatgcatggccatttggaggcagtcaaggtgcttcttaagaggtgccaatatgaaccagactacagagacaactgtggcgtcaccgccttgatggacgcaatccagtgtgggcacatcgacgtcgctaggctgctcctcgatgaacatggggcttgcctttcagcagaagacagcctgggtgcccaggctctgcacagggcagctgtcacagggcaggacgaagccatccgattcttggtctctgaacttggcgtcgatgtagatgtgagagccacatcaacccacctcacagcacttcattatgcagctaaggaaggacatacaagtacaattcagactctcttatccttgggagctgacatcaattctaaagatgaaaaaaatcgatcagccctgcatctggcctgtgcaggtcagcacttggcctgtgccaagtttctcctgcagtcgggactgaaggattctgaagacatcacgggcaccctggctcagcagctcccaaggagagcagatgtccttcagggctctggccatagcgcaatgacataaggatgtttccaagaggaggcaataaagtgcatgagttgctgggagcctgagcacctttcgtttttcggctcagagaaagccaagtgcaacttgcttcagtcatcctgaacctgagttcaaccaaccgcagccacctacgtttgaccccagcgagatcaaagttgtatatctgaggtgtaccagtggtgaagtcagtgccacatctgcactggcccccaaggtcagctccctgggtctgtctccaaaaatggttgctgatgacatcaccaaccattgactggaagagtctgaggatgatagtgaaactgaccagccacagcagacaggcccagattgaggtggtgccttctgcctctgccctgatcgtcacaaccctcaggaaccaccgacagaaagaaagaaacacaaaaacatgaaacacagtggtagcaccacttctgatgagattgtcaacattgcctaacagatgcagcagcagtctttagccagagaactctctggaaccattaaagaattcctgggggccggttgcggtggctcatgcctgtaatcccagcactttgggaggccgaggcgggaggatcatgaggtcaggagatcgagaccatcctggctaacgtggtgaaaccccgtctcttactaaaaatacaaaaaaattagccaggcatggtggtgggcgcctgtagtcccagctactcaggaggctgaggcaggagaatgctgtgaaccctggaggcagagcttgcagtgagccgaatatgcgccactgcactccagcctgggcaacagagcaagactccgtctccaaaaaaaaaagaattcctggggcctgcccagtctgtgagctgccatgttgatagtatcacagatgataccaacagtgaagctgtggaatgcccagctagttaaagaatgcaaaggaaaatattttcacaaagggttatctgataaccaaaaaataaaaagacatttcatctaagccacttaaaaaaaaaaaaaaaaaaaa

SEQ ID NO: 2453 - DNA, 3669 bp, Homo sapiens
gccagtttctgcagtggaggtcgcgactgagggacgggacagagaagtcgcgaaagtgggccagaggttctgcgacaccacctcgggtgagctgcgccaggcccgggatagggactgttgtgttcgaatgcccgccccggtcggccgccgctccccgcctagtccacggagctcaatggcggcagtcgcgctgagggactcggctcagggtatgacctttgaggatgtggccatttatttctcccaagaagagtgggagctccttgatgagtctcagaggttcctgtactgcgatgtgatgctggagaactttgcacatgtaacatccctgggttattgccatggaatggagaatgaggcgatagcttctgagcagagtgtatctatacaggtcaggacttctaagggcaatacacccacccagaaaactcacctcagtgagattaagatgtgtgtcccagtcttgaaagacattttgcctgcggctgagcaccaaaccacatcccctgtgcaaaagtcatacttgggtagcacaagcatgagaggcttctgcttcagtgctgaccttcaccagcatcaaaagcattacaatgaagaagagccctggaaaaggaaggtggatgaggctacatttgtgaccggctgcagattccatgtgttgaattatttcacctgtggggaggccttcccagcccccacggacctactccaacacgaagccactcccagtggtgaggagccacacagtagcagcagcaagcatatacaggcatttttcaatgcaaaaagttattacaagtggggtgaatacagaaaagcttcaagccacaaacacacacttgttcagcatcagagtgtctgttctgaaggagggctttatgagtgtagcaaatgtgagaaagccttcacttgcaagaacacacttgttcagcaccagcaaattcacactggacaaaagatgtttgagtgtagtgaatgtgaggaatcctttagcaaaaagtgccacctaatcttacacaagataattcacactggagaaaggccttatgaatgcagtgatcgtgagaaagcctttatccataaatctgaattcattcaccaccagagacgtcacactggaggagtgcgtcatgagtgtggtgaatgtaggaaaacctttagctacaaatctaacctcattgaacaccagagagttcacactggagaaaggccttatgaatgtggcgagtgcgggaaatcctttagacaaagctctagcctttttcgacaccagagagttcactctggagaaaggccttatcagtgctgtgagtgtgggaaatcctttagacaaatcttcaatctcattcgacatagaagagttcacactggagaaatgccttatcagtgcagtgattgtgggaaatcttttagctgcaaatcggaactcattcaacaccagagaattcacagtggagaaagaccttatgaatgcagagaatgtgggaaatcctttagacaattctctaacctcattcgacaccgcagcattcacactggtgataggccttatgagtgcagtgaatgtgagaaatcctttagccgcaaatttatcctgattcaacaccaaagagttcacactggagaaagaccttatgaatgcagtgaatgtggaaaatcctttacccgcaaatctgacctcattcaacaccggagaattcatactggcacaagaccttatgagtgcagtgaatgtggcaaatcttttagacagcgctctggcctcattcagcaccggagacttcatactggagaaaggccttatgaatgtagtgaatgtggaaagtcttttagccaaagtgctagcctcattcaacaccagagagttcacactggagaaaggccttatgaatgtagtgaatgtgggaaatcctttagccagagctctagcctcattcaacaccagagaggtcacactggagaaagaccttatgagtgcagtcaatgtgggaaaccctttacccacaaatcagaccttattcagcaccaaagagttcacactggagaaaggccttatgaatgcagtgaatgtgggaaatcctttagccgcaaatctaacctcattcgacatcggagagttcacactgaagaaaggccttaaatgtgaagggaatgtgctatttctttattcagtataatagcactggaggagactgtggtagccatcttcgtaaatttaaactttgagcacccacagtggggtattcttcataagtttcaggtatgtgggaagctctgaggaggttcattgtaatttctaatctgccgaggcctatagcctgatttatgtcactgccaatttctgaggctgaagccatttcacatttcacccctaccacctggcaggtgcacaccatgtgcatgagtcacttccccacagtgctcagagaagcaaacctctgtactctcccatttgcttggggaaattattaatagcccaagcatgtagggtcttcatgtcttttctctgactttagagtatacacctgacccagttgtggtccagagaatctgagttgtgctgtcagctttctaaggattacctttttaaggaacattgtcggtctcacatgatgcttgtaatgaatttttccacattctgattcaccagcctggaaactgcttggtgcacattgctttaatttataatgtttttataaaggttttaaaaaaatttacgcacctttaatcttgggtgttctattcattgcatagaatgacttgtaagcagaatagtgatgtcagcatgaaggggtgaatagattttgtggagatctcaaactttctgtactcagaagggacaatgtgatggcagaagacagctctttgttctgtattgctctaattggcctgctgcccaaggcctcaaagtaaagactgccaggctttgtgttcctgtattgtggcctggtgccatttttgtcaggtcagaggtcaccatgaaaaggaggcagttgtgacaatccccagtgcttctgtgaacgtgaattttgttcagttgtccacaggagatccacataattcctagcactggtgaggggaatctgttgcccaggtcctgcaaaggagccatgtgccatggcatataagtcagtgtagactggtgccatttgttgtcagactataggtgtggaggtgaaattacaggttcaacagtaattgggacagaaactccaggtaaatggggagtggagaagactgcagtaaattagatggaatgactcttctaaaagttcatctacaaattttccagtgaatatggttgtgtaggatcagtgcatacagaaattctcaggatcttctgtttactatcgctgagatcattatcagaaaatagtctggccgggcatggtgtaatcctaacactttgggaggccaaggcgggcggattgcctgagctcaggagttcaagaccagcctgggcaacatggtgaaatcccatgtctactaaaatacaaaaaattagccaggcgtggcagcatgcgcctatagtcccagccacttgggaggctgaggcaggagaatcgcttgaacccagaaggcggaagttgcagtgagctgagattgcaccactgcactccagcccaggcaacagagtgagactccgtctccaaaaaaaaaaaaaaaaaa

SEQ ID NO: 2454 - DNA, 4312 bp, Homo sapiens
cgaccgcggcggctggaaccctgattgctgtccttcaacgtgttcattatgaagttattagtaatacttttgttttctggacttataactggttttagaagtgactcttcctctagtttgccacctaagttactactagtatcctttgatggcttcagagctgattatctgaagaactatgaatttcctcatctccagaattttatcaaagaaggtgttttggtagagcatgttaaaaatgtttttatcacaaaaacatttccaaaccactacagtattgtgacaggcttgtatgaagaaagccatggcattgtggctaattccatgtatgatgcagtcacaaagaaacacttttctgactctaatgacaaggatcctttttggtggaatgaggcagtacctatttgggtgaccaatcagcttcaggaaaacagatcaagtgctgctgctatgtggcctggtactgatgtacccattcacgataccatctcttcctattttatgaattacaactcctcagtgtcatttgaggaaagactaaataatattactatgtggctaaacaattcgaacccaccagtcacctttgcaacactatattgggaagaaccagatgcaagtggccacaaatacggacctgaagataaagaaaacatgagcagagtgttgaaaaaaatagatgatcttatcggtgacttagtccaaagactcaagatgttagggctatgggaaaatcttaatgtgatcattacaagtgatcatgggatgacccagtgttctcaggacagactgataaacctggattcctgcatcgatcattcatactacactcttatagatttgagcccagttgctgcaatacttcccaaaataaatagaacagaggtttataacaaactgaaaaactgtagccctcatatgaatgtttatctcaaagaagacattcctaacagattttattaccaacataatgatcgaattcagcccattattttggttgccgatgaaggctggacaattgtgctaaatgaatcatcacaaaaattaggtgaccatggttatgataattctttgcctagtatgcatccatttctagctgcccacggacctgcatttcacaaaggctacaagcatagcacaattaacattgtggatatttatccaatgatgtgccacatcctgggattaaaaccacatcccaataatgggacctttggtcatactaagtgcttgttagttgaccagtggtgcattaatctcccagaagccatcgcgattgttatcggttcactcttggtgttaaccatgctaacatgcctcataataatcatgcagaatagactttctgtacctcgtccattttctcgacttcagctacaagaagatgatgatgatcctttaattgggtgacatgtgctagggcttatacaaagtgtctttgattaatcacaaaactaagaatacatccaaagaatagtgttgtaactatgaaaaagaatactttgaaagacaaagaacttagactaagcatgttaaaattattactttgttttccttgtgttttgtttcggtgcatttgctaataagataacgctgaccatagtaaaattgttagtaaatcattaggtaacatcttgtggtaggaaatcattaggtaacatcaatcctaactagaaatactaaaaatggcttttgagaaaaatacttcctctgcttgtattttgcgatgaagatgtgatacatctttaaatgaaaatataccaaaatttagtaggcatgtttttctaataaatttatatatttgtaaagaaaacaacagaaatctttatgcaatttgtgaattttgtatattagggaggaaaagcttcctatatttttatatttacctttaattagtttgtatctcaagtaccctcttgaggtaggaaatgctctgtgatggtaaataaaattggagcagacagaaaagatatagcaaatgaagaaatattttaaggaaacctatttgaaaaaaaaagcaaagaccatttgataaaagcctgagttgtcaccattatgtcttaagctgttagtcttaaagattattgttaaaaaattcagaagaaaagagagacaagtgctcttctctctatctatgcttaatgcctttatgtaagttacttagttgtttgcgtgtgcctgtgcaagtgtgtttgtgtgtggttgtgtggacattatgtgatttactatataaggaggtcagagatggactgtggccaggcttccacattcctgaagcacacagatctcaggaaaggttatttttgcacttcatatttgtttactttctcctaactcacaagttaaaatcataacttaatttcattaacttttatcatttaactctctcatgtttgttgtaacctgaggtatccaaatgctacagaaaaatttatgacccaaatacaaatctcaatttgactgggacagaatgaggaatggagatttttgtatttatctttgggactttatgccttactttttaggctatagaatagttaagaaattttaaacaaaatttagtatcttttggtctttcacaccattcatatgttaagtggcagaatagccttagtgctacctccactttttttctccagtatttgcatcacagaaataatccctctgtttaacatgtttgttcagagccaagggtttattgtgaagaactgtcatcctgcctttgctagctggtaccttctagtaatcaaaattaatatgaagaaactaggttgtgacagactagattatatttagtaggggaaaaattgggctcaagaaccattcatcagtacgtgagacaagcagttaatagtatgatctttaaagttttgacaatataaaataaacttggtaactgttttacaaatataaaagtataataaatatgcagcccagttaaatattgattatctgtgatggtaaagaacaacagtggtgccagtcatcaaacatacagtgcgtcctattgagtcactgctaatttcttgagcctggtatttgctgcctattgtatttgtggttgttgagaggcattttcaaaccctgtataaataatccatgctgttggtcataagttaactgtattaagaacagtaaaataaataaaaaccaatagtactaattttgctttaaaaaaatttctaatttttttcacataaaacaattatcctaaaggttaatagttgatcgaaacagaataatagaaaaattctactttaatttccattaaaaagcaaatagcattgacacatttaaagcttttcatttaaagtagtggatgtttttgaagtatctaaaatagtagcagaatattttatacttggtccttgcaatggtgtgagttttaatgattgcattatcgtgattggtggttatgagtttcagaaatctatacttggcatccaactcatgagtggattttatataggatggaacaggaaggtatgtcctgtcagtatcttaaccctttcaacaagacatttacctatttgtctttccttacgttctcaaaatattaactcgaattgtaaattaagcaaaaatttaaaaagtatatgttgatgggacaagaagaatagtatttatttaataaaacatatattatattgaactatgtgttaattcatttgtatcttttaaaaaattatcactgttaaagccattgactcctttagtacactgagaaaaatcttatagtaaaactagcctttcacattaaggttttggtgtgtattttgttaaataactaacatgctgctctattttctgggtgtagaaagtatttggctctaggaaacatttacttgtttgtgaaaacaataccccaaggtaataggaaaagtttgagttaagtgtttttaattcagtcagtgaattcagaataagtacattcatgtataacatagggacagttctgctgctgttatttatatgcaattcttctggtaaatagcaatagaataaaacatatttcaatgtttgtgtataggttttatattattattccactaggaatggcataagaatttatagataaattcttgtaacattaaaggattaaaatgtttttacattgtttttgggtgtctccttcttgtgcccatatctgataagctttatggattattgcatttaattccttttatttggagggttttacttccttgttaacatataaagttataaatgaaggacaaggaggagatggaaaatgtgtatttattgttaattcttaaaatagtgtgtaaataaaataacatcagtgtgcttt

SEQ ID NO: 2455 - DNA, 3839 bp, Homo sapiens
caggtctcgacttcactgctctgtgtcctctgctccaggaggcccagcctgtgtggccctgtgacctgcaggtattggaagagccacagctaagatgccaggaacccctggaagcctagaaatgggactgttgacatttagggatgtggccatagaattctctccggaggagtggcaatgtctggacactgcacagcagaatttatataggaatgtgatgttagagaactacagaaacctggccttcctgggtattgctctctctaagccagacctgattacttatctggagcaaggaaaagagccctggaatatgaagcaacatgagatggtggatgaacccacaggtatatgtcctcattttcctcaagacttttggccagagcagagcatggaagattcttttcaaaaagtattactgagaaaatatgaaaaatgtggacatgagaatttacagttaagaaaaggttgtaaaagtgtggatgagtgtaaggtgcacaaagaaggttataataaacttaaccagtgtctcacaactgcccagagcaaagtatttcaatgtgggaaatatttgaaagtcttctataaatttttaaattcaaacagacatacgataagacataccggaaagaaatgcttcaaatgtaaaaaatgtgtcaagtcattttgcatccgtttacacaaaacccaacataaatgcgtttatattacagagaagtcctgtaaatgtaaagaatgtgaaaaaacctttcattggtcctcaacccttactaatcataaggaaattcatactgaagataaaccctacaaatgtgaagaatgtggcaaagcttttaagcagctctcaacccttactacacataaaataatctgtgctaaagagaaaatctacaagtgtgaagaatgtggcaaagcatttctatggtcctcaaccctaactagacataagaggatacacactggagagaaaccctacaaatgtgaagaatgtggcaaagcttttagccattcttcaacccttgctaaacataagagaattcatactggagagaaaccctacaaatgtgaagaatgtggcaaagcttttagccattcttcagcccttgctaaacataagagaattcatactggagagaaaccctacaaatgtaaagaatgtggcaaagcttttagcaattcctcaacccttgctaatcataagataactcatactgaagagaaaccctacaaatgtaaagaatgtgacaaaacttttaagcgactctcaacccttactaaacataaaataatacatgctggagagaaactctacaaatgtgaagaatgtggcaaagcttttaatcgatcttcaaatcttactatacataagtttattcatactggagagaaaccttacaagtgtgaagaatgtggcaaagcatttaactggtcctcaagccttactaaacataaaagatttcatactagagagaaacccttcaaatgtaaagaatgtggcaaaggatttatatggtcttcaaccctaactagacataagaggatacacactggagagaagccctacaaatgtgaagaatgtggcaaagcttttaggcaatcctcaacccttactaaacataagataattcatactggagagaaaccctacaaatttgaagaatgtggcaaagcttttagacaatccttaacccttaataaacataagataattcatagtagagagaaaccctacaaatgtaaagaatgtggcaaagcttttaagcaattctcaacccttactacacataaaataattcatgctggaaagaaactctacaaatgtgaagaatgtggcaaagcttttaatcattcctcaagtctttctacacataagataattcatactggagagaagtcttacaagtgtgaagaatgtggcaaagcatttctatggtcctcaaccctaagaagacataagaggatacacactggagagaaaccctacaaatgtgaagaatgtggcaaagcttttagccattcttcagcccttgctaaacataagagaattcatactggagagaaaccctacaaatgtaaagaatgtggcaaagcttttagcaattcctcaacccttgctaatcataagataactcatactgaagagaaaccctacaaatgtaaagaatgtgacaaaacttttaagcgactctcaacccttactaaacataaaataatacatgctggagagaaactctacaaatgtgaagaatgtggcaaagcttttaatcgatcttcaaatcttactatacataagtttattcatactggagagaaaccttacaagtgtgaagaatgtggcaaagcatttaactggtcctcaagccttactaaacataaaagaattcatactagagagaaacccttcaaatgtaaagaatgtggcaaagcatttatatggtcttcaaccctaactagacataagaggatacacactggagagaagccctacaaatgtgaagaatgtggcaaagcttttagccgttcctcaacccttactaagcataagacaattcatactggagagaaaccctacaaatgtaaagaatgtggcaaagcttttaagcactcctcagcccttgctaaacataaaataatacatgctggagagaaactctacaaatgtgaggaatgtggcaaagcttttaatcaatcttcaaatcttacgacacataagataattcatactaaagagaaaccttccaagagtgaagaatgtgacaaagcatttatctggtcctcaacccttactgaacataagagaattcataccagagagaaaccctacaaatgtgaagaatgtggcaaagcatttagccagccttcacaccttactacacataagaggatgcacactggagagaaaccctacaaatgtgaagaatgtggcaaagcttttagccaatcctcaacccttactacacataagataattcatactggagagaaaccctacaaatgtgaagaatgtggcaaagcttttaggaaatcttcaactcttactgaacataagataattcatactggagagaaaccctacaaatgtgaagaatgtggcaaagcatttagccaatcctcaaccctaactagacatacgaggatgcacactggagagaaaccatacaaatgtgaagaatgtgggaaagcttttaatcgatcctcaaagcttactacacataagataattcatactggagagaaaccttacaagtgtgaagaatgtggcaaagcatttatatcatcctcaaccctaaatggacataagagaattcatactagagagaaaccctacaaatgtgaagaatgtggcaaagcatttagccaatcttcaaccctaactagacataagaggttgcacaccggagagaaaccctacaaatgtggagaatgtggcaaagcctttaaagagtcctcagctcttactaaacataagataattcacactggagagaaaccctacaaatgtgaaaaatgttgcaaagcctttaaccagtcttcaatccttactaaccataagaaaattcatactatcacacctgtaatcccactactttgggaggccgaggcgggcggatcacgaggtcaggagatggagaccatcctggctaacacagtgaaaccccttctctactaaaaaatacaaaaaactagccgggcgtggtggcgggcgcctgtagtcccagctatgcgagaggctgaggcaggagaatggcgtgaacccgggaggcggagcttgcagtgagccgagatcacgccactgcactcaagcctgggcgacagagcgagactccgtctcaaaaaaa

SEQ ID NO: 2456 - DNA, 2387 bp, Homo sapiens
gcgcgcagcccgcggcggccatctttactcagggcacagagggtctctgcggccgtagcggccggggctgcggtagccactttagatttgggcaaggactttagattcgggctctgttctgtttccgccgtcctgcttcctgccgaggctggcccaggcagccgcgcttcgaaggacgccgccgggagctgcggagcatgcgtggagtggcagtgctaacggctggtgtctcgcactgttggcctgtgaaggtacgtgaagctgaaagcctggaatggctggaaaggggtcatcaggcaggcggcccctgctgctggggctgctggtggccgtagccactgtccacctggtcatctgtccctacaccaaagtggaggagagcttcaacctgcaggccacacatgacctgctctaccactggcaagacctggagcagtacgaccatcttgagttccccggagtcgtccccaggacgttcctcgggccagtggtgatcgcagtgttctccagccccgcggtttacgtgctttcgctgttagaaatgtccaagttttactctcagctaatagttagaggagtgcttggactcggcgtgatttttggactctggacgttacaaaaggaagtgagacggcacttcggggccatggtggccaccatgttctgctgggtgacggccatgcagttccacctgatgttctactgcacgcggacactgcccaatgtgctggccctgcctgtagtcctgctggccctcgcggcctggctgcggcacgagtgggcccgcttcatctggctgtcagccttcgccatcatcgtgttcagggtggagctgtgcctgttcctgggcctcctgctgctgctggccttgggcaaccgaaaggtttctgtagtcagagcccttcgccacgccgtcccggcagggatcctctgtttaggactgacggttgctgtggactcttatttttggcggcagctcacttggccggaaggaaaggtgctttggtacaacactgtcctgaacaaaagctccaactgggggacctccccgctgctgtggtacttctactcagccctgccccgcggcctgggctgcagcctgctcttcatccccctgggcttggtagacagaaggacgcacgcgccgacggtgctggcactgggcttcatggcactctactccctcctgccacacaaggagctacgcttcatcatctatgccttccccatgctcaacatcacggctgccagaggctgctcctacctgctgaataactataaaaagtcttggctgtacaaagcggggtctctgcttgtgatcggacacctcgtggtgaatgccgcctactcagccacggccctgtatgtgtcccatttcaactacccaggtggcgtcgcaatgcagaggctgcaccagctggtgcccccccagacagacgtccttctgcacattgacgtggcagccgcccagacaggtgtgtctcggtttctccaagtcaacagcgcctggaggtacgacaagagggaggatgtgcagccggggacaggcatgctggcatacacacacatcctcatggaggcggcccctgggctcctggccctctacagggacacacaccgggtcctggccagcgtcgtggggaccacaggtgtgagtctgaacctgacccaactgccccccttcaacgtccacctgcagacaaagctggtgcttctggagaggctcccccggccgtcctgagggggaccaggcagccctcagcagccacaggccttccaggagctgttatcactaccagtttctggcacaattccagcacaattatgacaattcagagaagcaagtcaaaggactgggcacctgcctctgacagacaccagaccaggtccagggcctcctccacagcctcagctggggctctcagcaccaaagaacgaggggcccaggtcttgttggcaccccgggagccactgcccagggtgatggtggccagctcagggcttcctgcgggtgactgtcgcccagaccaggtgccattcatgactaatcaggagcagcgggctcacccaggcacctgtctgccaggaggccacgtgtgtcctgcccacccagggggagctgtattttggcagcaccccacgcttgctgcccgagggcctcttggggcacctaagacagcaccccctctcaggggagaccatggtggccccggccgcacccccccaccctggtgccaccactgcaacttttgtattcacaggcatcccatctccatcacagataaaatcttaggagataaacacattcaaaaaggaatgagataaaaagaataaggcaataaatgttgattggaacctctcaagattacagaaaaaaaaaaaaaaaa

SEQ ID NO: 2457 - DNA, 3329 bp, Homo sapiens
ctcttgggagcgggacttctgctcaaatcctgtccaggggcttgaaaaggaggagaattgggggtggttgccgggaggaccagcacctccagttactggagggttgataggggccttctcctttccgtccccctttactagggggtatcccttgcagataaatgagattttttgatttcttaaaaagccagctgcagtgaagaagaactgctgcaggtcgaggggaagagaggaagtgcacggctgtctataacgtgctgccgggtctcaggatggaggagtgaagtctcctgtcgccgtggttccagcctccggagctcgcccaagccgcgtccccagagagcgccctgagagaacagggtggccgcttggtccaggaatgtttacccttgcggaagttgcatcacttaatgacattcagccaacttaccgaatcctgaaaccatggtgggatgtgtttatggattacctagctgttgttatgttaatggtagccatctttgcaggaaccatgcaacttaccaaagatcaggtggtctgtttgccagtattgccatctcctgtaaattcaaaggcacatacaccaccaggaaatgccgaggtcaccaccaacatcccaaagatggaagcagccaccaaccaagaccaagatgggcggacaacaaacgacatttcctttgggacatctgctgtgacacctgacatacctctcagagccacatatcctcgcacagatttcgcacttccaaatcaggaggcaaagaaagagaagaaagatccaacaggtcgaaaaacaaacttggattttcagcaatatgtatttattaatcaaatgtgttaccatctggcccttccgtggtattctaagtactttccatacctagctcttatacatactattattctcatggtcagtagcaacttttggttcaaatatcccaaaacatgctcaaaagtagaacattttgtttcaatattaggaaagtgctttgaatccccttggacgacaaaagcgttgtctgagacagcatgcgaagactcagaggaaaacaagcagagaataacaggtgcccagactctaccaaagcatgtttctaccagcagtgatgaagggagccccagtgccagtacaccaatgatcaataaaactggctttaaattttcagctgagaagcctgtgattgaagttcccagcatgacaatcctggataaaaaggatggagagcaggccaaagccctgtttgagaaagtgaggaagttccgtgcccatgtggaagatagtgacttgatctataaactctatgtggtccaaacagttatcaaaacagccaagttcatttttattctctgctatacagcgaactttgtcaacgcaatcagctttgaacacgtctgcaagcccaaagttgagcatctgattggttatgaggtatttgagtgcacccacaatatggcttacatgttgaaaaagcttctcatcagttacatatccattatttgtgtttatggctttatctgcctctacactctcttctggttattcaggatacctttgaaggaatattctttcgaaaaagtcagagaagagagcagttttagtgacattccagatgtcaaaaacgattttgcgttccttcttcacatggtagaccagtatgaccagctatattccaagcgttttggtgtgttcttgtcagaagttagtgaaaataaacttagggaaattagtttgaaccatgagtggacatttgaaaaactcaggcagcacatttcacgcaacgcccaggacaagcaggagttgcatctgttcatgctgtcgggggtgcccgatgctgtctttgacctcacagacctggatgtgctaaagcttgaactaattccagaagctaaaattcctgctaagatttctcaaatgactaacctccaagagctccacctctgccactgccctgcaaaagttgaacagactgcttttagctttcttcgcgatcacttgagatgccttcacgtgaagttcactgatgtggctgaaattcctgcctgggtgtatttgctcaaaaaccttcgagagttgtacttaataggcaatttgaactctgaaaacaataagatgataggacttgaatctctccgagagttgcggcaccttaagattctccacgtgaagagcaatttgaccaaagttccctccaacattacagatgtggctccacatcttacaaagttagtcattcataatgacggcactaaactcttggtactgaacagccttaagaaaatgatgaatgtcgctgagctggaactccagaactgtgagctagagagaatcccacatgctattttcagcctctctaatttacaggaactggatttaaagtccaataacattcgcacaattgaggaaatcatcagtttccagcatttaaaacgactgacttgtttaaaattatggcataacaaaattgttactattcctccctctattacccatgtcaaaaacttggagtcactttatttctctaacaacaagctcgaatccttaccagtggcagtatttagtttacagaaactcagatgcttagatgtgagctacaacaacatttcaatgattccaatagaaataggattgcttcagaacctgcagcatttgcatatcactgggaacaaagtggacattctgccaaaacaattgtttaaatgcataaagttgaggactttgaatctgggacagaactgcatcacctcactcccagagaaagttggtcagctctcccagctcactcagctggagctgaaggggaactgcttggaccgcctgccagcccagctgggccagtgtcggatgctcaagaaaagcgggcttgttgtggaagatcacctttttgataccctgccactcgaagtcaaagaggcattgaatcaagacataaatattccctttgcaaatgggatttaaactaagataatatatgcacagtgatgtgcaggaacaacttcctagattgcaagtgctcacgtacaagttattacaagataatgcattttaggagtagatacatcttttaaaataaaacagagaggatgcatagaaggctgatagaagacataactgaatgttcaatgtttgtagggttttaagtcattcatttccaaatcatttttttttttcttttggggaaagggaaggaaaaattataatcactaatcttggttctttttaaattgtttgtaacttggatgctgccgctactgaatgtttacaaattgcttgcctgctaaagtaaatgattaaattgacattttcttactataaaaaaaaaaaaaaaaaa

SEQ ID NO: 2458 - DNA, 6906 bp, Homo sapiens
aagccaacaggcgagtggcgaaggtggcggcagcggcggcgggggcagtcaccggctagggcgacggctccgaggccgagtggcggtccgacagagtcctccgtgtcctcccccgcatgacccccttgtgatcagcctttgagcctttcccacattgaagatggtgaaactagatattcatactctggctcatcacctcaagcaggaacgcttatatgtaaactctgagaaacagctcattcagaggctcaatgcagatgtacttaagacagctgaaaagttgtatcgtacagcatggattgcgaagcaacagagaatcaatttggatcggcttatcataaccagtgctgaagcttcccctgctgaatgttgccaacatgccaaaattttggaagatacacaatttgttgatgggtataagcaattgggatttcaggagactgcttatggagaattcttgagtcgattgagggaaaatcctcgtcttattgcctcctctttggttgctggagagaaacttaatcaggagaacacacaaagtgttatttacacagtttttacctccctgtatggcaattgcatcatgcaagaagatgaaagctacctccttcaggttttgcgatacttgattgaatttgaacttaaagaaagtgacaaccctaggcgacttttgaggagaggaacttgtgccttcagcatcttatttaaacttttttctgaaggactgttttctgccaaacttttcctcacagccactttacatgagccaattatgcaactgcttgttgaagatgaagatcacctggaaacagatccaaacaagctaattgagaggttctctccatctcagcaggaaaaactctttggagagaagggctcagatagattcaggcaaaaagttcaagaaatggtggagtccaatgaagcaaagctagtggctttggtgaacaaatttattggttatctcaaacagaacacatattgttttccacatagtttaaggtggatcgtgtctcagatgtacaaaaccctctcctgtgtagataggctggaagttggggaggtcagggcaatgtgtactgatctcctgttggcctgcttcatttgtcctgcagttgtcaatccagaacaatatggaataatttccgatgctcctattaatgaagtagcacgatttaatctgatgcaggtaggccgccttttgcagcagttagcaatgactggctctgaagagggagatccccgaacaaagagcagccttggaaagtttgacaaaagctgtgttgccgctttccttgatgttgtgattgggggccgtgcagtggagacccctccattgtcttccgtcaatcttctggaaggattgagcagaactgtggtttatataacctacagtcagcttattactctggtgaattttatgaagagtgtgatgtctggagatcaactgagagaagatagaatggctcttgacaatttattggcaaacctacccccggccaagccaggaaaaagtagcagtttagaaatgactccctacaatacacctcagctatctccagcaaccactccagcaaataaaaagaatcgattacctatagcaactcggagcagaagccgcaccaatatgctaatggacctacatatggaccatgaaggatcatctcaagaaaccatccaggaggtgcaaccagaagaggtgttggtcatttccttaggtacaggtccccagcttactccagggatgatgtcagaaaatgaggtcctaaacatgcagctttcggatggaggacaaggagatgtccctgttgatgaaaacaaactccatggtaaacctgataaaaccttgcgcttttccctctgcagtgataatctggaaggaatatctgaaggtccttcaaatcgctccaattcagtgtcctccctagacctagaaggagagtctgtgtcagaacttggagcaggaccttctggcagtaatggagttgaagctctacagctgttagaacatgagcaagctacaacacaggataaccttgatgataagctaaggaagtttgaaattcgtgacatgatgggattaacagatgatagggacatatcagaaacagtgagtgagacctggagtacagacgtcttgggaagtgactttgaccctaatattgatgaagatcgcttgcaagaaattgcaggtgctgcagcagagaacatgttaggcagtttgctgtgcctcccaggttcagggtcagtgcttcttgacccctgcactggttctaccatatcagagacaacaagtgaagcttggagtgtagaggtattgccaagtgactcagaggccccagacctaaagcaggaggagcgtctgcaagaactggagagctgttctggactgggtagcacatctgatgatacggatgtcagggaggtcagttcccgccccagcacaccaggcctcagtgttgtgtccggcataagtgcaacctctgaggatattcccaataagattgaagacctgagatctgagtgcagctctgattttgggggtaaagattctgtcactagtccagacatggatgaaataactcacgattttctttatatacttcagccaaaacaacattttcaacacattgaagcagaagcagacatgagaatccagctgtcttctagtgcccaccagctgacctctcctccttctcagtcagagtctctgctggccatgtttgatccactgtcttcacatgaaggggcttctgctgtggtaaggccaaaggttcactatgctaggccatcgcatccaccaccagatcccccaatcctggaaggagctgtgggaggaaatgaggccaggttgccaaactttggttcccatgttttaactccagctgaaatggaggcattcaagcaaaggcattcttaccctgagagactagttcgaagcaggagctctgatatagtatcttctgtccggagacccatgagtgaccccagctggaaccggcgtccaggaaatgaagagcgagaactccctccagctgcagccattggtgctacttctttggtggctgcacctcattcatcatcttcatccccgagtaaggactcctcaagaggagagactgaagaacgcaaagatagcgatgatgagaaatcagacaggaacagaccttggtggagaaaacgttttgtttcagccatgcctaaagctcctataccatttagaaagaaagaaaaacaagaaaaagacaaagatgatctggggcctgacagattctcaacactcacagatgatcccagccctagactcagtgcacaagctcaggtggctgaggatattctggacaaatacaggaatgccattaaacggaccagccccagtgatggagcaatggcaaactatgaaagtacagaggttatgggtgatggtgaaagtgcacatgattctccccgtgacgaagcactgcagaacatctcggctgatgatctcccagactctgcaagccaagcagcccacccgcaggattcagctttctcttacagagatgcaaaaaagaaactgaggcttgctctttgctctgcggactctgttgccttcccagtgctgacccattcaacaaggaatggtttaccagaccacacagacccagaagacaatgaaattgtatgcttcttaaaagttcaaatagctgaagcaattaatttacaagataagaatctaatggctcaacttcaagaaacaatgcgctgtgtgtgccgttttgataataggacttgtaggaaactgctggcttcgattgctgaggactacagaaaaagagccccatatattgcttatctcactcgttgtcgacaaggactacagaccacacaggctcacctggaaaggctattgcaaagagttttgcgggacaaagaagtggccaatcgatactttaccactgtctgtgtgagattactgcttgagagcaaagaaaagaagatcagggaattcattcaagactttcagaaactcaccgcagctgacgataaaactgctcaggtagaagattttctgcagtttctttatggtgcaatggcccaggatgtcatatggcaaaacgcgagtgaagaacagcttcaagatgcacagctggccattgagcgaagcgtgatgaaccggattttcaagctcgccttctaccctaatcaagatggggacatacttcgcgaccaggttcttcatgaacatatccagagattgtctaaagtagtgactgcaaatcacagagctcttcagataccagaggtttatcttcgagaagcaccatggccatctgcacaatcagaaatcaggacaataagtgcttataaaaccccccgggacaaagtgcagtgcatcctgagaatgtgctctacgattatgaacctcctgagcctggccaatgaggactctgtccctggagcggatgactttgttcctgtgttggtgtttgtgttgataaaggcaaatccaccctgtttgctgtctactgtgcagtatatcagtagcttttatgctagctgtctgtctggagaggagtcctattggtggatgcagttcacagcagcagtagaattcattaaaaccatcgatgaccgaaagtgaccaagaccaaggcccaccaaggcagcagactgttaatcagacaaacagatctctgagaaggtgcatcagctgctttgaaggctgaagattgttttgtatgatactgcacagcatcaggcattttaaagcagatctttactaaacaggttaatgagctaacaagcaggttctctcgtctttgggctctttcctttctgagttgcatattctattttcttgtccccaagtagagactagtactacaaaaagggaccacatttttcaagtatttctaagtataaaaaacaaaacaaaaatctcttaggaaatgtctagacctccattcttggattccctttctttccttttattttaaaaaagaacagtacccctcttttaagatgctgtcttacattaatgagcatctaatggaaagaaggtatgagttgcactgaggattagaatagtggtgcgttagtggcattatctataaatacactcacctaaattgaaagctaagaaggaaatgtaaatataatatatatttatatttgatgtaatatggacatctgcagattctaataaacaaggactattgctgatagtaggctgtgacatactgtcttgtgaaatggtttccttgacaaaatttaagctgagcttaaaagcaaaaaacaaaaagtacacagaaatatttattaaaatgtaatacagtttattgaactttctaggtatggagtttgatggacagggctgcctttaatgagtgtgaaggtcactaagtcacttagacatctcaccgtggaagtttgtgagcctgcattaggagatagactgattaccatacatgacataaaaaggaacagtggatagctcatactttatggtggttcttctcctccgaaataatatactgcagaaatcccagacagagctccttacaaacctttaattgtaatatatttttgatgattattcacattgaatgcacagaccaagaattcagtgaatgtcattttttaaaaaactaatttgtattgtctgctctagtgatacaagttttactagtgataaactattttaatcaaccatactattcttatggaaaaaaatatctattttggcaggtttctgtgcctttatttccctcttctgaaaaaaagtctgtgttttcatagtttggtttgcattgtatatcaataattaatcaggaatgggttttggtgcctgaaaaattggccatggaggcacaccaaagcttcaagcacaagtcttgtacatgggccatcactgtctggtttcacttcgtgtgtttcctaaacacatttagctgcttttttaacaaactcagccccatacttgagtcccttgttgttgggagcatttccaggcatcttttaagggaactgtgacaaacagcctcgggcagatgaacacggaggctctctgttgtctgtctctgagatctttgtgtctgggaatgcctaaagattttatttttttttctttgtttttattttattttattttatttttttgagacagagtctcaccctgttgcccaggctggagtgcaatggtgcgatcttggctcactgcaacctccacctcccagttcaagtgattcccctgcctcagcctcgcgagtagctaggactacaggcgcatgtcaccaagcccggctaatttttgtatttttagtagaaacggggtttcaccatgttggccaggatgatcctcaatctcctgacctcgtgatccacccgccttggcctcccaaagtgcgggattacaagcgtgaaccaccctgcccagccagaaactagattttctttatgcctccaccccttcttattcatttactttacaataccaaaataacaaattgcataggagtgtgggatgtggtttctgccttctagagagagatcagaattaaactagtactatgaaatgtccttttgaatgttaggtcaagaaatccatgtacagagtcgtgcacttcattggctgtaactgtcaaacttgccttgtattagaagttaaatcccatcgtaaatacatcacgaggccagctgtgtgatttctgagacctagatgagagtccatttacttcagcctttgattcagtaaatgttaagcagcagaagacttcgaatggttgaaattcattgttacaggatttaactcataaaccaatgagagattttttttttctctgcaatggttgctaagtctattccatgttaacactgtggaaataaatatgaagatgtggacattgcaaaaaaaaaaaaaaaaaa

SEQ ID NO: 2459 - DNA, 5027 bp, Homo sapiens
aaagcgacaccttctacgctgggtggccagtttccatgtggcttgrtgtgggagcagagacgggacagtggggcctgtccttgttcatccactccctgcctgtgctggttgcagcctcagagcaggcgggagatgttcttggggcttaggctcctggcagagcacatagcaggagtttgtggggtctgaggttcctgtcccagggttccccgattctgtgcctggcctattaatctttctcyggggagcccagtgcccactgccgagcaggctcctgccatcccccatgggcgggtgtgtctgaaggagaatgggatcccggcacggtcttggtttctaacatctcggggtgtgttttggaggcaggcgggagtcatggatgtagatgctgaaagagagaagataacacaggagatcaaggagctggaaaggattttggatcccggctcctcgggctcccacgtggagatctcagaatcaagtctcgagtcagattctgaagcagattcactgccttctgaggacttggatcctgccgatcccccgatctcggaagaagaaaggtggggcgaagccagcaatgacgaggacgatcccaaggataaaaccctccctgaagacccagaaacctgcctgcagctgaacatggtctaccaggaggtcatccaggagaagctggctgaggccaacctgctgctggcccagaaccgggagcagcaggaggaactcatgagggatctggctgggtccaaaggcaccaaggtgaaagacggcaaaagcctgcccccaagcacatacatggggcacttcatgaagccgtatttcaaggacaaggtcacgggcgtggggccacctgccaacgaggacacacgagagaaggctgcccaggggatcaaggctttcgaggagctccttgtgaccaaatggaaaaactgggaaaaggccttgctccgaaagtcagtggtgagtgaccgcctgcagcgattgcttcagcccaagttactgaagctcgagtacttgcaccagaagcagagcaaagtctccagtgagctggagaggcaagccctggagaagcagggcagggaagccgagaaggagatccaggacatcaaccagcttccagaagaggccttgctgggaaacaggctggacagccacgactgggagaagatttccaatattaactttgaaggcagccgcagtgcagaggagatccggaagttctggcagaactcggagcaccccagcatcaacaagcaggagtggagcagggaggaggaggagcggctgcaggcgatcgcggctgcacacggccacctggagtggcagaagattgcagaggagctggggaccagccgcagcgccttccagtgcctgcagaaattccagcagcacaacaaagctctgaaacgcaaggagtggacagaggaggaggaccgcatgctcacgcagctggtgcaggagatgcgcgtcggcagccacatcccctaccgcagaattgtctactatatggaagggagagactccatgcagctgatctaccgatggaccaagagcttggatcctggtctgaagaagggttactgggccccggaggaagatgctaagttgcttcaagctgttgccaaatacggggagcaggattggtttaaaatccgggaagaggtgccaggtaggagcgatgcccagtgccgagatcggtatctcaggagattacatttcagcttgaaaaagggtcggtggaatttaaaagaagaggaacagttaattgaattaatagaaaaatatggtgtcggtcactgggcaaaaatagcttctgagctgccccatcggtctggctcccagtgtctgagcaagtggaagatcatgatggggaagaagcagggtctccggaggcggcggcggagggcccgtcacagcgtccggtggagctctaccagcagcagcggcagcagcagtggcagcagtggagggagcagcagcagcagcagcagcagcagcgaggaggacgagccagagcaggcgcaggccggggagggtgacagagcgctgctgtccccacagtacatggtcccggacatggacctgtgggttcctgccaggcagagcaccagccagccatggagaggaggggcaggggcctggctgggaggccccgctgcctccctcagccctcccaaggggtccagtgccagccagggcggcagcaaggaagcttccaccacagccgcggctcctggagaggagacgagtccggtgcaggtccctgccagggcccacggccctgtcccgaggtctgcccaggcctcccactcagcagacactcgcccggcgggcgcagagaagcaggccctggagggtgggaggcgtctgctgacagtgcctgtggagaccgtgctgagggtgctcagggccaacacggctgctcggagctgcacacagaaagagcagctgaggcagccacccctgcccacctcatccccaggggtcagctctggtgacagcgtggcccgatcccatgtgcagtggctacggcacagagccacccagagtgggcagcggcgctggagacacgctctgcaccggaggctcctgaaccgcaggctgctgctggctgtgaccccttgggtaggggacgttgtcgtgccctgcacacaggcttcccagagacccgccgtagtgcagactcaagcggatggcctcagggagcagctgcagcaggcccgcctggccagcacccctgtgtttaccctgtttacccagctgttccacatcgatactgccggctgcttggaggtcgtccgagagaggaaggccctgccacccaggctgccccaggctggtgctcgggacccaccagttcatcttctgcaggcatcctcaagtgcccagagcaccccaggccacctcttcccaaacgtgccggctcaagaagcctcaaagagtgccagccacaaagggagccgaagactggcgtccagccgggtggagcgcaccctaccccaggcgtccctgctggcttcaaccggcccccggcccaagcccaagactgtgtcggagctgcttcaggagaagcggcttcaggaggcccgtgccagggaggccacccggggcccggtggtgctcccgtcccagctgctggtctcctcgtctgtgatcctccagccccctctaccacacaccccacacggccgcccagccccgggtcccaccgtcttaaatgtaccgctctctgggcctggggcccccgcagcagccaaacctggcacttctggctcctggcaggaggctgggacttcagccaaggacaagagactctccaccatgcaagccctgcccctcgctcctgtcttctcagaggccgaaggcacagcccctgctgcttcccaagcccctgccctgggccccggccagatctctgtgagctgccccgagagtggtctcggacagtctcaggcccccgctgcatcccggaagcagggcctgcctgaggcgccaccctttctccccggagcccccagccccaccccactgcccgtccagcccctcagcctgacgcacataggagggccacatgtggcgaccagtgtccccctgcctgtcacctgggtgctcacagcccaggggcttctccctgttcctgtaccagctgtggtgagccttcccaggccagcagggacccctggccccgcagggctgctggccactctgctgcctcccctgactgagactcgggcggcccagggccccagggccccagcgttgagcagctcttggcagcccccagccaatatgaacagggaaccggagccttcctgcaggacagacaccccagctcctcccacacacgccctctcccaaagtcctgcagaagcggatggcagtgtggcctttgtccctggagaggcccaggtggccagggagatacctgagcccaggacgtcctcccacgctgaccctcctgaagcagaacccccttggtccgggaggctgccagccttcggtggtgtcatcccagcaactgagccaagggggacgccggggtccccctcagggacacaggagcccagggggcctctgggcctggagaagctgcccctgcgccagcctgggcctgagaagggggccctggacctggagaagccgcccctaccccagcctgggcctgagaagggggccctggacctgggcctgctgtcccaggagggcgaggcagccacacagcagtggctggggggccagcggggggtgcgtgtgcctcttctgggcagcagactgccctatcagcccccagccctgtgcagcctgcgagctctgtccggtctcctactccacaagaaggccctggagcacaaggccacctccctggtggtggggggcgaggctgagcggccggccggagcactgcaagcctcactggggctggtgcgggggcagctccaggacaacccggcctacctcctgttgcgggcgcggttcctggcagccttcaccctccctgcgctcctggccaccctggccccccaaggcgtccgcaccaccctctcagtaccttcgagggtgggctctgagagtgaggatgaagacctcctgagtgagctggaacttgcagacagggacgggcagccgggctgcacgacagccacatgccccattcagggagccccagactctggtaaatgctctgcttcctcctgcctggatacttctaatgaccctgacgacctggacgtgctcagaacccggcatgccaggcacacccggaagcggaggcggctggtgtgagcagcaggacaagcactttctcagaagcccgtggccctgctgacgagagacagcccacccccagcctgcaagagaggcagccagaggccaggtatctgctggccgctgactgaccaggtccgcagtgaacagaggcgggcctgccgactgactgtgtggcatggagcatggctgttccccaagtgcacacctgaacacttggaggaataaagttctgtttttaattgtggaaaaaaaaaaaa

SEQ ID NO: 2460 - DNA, 3749 bp, Homo sapiens
gcggtgcccacaggacctcagggcgagtgcgggctgccccgcgcggcgcccgcaggaccccggcggctacccatgccgaggtgagtccgcgggagccgccgccgccgccgtcccgtcccagctgccgccccgcgcggccccgccgccggccaggatgctggaggaagcgggcgaggtgctggagaacatgctgaaggcgtcttgtctgccgctcggcttcatcgtcttcctgcccgctgtgctgctgctggtggcgccgccgctgcctgccgccgacgccgcgcacgagttcaccgtgtaccgcatgcagcagtacgacctgcagggccagccctacggcacacggaatgcagtgctgaacacggaggcgcgcacgatggcggcggaggtgctgagccgccgctgcgtgctcatgcggctactggacttctcctacgagcagtaccagaaggccctgcggcagtcggcgggcgccgtggtcatcatcctgcccagggccatggccgccgtgccccaggacgtcgtccggcaattcatggagatcgagccggagatgctggccatggagaccgccgtccccgtgtactttgccgtggaggacgaggccctgctgtctatctacaagcagacccaggctgcctccgcctcccagggctccgcctctgctgctgaagtactgctgcgcacggccactgccaacggcttccagatggtcaccagcggggtacagagcaaggccgtgagtgactggctgattgccagcgtggaggggcggctgacggggctgggcggagaggaccttcccaccatcgtcatcgtggcccactacgacgcctttggagtggccccctggctgtcgctgggcgcggactccaacgggagcggcgtctctgtgctgctggagctggcacgcctcttctcccggctctacacctacaagcgcacgcacgccgcctacaacctcctgttctttgcgtctggaggaggcaagtttaactaccagggaaccaagcgctggctggaagacaacctggaccacacagactccagcctgcttcaggacaatgtggccttcgtgctgtgcctggacaccgtgggccggggcagcagcctgcacctgcacgtgtccaagccgcctcgggagggcaccctgcagcacgccttcctgcgggagctggagacggtggccgcgcaccagttccctgaggtacggttctccatggtgcacaagcggatcaacctggcggaggacgtgctggcctgggagcacgagcgcttcgccatccgccgactgcccgccttcacgctgtcccacctggagagccaccgtgacggccagcgcagcagcatcatggacgtgcggtcccgggtggattctaagaccctgacccgtaacacgaggatcattgcagaggccctgactcgagtcatctacaacctgacagagaaggggacacccccagacatgccggtgttcacagagcagatgcagatccagcaggagcagctggactcggtgatggactggctcaccaaccagccgcgggccgcgcagctggtggacaaggacagcaccttcctcagcacgctggagcaccacctgagccgctacctgaaggacgtgaagcagcaccacgtcaaggctgacaagcgggacccagagtttgtcttctacgaccagctgaagcaagtgatgaatgcgtacagagtcaagccggccgtctttgacctgctcctggctgttggcattgctgcctacctcggcatggcctacgtggctgtccagcacttcagcctcctctacaagaccgtccagaggctgctcgtgaaggccaagacacagtgacacagccacccccacagccggagcccccgccgctccacagtccctggggccgagcacgagtgagtggacactgccccgccgcgggcggccctgcagggacaggggccctctccctccccggcggtggttggaacactgaattacagagcttttttctgttgctctccgagactggggggggattgtttcttcttttccttgtctttgaacttccttggaggagagcttgggagacgtcccggggccaggctacggacttgcggacgagccccccagtcctgggagccggccgccctcggtctggtgtaagcacacatgcacgattaaagaggagacgccgggaccccctgcccgatcgcgcgcggcctccgcccaccgcctcctgccgcaaggggcctggactgcaggcctgacctgctccctgctccgtgtctgtcctaggacgtcccctcccgctccccgatggtggcgtggacatggttatttatctctgctccttcttgcctggaggagggcagtgccagccctggggttctgggattccagccctcctggagccttttgttccccatgtggtctcagtgacccgtccccctgacagtgggctcggggagctgcatcacccagccttccccttctccgactgcagggtctgatgtcatcattgacagcctttgcttcgtgggggcctggcagggcccctgcctccccgacccccgacccactgcaaatccccgttcccctgcactcctcttctcccagcccatccctccggcccctgtgcctctgcggccccagcccagctcccagggccgtcacctgcttggccctggcccagctccctgccctgagtcctgagccagtgcctggtgtttcctgggctcggtactgggcccccaggccatccaggctttgccacggccagttggtcctccctggggaactgggtgcgggtggagtactgggaggcaggaggtggcccggggaggccttgtggctcctcccctcgctcctcgccctgggcctcagcttcctcatcaatagaaaggatgtgttcggggtgggggcgtcaggtgagaacgtttgctgggaaggagaggacttggggcatggcctctggggccacccttcctggaactcagagaggaaggtccgggccctcgggaagccttggacagaaccctccaccccgcagaccaggcgtcgtgtgtgtgtgggagagaaggaggcccgtgttgagctcagggagaccccggtgtgtccgttctttagcaatataacctacccagtgcgtgccgagcaggcttggtggggaagggacttgagctgggcaagtcctggcctggcacccgcagccgtctcccttccgtggcccagggaggtgtttgctgtccgaaggacctgggccggcccatgggagcctggggttctgtccagataggaccagggggtctcactttggccaccagttcttcggccagcacctctgccctccagaacctgcagcctggaggggtgaggggacaaccacccctctttcctccaggttggcaggggaccctcttctcccgtctgccctgcgggttgcccgcctcctccagagacttgcccaagggcccatcaccactggcctctgggcacttgtgctgagactctgggacccaggcagctgccaccttgtcaccatgagagaatttggggagtgcttgcatgctagccagcaggctcctgtctgggtgccacggggccagcattttggagggagcttccttccttccttcctggacaggtcgtcatgatggatgcactgactgaccgtctggggctcaggctggtgtgggatgcagccggccgatgagaaaataaagccatattgaatgatcgccaaaaaaaaaaaaaaaaa

SEQ ID NO: 2461 - DNA, 3651 bp, Homo sapiens
tgtgagtgtgtgcgtgtgagagtgcgagtgtctgtgcgcgagtgagtgagcggcgggcgggcgcgagtgtggccgccgcggagcgcgagcaggacccggcgggcgcgctccccagcctccgtctccccgccggaaccatgtcgggcaggtcggttcgagccgagacgaggagccgggccaaagatgatatcaagagggtcatggcggcgatcgagaaagtgcgcaaatgggagaagaaatgggtgaccgttggtgacacatccctacgaatctacaaatgggtccctgtgacggagcccaaggttgatgacaaaaacaagaataagaaaaaaggcaaggacgagaagtgtggctcagaggtgaccactccggagaacagttcctccccagggatgatggacatgcatgacgataacagcaaccagagctccatcgcagatgcctcccccatcaaacaggagaacagcagcaactccagccccgctccagagcccaactcggctgtgcccagcgacggcaccgaggccaaggtggatgaggcccaggctgatgggaaggagcacccaggagctgaagatgcttctgatgagcagaattcacagtcctcgatggaacattcgatgaacagctcagagaaagtagatcggcagccgtctggagactcgggtctggccgcagagacgtctgcaatctctcaggatctggaaggagtgccaccctctaaaaagatgaaactggaggcctctcaacaaaactccgaagagatgtagacgatgctttaaagcctccgatccatgttccatggaaggtacatcagcaattaattctagagcaactttgccccagcgattcctcttgggtgcgaacagaactactaacgtttcaagtttaccaagtgcaaatccaagaagacccagaacggcgtcacttctcagacactgaagaactctgctgtgaagcaaaacactcaaacctttaagggactgtccttggggaggcaggcggggctgacagctcaggagtgtctgcacactgtctcggaagccaggattccatttgtgttgctgctgtattttccccccacttctctatgtaacgatataagctatcggagggtggtaccgatcaggaacgctttttggcggggctttccactgttcaaccgattccttccgctttctttttttgtgccttgtgcccttgaggtgacctctggcatgtatcctggtggttcttacatccccctctgcaaagtgccctcttggtttggttcgggcggcggctgccaccctactcaccgctctcctccctgccccaggacttcatcggagcaggcagggtggagcgaaggagctccttagcccacctggtttgcaggtgcagggggaccttaggcacgccccaagcaccaggcaccagggcccaaggacgcgcaggtgttggggcacagtccccaagggctcggccccttggatcaggctgggcactcgctgtgctctcccctccttggggcgtttaggactgggcgtctccaagcccaccatggcccagatggacgtgcaaagcccttggaattttctggcacttcctctctattgcccccaccaccaccacccccatcactgctttctcccagacctccgaatacgaaatggcttctctggctgactgcaaggctgtctccttaaggcactgagtgggcgggggaggctgggagccggcggcaggattagctggtgctgaactttctctcataggacgtcgcttggatttcaaatccacggtcacctgctgccctttgcctcccccgacgccccagcctgtgccccggagaggcaggatcgcagtggtcagaatccacgtgctttcctattctcaggctgttctgactctgagccaacagctggaccgtgtctcatccccagaacatgccgtctgtccccaccggggagtgggccttgatggccgggcctcgaaggccacaaacaaggcgtcgaggaattggaaagatttgcacaccctccagaaaggagagacgcaatctcccctccctcccatcccccaccttcgctggaacagcttcctctcactgaacggagacgcccccttggacgaactgcctaatcgtttggttctgaggcctggtttgctcttaattaatatatgaactcctcagaccttaaaccttttcctaagctttctttactgcactggagttctgactccctttgagttgtgtgttactgggggtggggtggggtcatgggttttgttgtttttgggggctaattggtgcatattcaggtaccacctttgacgtgtggctctttctcctgaccatcatgggaagtgtctgctggattccattttctaagagtttctgagggtgaggctcttatttttttttttaagggatcctgtctatttcctgcacttcgagaagaatcaaaatgttcctgaatttcaaatacctcatgcaaaatgtctcctgaaataagggaaaaaaaaaaaaccacaactttgaaaatcttaatgttgaagttagcaatgccgaaaggtttctgtcttaaaaaaaaaaatccttgtacttatcaattttgccccttaggcagtcagttttgttgagaactgtgtcctgcatcctggcgcagaacctacctgatgcggttcctctccacgcatctcgaggcggcgttacctccagattccgtagagttagagtcacatttttctttgcagcgaaactccatcttggtgagagatgaatttggatatttatttccttctctgtttttgggaaatgagaggctacaaccaagacagctgaaggagaatgaaacacacacatccacagaaacagagaggcgtaggtggccctgccgttgaccgcagcctctctggacaggcaaggggagttggcgcaggtgaggactcagacgacgtccaccgtcccaaggctgtcactagtatttctctgaagtgcctgaaggtaggaatgggccggcgattgggaccagctgggccccaccacggccacgccaggcaaagcgccagcagccctgcactccacgctggccaagaaggccttccacgcagaatgacaagactgcaaaaatccgatgtgcttccttccctggcgcagtcgctcctcgagccgctgccccccacccaccctgcacccctcgccctccccccaccacagaatctaagacctttcagcttcgagccagggggcgggggatcccgagcaaaagccttccgtggacatcaggccccgtggcctcaagggctcccagggcaaacctaattccccccaaaacgtgaagtcggggaagctgcggctacacattccacaaagtgctggcacttacacccacaacccggaaggctgtggaccgattcctctagggtggtgacctcccattagcaaacggtgtcatggtttggaatgttcattatcgccaagaacctggttagaggcataaagaccttttttcaccgttacctaattttttcccctttcaagaattttttttttttttggtgtgttgtacagcagtataatttttcacttatttattccatcagtagatatggtttgtacaatgtacaattgtttcatttcagaaaataaaaatttcaaatcatgaa

SEQ ID NO: 2462 - DNA, 3714 bp, Homo sapiens
tgtgagtgtgtgcgtgtgagagtgcgagtgtctgtgcgcgagtgagtgagcggcgggcgggcgcgagtgtggccgccgcggagcgcgagcaggacccggcgggcgcgctccccagcctccgtctccccgccggaaccatgtcgggcaggtcggttcgagccgagacgaggagccgggccaaagatgatatcaagagggtcatggcggcgatcgagaaagtgcgcaaatgggagaagaaatgggtgaccgttggtgacacatccctacgaatctacaaatgggtccctgtgacggagcccaaggttgatgacaaaaacaagaataagaaaaaaggcaaggacgagaagtgtggctcagaggtgaccactccggagaacagttcctccccagggatgatggacatgcatgacgataacagcaaccagagctccatcgcagatgcctcccccatcaaacaggagaacagcagcaactccagccccgctccagagcccaactcggctgtgcccagcgacggcaccgaggccaaggtggatgaggcccaggctgatgggaaggagcacccaggagctgaagatgcttctgatgagcagaattcacagtcctcgatggaacattcgatgaacagctcagagaaagtagatcggcagccgtctggagactcgggtctggccgcagagacgtctgcaatctctcaggtacctcgctcgaggtctcagaggggcagccagatcggccgggagcccattgggttgtcgggggatctggaaggagtgccaccctctaaaaagatgaaactggaggcctctcaacaaaactccgaagagatgtagacgatgctttaaagcctccgatccatgttccatggaaggtacatcagcaattaattctagagcaactttgccccagcgattcctcttgggtgcgaacagaactactaacgtttcaagtttaccaagtgcaaatccaagaagacccagaacggcgtcacttctcagacactgaagaactctgctgtgaagcaaaacactcaaacctttaagggactgtccttggggaggcaggcggggctgacagctcaggagtgtctgcacactgtctcggaagccaggattccatttgtgttgctgctgtattttccccccacttctctatgtaacgatataagctatcggagggtggtaccgatcaggaacgctttttggcggggctttccactgttcaaccgattccttccgctttctttttttgtgccttgtgcccttgaggtgacctctggcatgtatcctggtggttcttacatccccctctgcaaagtgccctcttggtttggttcgggcggcggctgccaccctactcaccgctctcctccctgccccaggacttcatcggagcaggcagggtggagcgaaggagctccttagcccacctggtttgcaggtgcagggggaccttaggcacgccccaagcaccaggcaccagggcccaaggacgcgcaggtgttggggcacagtccccaagggctcggccccttggatcaggctgggcactcgctgtgctctcccctccttggggcgtttaggactgggcgtctccaagcccaccatggcccagatggacgtgcaaagcccttggaattttctggcacttcctctctattgcccccaccaccaccacccccatcactgctttctcccagacctccgaatacgaaatggcttctctggctgactgcaaggctgtctccttaaggcactgagtgggcgggggaggctgggagccggcggcaggattagctggtgctgaactttctctcataggacgtcgcttggatttcaaatccacggtcacctgctgccctttgcctcccccgacgccccagcctgtgccccggagaggcaggatcgcagtggtcagaatccacgtgctttcctattctcaggctgttctgactctgagccaacagctggaccgtgtctcatccccagaacatgccgtctgtccccaccggggagtgggccttgatggccgggcctcgaaggccacaaacaaggcgtcgaggaattggaaagatttgcacaccctccagaaaggagagacgcaatctcccctccctcccatcccccaccttcgctggaacagcttcctctcactgaacggagacgcccccttggacgaactgcctaatcgtttggttctgaggcctggtttgctcttaattaatatatgaactcctcagaccttaaaccttttcctaagctttctttactgcactggagttctgactccctttgagttgtgtgttactgggggtggggtggggtcatgggttttgttgtttttgggggctaattggtgcatattcaggtaccacctttgacgtgtggctctttctcctgaccatcatgggaagtgtctgctggattccattttctaagagtttctgagggtgaggctcttatttttttttttaagggatcctgtctatttcctgcacttcgagaagaatcaaaatgttcctgaatttcaaatacctcatgcaaaatgtctcctgaaataagggaaaaaaaaaaaaccacaactttgaaaatcttaatgttgaagttagcaatgccgaaaggtttctgtcttaaaaaaaaaaatccttgtacttatcaattttgccccttaggcagtcagttttgttgagaactgtgtcctgcatcctggcgcagaacctacctgatgcggttcctctccacgcatctcgaggcggcgttacctccagattccgtagagttagagtcacatttttctttgcagcgaaactccatcttggtgagagatgaatttggatatttatttccttctctgtttttgggaaatgagaggctacaaccaagacagctgaaggagaatgaaacacacacatccacagaaacagagaggcgtaggtggccctgccgttgaccgcagcctctctggacaggcaaggggagttggcgcaggtgaggactcagacgacgtccaccgtcccaaggctgtcactagtatttctctgaagtgcctgaaggtaggaatgggccggcgattgggaccagctgggccccaccacggccacgccaggcaaagcgccagcagccctgcactccacgctggccaagaaggccttccacgcagaatgacaagactgcaaaaatccgatgtgcttccttccctggcgcagtcgctcctcgagccgctgccccccacccaccctgcacccctcgccctccccccaccacagaatctaagacctttcagcttcgagccagggggcgggggatcccgagcaaaagccttccgtggacatcaggccccgtggcctcaagggctcccagggcaaacctaattccccccaaaacgtgaagtcggggaagctgcggctacacattccacaaagtgctggcacttacacccacaacccggaaggctgtggaccgattcctctagggtggtgacctcccattagcaaacggtgtcatggtttggaatgttcattatcgccaagaacctggttagaggcataaagaccttttttcaccgttacctaattttttcccctttcaagaattttttttttttttggtgtgttgtacagcagtataatttttcacttatttattccatcagtagatatggtttgtacaatgtacaattgtttcatttcagaaaataaaaatttcaaatcatgaa

SEQ ID NO: 2463 - DNA, 2175 bp, Homo sapiens
atatacttgcgcgccgacgccgccgctcgcttgtgaaactggaaggctgccatggctagcccagccgcctcctcggtgcgaccaccgaggcccaagaaagagccgcagacgctcgtcatccccaagaatgcggcggaggagcagaagctcaagctggagcggctcatgaagaacccggacaaagcagttccaattccagagaaaatgagtgaatgggcacctcgacctcccccagaatttgtccgagatgtcatgggttcaagtgctggggccggcagtggagagttccacgtgtacagacatctgcgccggagagaatatcagcgacaggactacatggatgccatggctgagaagcaaaaattggatgcagagtttcagaaaagactggaaaagaataaaattgctgcagaggagcagaccgcaaagcgccggaagaagcgccagaagttaaaagagaagaaattactggcaaagaagatgaaacttgaacagaagaaacaagaaggacccggtcagcccaaggagcaggggtccagcagctctgcggaggcatctggaacagaggaggaggaggaagtgcccagtttcaccatggggcgatgacaatgtttgccacagcctctgcctggaacctggctcgtgctgtgaccagaagggaaaggcggctgtttggctctttctcccccgcaaggacccgctgacccgctggatggagagcaaaggagacccctcccgagccgctcacagtcctgtatttggcaggtttgggagcctgaggggccatctccctgacactcagaggcactgccttgcagacaccatccgtgctcctggtaaagggggacagagagcctcaccttgccacatatttgaacagtgatgagtttggggctggtttctgggaagggaacgtttatttagtaaagagcagaacacccttgcgttttgttgggacatgtggaccgtgagtcgcaaacactctggagaaggctgagatgccaccattcccacggggactgaagacacattacgtggacctggtcccaggctcagtgaggagatggcctcagctgtggggctggtccatgttgcccactcactccagtgggaagtggggaccacgccatagagggtctgctcccactgcagctcccggtgctctcgtgttctgggaaggcctgggtgtgtgcacaaggaggcccgggccagggacttcaccaggggctgggtcacaagggcacagggtgtgtggaaagcgctgtgggggaagagccggtcaccggagagtgagcaggcggagactccaagctgggctgagccagagcagaaggcgagggattcccagccggacgggggttctctcaccaacagctgtgatttcatcccgaagtggaagggggtctaaacagaacaggctgagagaggcgggactgggtcaagtgggtggagctcctccttgcatgactgcaactgtcggggctttccgccggctcacagcagttggggccagcggggagaagagaggcggaactgctgtgtcctcacgtggcgcagcctcaaactggcatccaggcactgggcccgtgcagagaaggcacctgcagagagcagggcagcccggcgcaggggcatgcgcctagaatcccagctactcggaaggccaaggcaggaggaccgcttgagtccagggattcaaggccaacctgggcaatagagcgagaccctgtctcttaaaaaacgatgatgatgaacacagaggacggggcactgtgctgggagccagggggcctgggaggagccgagaccagccttttacctcggggttttgaggccaacagggacgacagagacagtttctagttagagccttggctccatttttggatgatttagccccgagttcctgagtctattttatgccccttacgtactttgatagaactaaggaaatagtggttttgagtgaagggaaaggaaacccagaaacattttacgttgcttttacttctgtagtgtagattgccccggcccctctctgagccctgtagcatctgtgatagcttctgtcccttcatcggttcatgtcacagggattttctttcccaggaagcggacacggagagtcagccctaataaatgagcacatgccctggctgtacattttgaaacctg

SEQ ID NO: 2464 - DNA, 3300 bp, Homo sapiens
atggcagtagccccgcgactgtttggggggctctgcttccgtttccgggaccagaatccggaagtggctgttgaggggcgtcttccaatctcgcacagctgcgttggctgtagaagagaacggacggcgatggcgacggtcgcagcaaatccagctgctgctgcggcggctgtggcggcggcagcggcggtgactgaggatagagagccacagcacgaggagctgccaggcctggacagccagtggcgccagatagaaaacggcgagagtgggcgagaacgtccactgcgggccggcgaaagctggttccttgtggagaagcactggtataagcagtgggaggcatacgtgcagggaggggaccaggactccagcaccttccctggctgcatcaacaatgccacactctttcaagatgagataaactggcgcctcaaggagggactggtggaaggcgaggattatgtgctgctcccagcagctgcttggcattacctggtcagctggtatggtctagagcatggccagccacccattgaacgcaaggtcatagagctgcccaacatccagaaggtcgaagtgtacccagtagaactgctgcttgtccggcacaatgatttgggcaaatctcacactgttcagttcagccataccgattctattggcctagtattgcgcacagctcgggagcggtttctggtggagccccaggaagacactcggctttgggccaagaactcagaaggctctttggataggttgtatgacacacacatcacggttctcgatgcggcccttgagactgggcagttgatcatcatggagacccgcaagaaagatggcacttggcccagcgcacagctgcatgtcatgaacaacaacatgtcggaagaggatgaggacttcaagggtcagccaggcatctgtggcctcaccaatctgggcaacacgtgcttcatgaactcggccctgcagtgcctcagcaatgtgccacagctcaccgagtacttcctcaacaactgctacctggaggagctcaacttccgcaacccactgggcatgaagggtgagatcgcagaggcctatgcagacctggtgaagcaggcgtggtctggccaccaccgctccattgtgccacatgtgttcaagaacaaggttggccattttgcatcccaatttctgggctaccagcagcatgactctcaggagctgctgtcattcctcctggacgggctgcatgaggaccttaatcgggtgaagaagaaggagtatgtggagctgtgcgatgctgctgggcgaccggatcaggaggtggcacaggaggcatggcaaaaccacaaacggcggaacgattctgtgatcgtggacactttccacggcctcttcaagtccacgctggtgtgccccgattgtggcaatgtatctgtgaccttcgaccccttctgctacctcagtgttccactgcctatcagccacaagagggtcttggaggtcttctttatccccatggatccgcgccgcaagccagagcagcaccggctcgtggtccccaagaaaggcaagatctcggatctatgtgtggctctgtccaaacacacgggcatctcgccagagaggatgatggtggctgatgtcttcagtcaccgcttctataagctctatcagctagaggagcctctgagcagcatcttggaccgtgatgatatcttcgtctatgaggtgtcaggtcgcattgaggccattgagggctcaagagaggacatcgtggttcctgtctacctgcgggagcgcacccctgcccgtgactacaacaactcctactacggcctgatgctttttggacaccccctcctggtatcagtgccccgggaccgcttcacctgggagggcctgtataacgtcctgatgtaccggctctcacgctacgtgaccaaacccaactcagatgatgaggacgatggggatgagaaagaagatgacgaggaggataaagatgacgtccctgggccctcaactgggggcagcctccgagaccctgagccagagcaggctgggcccagctctggagtcacgaacaggtgcccgttcctcctggacaattgccttggcacatctcagtggcccccaaggcgacgacgcaagcagctgttcaccctgcagacggtgaactccaatgggaccagcgaccgcacaacctcccctgaagaagtccatgcccagccgtacattgctatcgactgggagccagagatgaagaagcgttactatgacgaggtagaggctgagggctacgtgaagcatgactgcgtcgggtacgtgatgaagaaggctcccgtgcggctgcaggagtgcattgagctcttcaccactgtggagaccctggagaaggaaaacccctggtactgcccttcctgcaagcagcaccagctggcaaccaagaagctggacctgtggatgctgccggagattctcatcatccacctgaaacgcttttcctacaccaagttctcccgagagaagctggacaccctcgtggagtttcctatccgggacctggacttctctgagtttgtcatccagccacagaatgagtcgaatccggagctgtacaaatatgacctcatcgcggtttccaaccattatgggggcatgcgtgatggacactacacaacatttgcctgcaacaaggacagcggccagtggcactactttgatgacaacagcgtctcccctgtcaatgagaatcagatcgagtccaaggcagcctatgtcctcttctaccaacgccaggacgtggcgcgacgcctgctgtccccggccggctcatctggcgccccagcctcccctgcctgcagctccccacccagctctgagttcatggatgttaattgagagccctgggtcctgccacagaaaaaaaaaaaaaaaagccctctctgcaatctcgcttctcgtgtccgccccgcttctcttattcgtgttaggtgcccccgccaggcattgcaggcttagtcgtggctactgttctcctgtgccgctgcatcgctctctcccgggaaagaacaggtcgtgtctcctcctagcagtgcgcgccccgcctgtgtttgcccttccagcagtgaccctcccttctagtctttatttatggtcgtgcccttccctctcctcagcccagagtgttctgcgtgggtggtgatgggggttcacctgaacacagagtgtattttcttattgaggccctgtaccttctgctgtgtgtgtgtatatataaagcaccagtctgctccccaaaaaaaaaaa

SEQ ID NO: 2465 - DNA, 2485 bp, Homo sapiens
agtaacgtcatcagacgtgtgtgtccctgcggcgctaagaaggggagactgaggctgaggctggggaacatcgggcagcatgagcggctgcgggctcttcctgcgcaccacggctgcggctcgtgcctgccggggtctggtggtctctaccgcgaaccggcggctactgcgcaccagcccgcctgtacgagctttcgccaaagagcttttcctaggcaaaatcaagaagaaagaagttttcccatttccagaagttagccaagatgaacttaatgaaatcaatcagttcttgggacccgtggaaaaattcttcactgaagaggtggactcccgaaaaattgaccaggaagggaaaatcccagatgaaactttggagaaattgaagagcctagggctttttgggctgcaagtcccagaagaatatggtggcctgggcttctccaacaccatgtactcacgactaggggagatcatcagcatggatgggtccatcactgtgaccctggcagcgcaccaggctattggcctcaaggggatcatcttggctggcactgaggagcagaaagccaaatacttgcctaaactggcgtccggggagcacattgcagccttctgcctcacggagccagccagtgggagcgatgcagcctcaatccggagcagagccacactaagtgaagacaagaagcactacatcctcaatggctccaaggtctggattactaatggaggactggccaatatttttactgtgtttgcaaagactgaggtcgttgattctgatggatcagtgaaagacaaaatcacagcattcatagtagaaagagactttggtggagtcactaatgggaaacccgaagataaattaggcattcggggctccaacacttgtgaagtccattttgaaaacaccaagatacctgtggaaaacatccttggagaggtcggagatgggtttaaggtggccatgaacatcctcaacagcggccggttcagcatgggcagcgtcgtggctgggctgctcaagagattgattgaaatgactgctgagtacgcctgcacaaggaaacagtttaacaagaggctcagtgaatttggattgattcaggagaaatttgcactgatggctcagaaggcttacgtcatggagagtatgacctacctcacagcagggatgctggaccaacctggctttcccgactgctccatcgaggcagccatggtgaaggtgttcagctccgaggccgcctggcagtgtgtgagtgaggcgctgcagatcctcgggggcttgggctacacaagggactatccgtacgagcgcatactgcgtgacacccgcatcctcctcatcttcgagggaaccaatgagattctccggatgtacatcgccctgacgggtctgcagcatgccggccgcatcctgactaccaggatccatgagcttaaacaggccaaagtgagcacagtcatggataccgttggccggaggcttcgggactccctgggccgaactgtggacctggggctgacaggcaaccatggagttgtgcaccctagtcttgcggacagtgccaacaagtttgaggagaacacctactgcttcggccggaccgtggagacactgctgctccgctttggcaagaccatcatggaggagcagctggtactgaagcgggtggccaacatcctcatcaacctgtatggcatgacggccgtgctgtcgcgggccagccgctccatccgcattgggctccgcaaccacgaccacgaggttctcttggccaacaccttctgcgtggaagcttacttgcagaatctcttcagcctctctcagctggacaagtatgctccagaaaacctagatgagcagattaagaaagtgtcccagcagatccttgagaagcgagcctatatctgtgcccaccctctggacaggacatgctgaggcaggggacagtgtcccctgctaccgcccgcccctacccatggcccgttgctggatgactgttactcttttttcagaaggtgttgggattatcacaggttaagccttttgttccccgtctgcacctgaagggttgtcgcctggcctgggagagcctcttccaggttttgacctgcaggcagtgctctctaacaggaccatcacagcttctgaactgagccggagagagagaatggaattgctgacccctggaactggcgggtattctggtcattgaggagacaccatagtggaaactggggcttatgctgctgcctccagggtgtgaggtgggtggggacctgtgtcaggtgtggatagccatttctgctcaaccacacattctctaagaaacagcttgaaagctctgtctgggtcattcatttaaactagaagcagaggcacttaaaacatgtaccaggaaccatttaacaaagaatataaaatgtcacaatctgtgtactgttaaaaaaaaaaaaaaaaaaaaaaaaaaaaaaaaaa

SEQ ID NO: 2466 - DNA, 2344 bp, Homo sapiens
agcggagtctcgtccggagactggcagcggcggcggcggcggcggccggagctcgagccccagcggctgagggcgggcgggcgggcgcgggggagggaggggggccggtccgcgacgactccccggacggcgtttctcctccgagcggcgccggtttcggcttggggggggcggggtacagcccatccatgaccatgggcgacaagaagagcccgaccaggccaaaaagacaagcgaaacctgccacagacgaagggttttgggattgtagcgtctgcaccttcagaaacagtgctgaagcctttaaatgcagcatctgcgatgtgaggaaaggcacctccaccagaaaacctcggatcaattctcagctggtggcacaacaagtggcacaacagtatgccaccccaccaccccctaaaaaggagaagaaggagaaagttgaaaagcaggacaaagagaaacctgagaaagacaaggaaattagtcctagtgttaccaagaaaaataccaacaagaaaaccaaaccaaagtctgacattctgaaagatcctcctagtgaagcaaacagcatacagtctgcaaatgctacaacaaagaccagcgaaacaaatcacacctcaaggccccggctgaaaaacgtggacaggagcactgcacagcagttggcagtaactgtgggcaacgtcaccgtcattatcacagactttaaggaaaagactcgctcctcatcgacatcctcatccacagtgacctccagtgcagggtcagaacagcagaaccagagcagctcggggtcagagagcacagacaagggctcctcccgttcctccacgccaaagggcgacatgtcagcagtcaatgatgaatctttctgaaattgcacatggaattgtgaaaactatgaatcagggtatgaaattcaaaacctccacctgcccatgctgcttgcatccctggagaatcttctgtggacatcgacctcttagtgatgctgccaggataatttctgcttgccatgggcatctggccaccaaggaatttcgcaccctgacgattactcttgacacttttatgtattccattgttttatatgattttcctaacaatcatttataattggatgtgctcctgaatctactttttataaaaaaaaaaaaaaaatctgctgtgcacaattttccatgtacattacaactggttttttgtttttgttttgttgccggtggggagggctgggagggggagggaacttttatttattgtgttcacaaactccatcctttcagcatatccttttaagtttagttctttcttccagttatactatgtactatcagttttgatataactatatatatataaatataaaattatatataaagggttatttgaaaccaatccatggcaacgctggtgcttgatacactgtgaagtgaatacaacattgaacagttacagatctgggacagtcccttctatgaaagtgctgaaatttaattaaaatcagtcttacatgaagtatgttccaatccatgtgggaacttgactctctcatctgtctaaagagtactggacgatataaaaatatatattttttaaacaatgtgatctcaaatttaaagactgctccagatagcctgcatttgcaatggaataactgacaaatcacaagtggtttagttgggcagggctttgatcattcaaaagtaactaaagtagctccagaatgccaagtattcgtgtaaattacggttacatgttatcatttgctgttcttacataagcactcatgaaaatatggtattctgtaacttgaattccatccattttccagacgtctactcatgtctgaggtaaatctagaaattgtcttagttttaggattgaaacagtctataaactgtatttttggtccatccaggaagctagtcccttgtttctcctttctacatgacattgcagtggtggtttctgtaattaaaatttgtttgcctcatgtccctttgtctgataaaccttcactctaccgattcagttgtgagcattctttttttccttctcaaaacctactatgatttgttttactgaacaaaggttatcaaccacacatccagtcctgacatggagcttttcagtgtttggagacatttctcaatcccctgctgtggtaggaactccagtggtgaacggcttgcgcgcctgcagccagagttgcagggaaagctcgtacttactgcgagcagcatgtaatcttttttcttcctggacataaagatagcttgagtaaactgttctatttcattctcttcactctttttactgtcttgcaaaaaaaaaaaaaaaa

SEQ ID NO: 2467 - DNA, 2245 bp, Homo sapiens
cccgcggctgccgccgccatttcgggcgctgctgtgaagctgaaaccggagccggtccgctgggcggcgggcgccgggggccggaggggcgcgcgcggcggcggcaccccagcgtttaggcgcggaggcagccatggcgggcaacttcgactcggaggagcggagtagctggtactgggggaggttgagtcggcaggaggcggtggcgctgctgcagggccagcggcacggggtgttcctggtgcgggactcgagcaccagccccggggactatgtgctcagcgtctcagagaactcgcgcgtctcccactacatcatcaacagcagcggcccgcgcccgccggtgccaccgtcgcccgcccagcctccgcccggggtgagcccctccagactccgaataggagatcaagagtttgattcattgcctgctttactggaattctacaaaatacactatttggacactacaacgttgatagaaccagtttccagatccaggcagggtagtggagtgattctcaggcaggaggaggcggagtatgtgcgagccctctttgactttaatgggaatgatgaggaagatcttccctttaagaaaggagacatcttgagaatccgggacaagcctgaagagcagtggtggaatgcggaggacagcgaaggcaagagagggatgattccagtcccttacgtcgagaagtatagacctgcctccgcctcagtatcggctctgattggaggtcggtgagctggtaaaggttacgaagattaatgtgagtggtcagtgggaaggggagtgtaatggcaaacgaggtcacttcccattcacacatgtccgtctgctggatcaacagaatcccgatgaggacttcagctgagtatagttcaacagttttgctgacagatgggaacaatcttttttttttttttccaactgccatctatacaattttcttacagatgtcaaaagcagtctagtttatataagcattctgttacctgtgatattttttagactgaactgctccattcctagtcttaattaccatattcagggtacgaactggagggcttgtgtgttagcttctgaattggcaattggaggcggtagtggtcgtgcctgtgtgtatcagaagggataggtatcttgcctcctttctctcaggcagtgcaaatcaccctgtggaaaaccgatggacaggaaggagtgttacacactgcttaccctgatttattcagtggttttgttttcattctggaaccatactatcaaatggcgacagactgttccgttccacccccgtgaagtaatcatgcaccgtgtgaatagtatcaagcaggattgctttcattgtatggagcatgaccagcgtgtgactcattctgacatttcagatcctaagaattctaagaacactactagaagcatttgttccctcctagtcaatgcttcatactttttcttgggattcttttagcccttgacattcttgtcccccaaacctgtaagtaggtgaattcctaagataagtgtgtattttcattccaggtgaaaagcaggatgtaccgagcactttattcagtgcatagctttaagccagtgttggattcactaagtggacagccagtctcccagctctctgccttccccaaaagggtcgtagtaggtcacccttctacagcagctaactagagtcctaactaatgggatccagcagggccatttctccagagggccagtatcctattaggagactcttggaattcttaggttctactcaagagtggaaggaccaatcacctctgatattctgtggaaggttttggggtcaaattctgccctctgcattctgtgcaacttgtataaaagtcaagttagtattacatgaatttggggtagggttagtgctttgaaaaaatgttgaaccggctgggcgcggtggctcacgtctgtaatcccagcactttgggaggccgaggcgggtggatcatgaggtcaggagttcgagaccagcctggccaacatagtgaaaccccatctctgctaaagatataaaaaattagcccggcgtggtggtgcacgcctgtaatcccagctactcgggaggctgaggcaggagaattgcttcaacctgggaggtggaggctgcagtgagccgagatcgcaccactgcgttccagcctgagcgacagggcaagactcagtctcaaaaaaaaaaaaaaggaaaaaaaaaagaaaaaaaaa

SEQ ID NO: 2468 - DNA, 2415 bp, Homo sapiens
cccgcggctgccgccgccatttcgggcgctgctgtgaagctgaaaccggagccggtccgctgggcggcgggcgccgggggccggaggggcgcgcgcggcggcggcaccccagcgtttaggcgcggaggcagccatggcgggcaacttcgactcggaggagcggagtagctggtactgggggaggttgagtcggcaggaggcggtggcgctgctgcagggccagcggcacggggtgttcctggtgcgggactcgagcaccagccccggggactatgtgctcagcgtctcagagaactcgcgcgtctcccactacatcatcaacagcagcggcccgcgcccgccggtgccaccgtcgcccgcccagcctccgcccggggtgagcccctccagactccgaataggagatcaagagtttgattcattgcctgctttactggaattctacaaaatacactatttggacactacaacgttgatagaaccagtttccagatccaggcagggtagtggagtgattctcaggcaggaggaggcggagtatgtgcgagccctctttgactttaatgggaatgatgaggaagatcttccctttaagaaaggagacatcttgagaatccgggacaagcctgaagagcagtggtggaatgcggaggacagcgaaggcaagagagggatgattccagtcccttacgtcgagaagtatagacctgcctccgcctcagtatcggctctgattggaggtaaccaggagggttcccacccacagccactgggtgggccggagcctgggccctatgcccaacccagcgtcaacactccgctccctaacctccagaatgggcccatatatgccagggttatccagaagcgagtccccaatgcctacgacaagacagccttggctttggaggtcggtgagctggtaaaggttacgaagattaatgtgagtggtcagtgggaaggggagtgtaatggcaaacgaggtcacttcccattcacacatgtccgtctgctggatcaacagaatcccgatgaggacttcagctgagtatagttcaacagttttgctgacagatgggaacaatcttttttttttttttccaactgccatctatacaattttcttacagatgtcaaaagcagtctagtttatataagcattctgttacctgtgatattttttagactgaactgctccattcctagtcttaattaccatattcagggtacgaactggagggcttgtgtgttagcttctgaattggcaattggaggcggtagtggtcgtgcctgtgtgtatcagaagggataggtatcttgcctcctttctctcaggcagtgcaaatcaccctgtggaaaaccgatggacaggaaggagtgttacacactgcttaccctgatttattcagtggttttgttttcattctggaaccatactatcaaatggcgacagactgttccgttccacccccgtgaagtaatcatgcaccgtgtgaatagtatcaagcaggattgctttcattgtatggagcatgaccagcgtgtgactcattctgacatttcagatcctaagaattctaagaacactactagaagcatttgttccctcctagtcaatgcttcatactttttcttgggattcttttagcccttgacattcttgtcccccaaacctgtaagtaggtgaattcctaagataagtgtgtattttcattccaggtgaaaagcaggatgtaccgagcactttattcagtgcatagctttaagccagtgttggattcactaagtggacagccagtctcccagctctctgccttccccaaaagggtcgtagtaggtcacccttctacagcagctaactagagtcctaactaatgggatccagcagggccatttctccagagggccagtatcctattaggagactcttggaattcttaggttctactcaagagtggaaggaccaatcacctctgatattctgtggaaggttttggggtcaaattctgccctctgcattctgtgcaacttgtataaaagtcaagttagtattacatgaatttggggtagggttagtgctttgaaaaaatgttgaaccggctgggcgcggtggctcacgtctgtaatcccagcactttgggaggccgaggcgggtggatcatgaggtcaggagttcgagaccagcctggccaacatagtgaaaccccatctctgctaaagatataaaaaattagcccggcgtggtggtgcacgcctgtaatcccagctactcgggaggctgaggcaggagaattgcttcaacctgggaggtggaggctgcagtgagccgagatcgcaccactgcgttccagcctgagcgacagggcaagactcagtctcaaaaaaaaaaaaaaggaaaaaaaaaagaaaaaaaaa

SEQ ID NO: 2469 - DNA, 6794 bp, Homo sapiens
gtgagcggcgctcggggcgcgctaggcggggagccgagccgggctggcggcaggcggacggggcgggcgcgtgcggcgcgagccgggcgctgaggacaagggccgctggtagggccggccggccggcgggcggagcgccgccgccgacgcacacgaggtgaccaggcattgatgcacccccaggaaggccacgcgctcaggagccccccccgccgctggctgctgctcacatggtgtctgggcccttggcactccggtggtgcgcgtgggcagggcgcggggacatggggcccgacatggagctgcccagccactcgaagcagctcctgctgcagctgaaccagcagaggaccaagggcttcctgtgtgacgtcatcatcatggtggagaactccatcttccgggcccacaagaacgtcctagccgccagcagcatctatttcaagtccctggtcctgcacgacaacctcatcaacctggacacagacatggtcagctccacagtgttccagcagatcttggacttcatctacacaggcaagctgctgcccagcgaccagccagccgagcccaacttcagcaccctcctcactgccgccagctacctccagctgcccgagttggcagccctctgccgccgcaaactcaagcgagccggcaagccctttggctctgggagggcggggtccactggcatggggcggcccccccgcagccagcggctgtccacggcctctgtcatccaagctcggtatcaggggctcgtggatgggcgcaagggggcccacgccccccaggagctcccccaagccaaaggctcagacgatgaactctttcttggtggctctaaccaggatagcgtgcaaggtctgggccgggctgtctgcccagctggcggggaggcgggtctggggggctgcagcagcagcaccaacgggagcagcgggggctgcgagcaggagctgggcttggacctgtccaagaaaagcccacccttgccccctgccaccccaggtccccacctcactcccgatgacgcagcccagctgagcgacagccaacatggctcgccccctgcggcctctgctcctcccgttgccaacagtgcctcttattctgagctggggggcacccctgatgagcccatggatctggagggggccgaggacaaccacctgagcctgctggaggcgcctggtgggcagcctcggaagagcctccggcactccactcggaagaaggagtggggcaagaaggagcctgtggctggctccccctttgagcggagagaagcagggcccaagggtccctgcccgggagaggagggtgagggggtcggggacagggttcccaatggcatcctggctagtggggctggccctagcgggccctatggggagcccccctacccctgcaaggaggaggaggagaacggcaaggatgcaagtgaagacagtgcgcagagcgggagcgaggggggcagcggccactccagcgcccactacatgtaccggcaggagggctacgagacggtgtcctacggggacaacttgtatgtgtgcattccctgcgccaagggcttccccagctctgagcagctcaatgcgcacgtggagactcacacggaggaagagctgttcatcaaggaagagggggcctacgagacaggcagtgggggtgccgaggaggaggccgaggacctgtcagcacccagtgcggcctacacggctgagccccggcccttcaagtgttcggtctgcgagaagacctacaaggacccagccacgctgcggcagcacgagaagacgcactggctgacacggcccttcccctgcaacatctgtggcaaaatgttcacgcagcgcggcaccatgacgcgtcacatgcggagccacctgggcctgaagcccttcgcctgcgatgagtgtggcatgcgcttcacccgtcagtaccgcctcacggagcacatgcgtgtgcactcgggcgagaaaccttacgagtgccagctgtgcgggggcaagttcacccagcagcgcaacctcatcagccacctgcgcatgcacacctccccctcctagaagccaaagacccgcgggcgccctctgccaccttgctccccgggaacccatggaaggagaagcgaggtgatgcagcagcaggggcaagaccctgggtccagtggaggctccgggtggcccctctggcccccactgcccacacccagagctttaatggacagtccgtaccaagcagagccgagaggagggaagccaggggtcccagcccgtctacctccccatcccacccaggcccccagctccccgcgggggccaccgcagggcctgtgggctgggtcacgtgggtctcgctgggacctggtccctttgttgcaggcggcttggagaaagggcagtgggacgctggccacggccagggtggtgtcgggagcaggcctcaccccgctggccgtgtctgtgtgtgtgcacgtgtgcttgtgtctgtgcgggcgcgtgcagccctggttctgcagggaacaggtgctgggggtgcagatccctccctccttgagccagggtggcactgttcactggcgctgggacagtcagggtgaccccaccgcctacctctctacaactaaagagccctctgggcctgtgttgctgttattcctactgatctgttcctctgtttttctttttgatttttgttttttaaaccaaaacagacaatagcttattttctttccgccccctccggggctgagcctgggtctgaagactgaatgtaacaggggccgctggcactcctgcgcgtcccccggctctggcgctgcaggggtgtcggcgcgccacctctccaggccccagaagcccttcttgcccaaaggcttccctggtccctgagccctgcctcggctgcctcaggggagagtgcttttcctgtagtttccaaggaatattctttgtttagaggtacttgttttttattaagagaaaaaccagtgtaacgtttatgtgactgtttgaactggaaggtctggggttccggggggtggggggaggctagactcaatgccggggccgtcggtactcttgttttcatttgtgtgtgcgtgcgtgtgtgtgtgtgtatgtgcgtatgtgtgtgtctatgtgtggtgtgtgccgtatgcatgggcagatgtttcgctttccctccttcctcgctgaacaaggtggagacttctgaccttttgctacctcttgaattcatgacaacgatatgttggtgactggcagtggaagcccttgacactcttgttttccttcgcttagcacctaggaagtcgtgtgcaggagccagcagggcgccaagtggcccagtgcctgcagctcacctgtgggttttccctttgagcctttggccacatccacctcgaggggaccctggcaccccgggcacacaaacctctgtggtataggtgaggggtgtgaggccccagcctggagccaggcactgggtgctgacaggggaaccatgaggagggtggcaggtctttgcagctcccggccagggtgaggcggaagtgagccctcatcctgccactcctatcctccattcctgcaagagttttaagcttgagagagctgaccacagggccccccggggaacagggatggcacttccctgagcagtcctggcccccggccactgtctcggggcccacctctcgcccctcatcttggtaattagccagcctcagatacttctgtgggccctgaagtgggctctcaaggtcagaccaaggttgctgatctcagtcccactgtcttcagccagctgaagctgtggggctgggctggcagcctttattgtcatcttgcttcaccatttttttttctctctcttttcattctattttaagtttagaccaaaaaaatacagagtcatcccctacccccacccctctagagaccctccagctaaaaacagagcctgagttcagggacccaagtggtgagcggcgtcttttgggggtgagggagcttgggtagatgaggctcctggctgagccctccctgtggtgatcccagcctaagatggcccctcttccctcctggtgggagacagaggactggaccctgggtctcaggttccagcaagtcaggctagggacctggggggaggagacccatggacttcacccatactcagtgagggggctcctgccgtcctgacgccaccccgccccatcagcacttaagccacatgacacaaagtctgtaccgcacgggaaatgttcacgcgcctggccgtgtgcatggcctcccgggctgtgggcagccgcatctgtgaggtgactcgtgaaagtaggtgattcctttgcagaacttcagggactgggagcagaggcccctcactcaacgacgtttgtgcgacatagtattgtatccaccttagtattgtatcgagccttttctgtgttttaatgagaaagcagaacactagtttcctatttaagactttaagggtttgtggggcggggcgggattaacacaacatttggctttgttttctttttcctttgatttccacatcaggtgtgtgcgagtgtgtgtgtgtggagatgttaagagcctcacaaggaaactgggttattggaggccaaggcggcttacagttctctgcgttcgtcacttaattcctgaatgtttcagagaaacaggaatcagaaaatagcagatatcatgtaggaaagagaggataaacaaagaaaaaagaaaaaaaaataagctcatacccaaattcacaaagcctattttttaaaccaaagcacattttgaatgagtatggaacctccatgggctcagaaaaaagatgctaatatatttatctcattgtttacataagcttttacagtttcagacctcagcagctgtaaggccagtccagggaaccctcccctgctgctggaaacccttctgagttggccctggagtggctcacgggcagagaagggtagccctggggctgggggagggattggaagcctccctggagtcacctgagccctcgtccccattcccagggcccctccaagcccagctggcaccaaagagcttgggcccgtgctgaccagcccccaaggccctctggccggaccatgctggtcctgaccagctagcctacgcggggatggccgtcagttctggccacaggacccgagtctgggcttgggtccccctgctgctctgcccgtgacccttggggatgggttgatgcgagggtcccactcaagccaaaaagccgggacctttgcgcagctctgtcgactctggtgggtccccactcctggggccccctaaccccaccccaggcagcggaaggggctgactgggtctggtccttaccaacatagacggtgcaaacactcttaacagtgttgtttttgtatcaatatgtttgtgcagtgatgaatgtatttatttctcagacttggggcgagtgagcgggtggcaggccgggctccgccactgcatgctcccgccggaccgagccccagcaagggctcctccaggattgcaaaaaaaaaaggaagagaaaagatgaacctttaagcaaataagaatctcagagactcgcagcatagccatacacctcagcctgtgaaatgaacgatccggaccctcaccaactttccccacctcaggcagccctgtgtgtttaccgttcatcaccactcgggggcaccgggccgcccacccactcccaaaatccgtcagtattcactggacctcaggccctgtgcaggagtgcgatccgggctgggccgctgggcaggctgaccccctgccctcctgcggccatcctgagttggggtgaggcctgggcagccggagggcagggctcagggagcaggaggctgcatccgtccacccccaggcgtgggggacaaaagccaaaggtgccaggccttagagcagacaagggctctcagccctggcatgccccctaaagggaccaaggtcctcctatttcccagaaccccgttggggcagatgttactgaacctgtgaatcagacgccaggagtgagggctggggagggacctaactggagcctcagtctgacattccacgccggggtgggggtgggcatgagcggtgggaactgaggctgcccaggacccccttcctaggatgccccggcttcagtcaccccactttaactttctaccaggaccccctccccctacctcaccttgctatttattgctgtaatttattgacctcaaaaatgctgcataacagacctcactggggcagggaggatccccagggctcccaccctccacttggcgggccccgtggggccaggtgctgaggggagcctctctaccccacccatcactagcttccctctgccctctcccaccccgggggggacccaggttgggcactggctcatttctcgcaaatacctcgaaggggaggggggagggatggggttatagctgttttgtttaattggaactggaagagggatcatgttttgttttatgcccttcccagaaggggggagggacaccgggatcgcactcctgtactggccaccgccgctgtcacttgtcacattgagttcatgtcccttgagagtttgtataaattcaggtcagagctgcagctacacagctgcccagtgtcatagaaaagcaattcaccaacgactgatctctccattcagaagtgtgcagtcttaaatgtacagcgataagaaactgttattttatgatcttttcattaaaagcttgattg

SEQ ID NO: 2470 - DNA, 2218 bp, Homo sapiens
tctgtggcgggcgccgcagctccgcgtcccccgcgcctcctcccagcgcaggtgggtccgcccgcggggggcgggggtgcccgggagccgtgggacgggcgggtagcggcaacctttggggagcagagtggtccccaacgcccaggtgccccggctcgcgctctggcccgggcgaatcgggctataggaagggccacacggatggaagtcctagtccgggtgctcacctcttgtggaacgtgcaaagcctgtcccaggacctctttacactctgggggtctctgcccaggcacgcttgctgcttccggacacagctgtgggcggagctagtaggggcggggctacgtgattgacacttctctcctcagacttcaagggctaccactggacccttcccctgtcttgaaccctgagccggcaccatgcacggacgcctgaaggtgaagacgtcagaagagcaggcggaggccaaaaggctagagcgagagcagaagctgaagctataccagtcagccacccaggccgtattccagaagcgccaggctggtgagctggatgagtccgtgctggaactgacaagccagattctgggagccaaccctgattttgccaccctctggaactgccgacgagaggtgctccagcagctggagactcagaagtctcctgaagagttggctgctctggtgaaggcagaactgggcttcctggagagctgcctgcgggtgaaccccaagtcttatggtacctggcaccaccgatgctggctgctaggccgcctgcctgagcccaactggacccgagagctggagctctgtgcccgtttcctggaggtggatgagcggaactttcactgctgggactatcggcggtttgtggccacacaggcagccgtgccccctgcagaagagctagccttcactgacagcctcatcacccgaaacttctccaactactcttcctggcattaccgctcctgtctcttgccccagctgcacccccagccggattctggaccacaggggcgcctccctgaggatgtgctgctcaaagagctggagctggtgcagaatgccttcttcactgaccccaatgaccagagtgcctggttttatcaccgttggctcctaggccgagctgacccccaggatgcactgcgctgcctgcatgtgagccgggacgaggcctgtctgactgtctccttctctcggcccctcttagtgggctccaggatggagatcttgctgctcatggttgatgattctcccctgattgtggagtggaggaccccagatggcaggaaccggcccagccatgtctggctctgtgacctgcctgctgcctccctcaacgaccagttgccccaacatacatttcgcgtcatttggacagcaggcgatgtccagaaagaatgcgtgcttttaaaaggccgccaggagggctggtgccgggactccacgacagacgagcagctattcaggtgtgagctgtcagtggagaagtccacagtgctgcagtctgagctggaatcctgtaaggagctgcaggagctggagcctgagaataaatggtgcctgcttaccatcatcctgctgatgcgggcactggaccccctgctgtatgagaaggagaccctgcagtacttccagaccctcaaggccgtggaccccatgcgggcaacgtatctggatgacctgcgcagcaagttcttgctggagaatagcgtgctcaagatggagtatgccgaggtgcgtgtgctgcacctggctcacaaggatctgacagtgctctgccatctggaacagctgctcttggtcacccatcttgacttgtcacacaatcgcctccgaaccctgccacctgcactggctgccctgcgctgccttgaggtgctgcaggccagtgataatgccatagagtccctggacggcgtcaccaacctaccccggctgcaggagctgctactgtgcaacaaccgcctccagcagcctgcagtgctccagcctcttgcctcctgccccaggctggtcctcctcaacctgcagggtaacccgctgtgccaagcggtgggcatcttggagcaactggctgaactgctgccttcagttagcagcgtcctcacctaagaggccctgccccctacccttgccctttaacttattgggactgaataaagaatggagaggccctctcaggctaccaaaaaaaaaaaaaaaaa

SEQ ID NO: 2471 - DNA, 1961 bp, Homo sapiens
gcagagtgcgctgcgtttcgatgagccgggacgtggcgccgctctagccagcgcctgggctctgtggcgggcgccgcagctccgcgtcccccgcgcctcctcccagcgcagacttcaagggctaccactggacccttcccctgtcttgaaccctgagccggcaccatgcacggacgcctgaaggtgaagacgtcagaagagcaggcggaggccaaaaggctagagcgagagcagaagctgaagctataccagtcagccacccaggccgtattccagaagcgccaggctggtgagctggatgagtccgtgctggaactgacaagccagattctgggagccaaccctgattttgccaccctctggaactgccgacgagaggtgctccagcagctggagactcagaagtctcctgaagagttggctgctctggtgaaggcagaactgggcttcctggagagctgcctgcgggtgaaccccaagtcttatggtacctggcaccaccgatgctggctgctaggccgcctgcctgagcccaactggacccgagagctggagctctgtgcccgtttcctggaggtggatgagcggaactttcactgctgggactatcggcggtttgtggccacacaggcagccgtgccccctgcagaagagctagccttcactgacagcctcatcacccgaaacttctccaactactcttcctggcattaccgctcctgtctcttgccccagctgcacccccagccggattctggaccacaggggcgcctccctgaggatgtgctgctcaaagagctggagctggtgcagaatgccttcttcactgaccccaatgaccagagtgcctggttttatcaccgttggctcctaggccgagctgacccccaggatgcactgcgctgcctgcatgtgagccgggacgaggcctgtctgactgtctccttctctcggcccctcttagtgggctccaggatggagatcttgctgctcatggttgatgattctcccctgattgtggagtggaggaccccagatggcaggaaccggcccagccatgtctggctctgtgacctgcctgctgcctccctcaacgaccagttgccccaacatacatttcgcgtcatttggacagcaggcgatgtccagaaagaatgcgtgcttttaaaaggccgccaggagggctggtgccgggactccacgacagacgagcagctattcaggtgtgagctgtcagtggagaagtccacagtgctgcagtctgagctggaatcctgtaaggagctgcaggagctggagcctgagaataaatggtgcctgcttaccatcatcctgctgatgcgggcactggaccccctgctgtatgagaaggagaccctgcagtacttccagaccctcaaggccgtggaccccatgcgggcaacgtatctggatgacctgcgcagcaagttcttgctggagaatagcgtgctcaagatggagtatgccgaggtgcgtgtgctgcacctggctcacaaggatctgacagtgctctgccatctggaacagctgctcttggtcacccatcttgacttgtcacacaatcgcctccgaaccctgccacctgcactggctgccctgcgctgccttgaggtgctgcaggccagtgataatgccatagagtccctggacggcgtcaccaacctaccccggctgcaggagctgctactgtgcaacaaccgcctccagcagcctgcagtgctccagcctcttgcctcctgccccaggctggtcctcctcaacctgcagggtaacccgctgtgccaagcggtgggcatcttggagcaactggctgaactgctgccttcagttagcagcgtcctcacctaagaggccctgccccctacccttgccctttaacttattgggactgaataaagaatggagaggccctctcaggctaccaaaaaaaaaaaaaaaaa

SEQ ID NO: 2472 - DNA, 1826 bp, Homo sapiens
ctactccttccctccgcgttccgggcctcggagccgccttgaggaggatgagtccctggagctggttcctgctgcagaccctctgcctcctgcccacgggcgcagcttcgcggcgcggggcgcccggcaccgccaactgcgagctcaagccccaacaaagcgagctgaattccttcttgtggaccattaagcgagacccaccatcttacttctttggcacaatccatgtcccgtacacccgagtttgggacttcatccccgacaactctaaggaggctttcctgcagagcagcattgtgtactttgagttggatctcacagacccctataccatctcagctctcaccagctgtcagatgctgccacagggcgagaacctccaagatgtgctccccagggacatctactgccgcctcaagcgccacctggagtatgtcaagctcatgatgcccttgtggatgaccccagaccagcgcggcaaggggctctacgcagactacctcttcaatgctattgccggaaactgggagcgcaagaggcctgtctgggtgatgctcatggtcaactccctgactgaagtggacattaagtcccgtggagtgcctgtcttagacctgttccttgcccaggaggctgagcggctgaggaaacagactggggcagtggaaaaggtggaagagcagtgccatccattgaatgggttgaacttttcacaggtcatctttgctttgaaccagaccctcctgcagcaggaaagcctgcgagcaggcagtcttcagatcccctacacgacggaggatctcatcaaacactataactgcggggacctcagctccgtcatcctcagccatgacagctcccaggttcccaattttattaatgccacgctaccacctcaggagcgcatcactgctcaggagattgacagctacttacgccgggagctgatctacaagcggaatgagagaatagggaagcgggtgaaggcccttttggaggagttccctgacaaaggcttcttctttgcctttggagctggtcatttcatgggcaacaacacagtgctggatgttttgcggcgtgaaggctatgaggtagaacacgcccctgctggacgacccatccacaaagggaagagtaaaaagacctccacacggcccactctgtccaccatctttgctccaaaagtccctaccctggaagtaccggcaccagaagccgtatcctcagggcactcaacgctgcctccccttgtgtcccggcctggaagtgccgacacgcccagtgaggccgaacagaggttccggaagaagcggaggcggtcacagcggaggccgcgactccggcaattcagcgatctgtgggtccgcctggaggagagtgacatagtcccgcaactccaggtccctgtcctggacaggcacatctccactgaactgcggctccctcgccgtgggcattcccaccacagccagatggtggccagcagtgcctgcctgtctctctggactcctgtgttctgggtgctggtgctggctttccaaacagagacacccctcctgtaacgactggaagcaccaggctaagaacctgacccctcggacttgaagaatggccattcctgtactccacattctggtctagccttgttgggcccaatccagaagagactgctcttgaaaaagcggcccagtgttgattcttctctttccaaggaatgtgactttgggttatccaactttgggggcaggtgtacagttttgtaacatagtgagttgtgtgaaaataaattataaatgagttgtatgaaaataaatacctttttt

SEQ ID NO: 2473 - DNA, 924 bp, Homo sapiens
gctagccagggcgggcggccacctctgccctactccttccctccgcgttccgggcctcggagccgccttgaggaggatgagtccctggagctggttcctgctgcagaccctctgcctcctgcccacgggcgcagcttcgcggcgcggggcgcccggcaccgccaactgcgagctcaagccccaacaaagcgagctgaattccttcttgtggaccattaagcgagacccaccatcttacttctttggcacaatccatgtcccgtacacccgagtttgggacttcatccccgacaactctaaggaggctttcctgcagagcagcattgtgtactttgagttggatctcacagacccctataccatctcagctctcaccagctgtcagatgctgccacagggcgagaacctccaagatgtgctccccagggacatctactgccgcctcaagcgccacctggagtatgtcaagctcatgatgcccttgtggatgaccccagaccagcgcggcaaggggctctacgcagactacctcttcaatgctattgccggaaactgggagcgcaagaggcctgtctgggtgatgctcatggtcaactccctgactgaagtggacattaagtcccgtggagtgcctgtcttagacctgttccttgcccaggaggctgagcggctgaggaaacagactggggcagtggaaaaggtggaagagcagtgccatccattgaatgggttgaacttttcacagcttcacagtagccttgaaaatcaggagccttgaactacagtagctgtgaaaactgtttgcctaatggttactggaggggacagaatgggttcaaagttcctccaaagctccatccttaaagaatcatcactatttgacatgtccaatagttccctgaaatttccattcccaagcttgtc

SEQ ID NO: 2474 - DNA, 3996 bp, Homo sapiens
agagaggatggaggggttttacagagagatctgtctcctttggttaaggttgcatcacaggcacaggaaatattagagtaactgagggaggtaaactatgtggaaggagggatgctgtggtttgaatgtgtcccctccaaaattcagatgttgctagtgtgatggtattaaaaggtgaggcctttaggaggtgattaagccatgaaggctcctctttataaggacctttttgggattaagactcctctttataaggcctttatgggattaaggccctaataaaagaggtgtcatgcagccattcagttagcttgcccttctgtcttcttccatgtgaggatgcagcaagaaggccctcaccagaccaaaggccagtgccttgatctcggacttcccagcctccagaatggtcatctttgctttgaaccagaccctcctgcagcaggaaagcctgcgagcaggcagtcttcagatcccctacacgacggaggatctcatcaaacactataactgcggggacctcagctccgtcatcctcagccatgacagctcccaggttcccaattttattaatgccacgctaccacctcaggagcgcatcactgctcaggagattgacagctacttacgccgggagctgatctacaagcggaatgagagaatagggaagcgggtgaaggcccttttggaggagttccctgacaaaggcttcttctttgcctttggagctgcttcacagtagccttgaaaatcaggagccttgaactacagtagctgtgaaaactgtttgcctaatggttactggaggggacagaatgggttcaaagttcctccaaagctccatccttaaagaatcatcactatttgacatgtccaatagttccctgaaatttccattcccaagcttgtcttcatttgacctgactcagagcttgctctgtgtgaatagccctattcttagggtgtgtgttgaaaacaatcagtagcagctgtttaacatcatagttgctggaaatagcaatattaattgaagcttacaaggggctgcccaaaaaacttaaaagcaaaatcccatagggggtatagaaaagctctaaaatattcctagagagtcacatgcatgagaagagctgtgcacatgcccaggaaagacctgagaaggtcctaatctctcacctctggctgatcttgaggctctgtgtaagcagagtgtgaaagctaaggcaaagtcataaattgcctgttgaagcatcaaatacatgcccccaaactcacacagcccctctgcaaaggttgggaaacttgcaaggaatttaaggaaatctctgttcagtcattagccagccactaaactaactgagcagatccttcagtgatcacacacaacaaagaatacagactttacagacttagtcctagaaaatcactacacaaacagcaacaacaatgcacctgggactaagggagaggagatgagttccagagttggtatattatttaaatgtctagttttcaataaaaacaattataagacacagagcaaaactagaaagtatggcccatacccagggaaaaacaagcaaccaatagaagctgtccttgaggaagttaatatcttggacttactagaaaatgactttaacactagttattataaatatgttcaaaaaactaaaagaggccaggtgcggaggctcacgcctataatcccagcactttgggaggctgaagcaggtgggtcacctgaggtcaggagtttgagaccagcctgaccaatatggcaaaaccctatctctactaataatacaaaaattagccaggcgttgtggcgcacacctgtaatcccagctacttgggaggctgaagcaggagaactgcttgaaactgggaggaagaggttgcagtaagctgagatcacaccactgtactccagcctgggccacaagagtgaaactccatctccaaaaaaaaaaaaaaaaaaaaaaaccctaaaattaaccatatctaaagaattaaaggaaagtttgagaacaatatctcaccaatacagaatatcaataaaaatataaaaattattttaaaagaaccaaataggaattctggaatttaaagtgtaggaactgaaatgaaaaattcactacgggggctgaacagtagatttgaactggcagaagaagaatcaacatacatgaagataggttgattgagatgattcagtatgagaaagagaaaggaaaaggaatgaagaaaaatgaatagatcttcagatacctgtgagacaccctcaagtgtgccaatgtatacctaacgggagtcccagaagacaggagagaaaaaaagaaagaaataaaaagaatatttgaatttaaaattgcttgaaaatgtctcaaatttgatgaaaaatattactctgcacattcaacccatgaactataagttgtataaaatcaaaaagtttcacaccaaggcgtgtcatagccaaactgtcaaaagccaaagacacagaatcttgaaagcagtgagagcaaagcagacaagggatccccaataggattaacagcagatttctcatcagaagccatgcaagccagaaggctatgggagacatactcaaaatgctgaaataaaagactgtcaacaaacatttccacatccagcaaaaatcaaaaacgaaggagaaatctgttgcatgtgagctgaatagaatttgtattctgctgttgttggatgaagtattctttaaatgtcaattagatcaatttgattgatgatgctcttcagttcaactatattccctatctgataattccagaatctctatcatgtctgagtctgggtctgatgctttcattgtttcttcagattgtgatttttcttgcctcccagtgtgacttgtaatttttaattgaaagctggatatgatgtatttggcaatgggaagtgagggaaatatgtttttagtgtgagggtttatgttaatctttctcagagttgggctgtttaatgttttgctgtggtctgaatgttccttaaaacttgtgtgttgaaacttaattattattgtcatggtattaagaggtggggcctttgggaagtgattaagacatgaaggctccacattcatgagtggattcatgctttttaaaaggactggaggaaagtagtgtaggctatttttttgcccttgtgccttccaccatgtgaagatatagcattagcccctcctgccatgtaaagactcaggaagaaggccctcagctggacatggtggtgcatgcctgtaatcccagcaccttgggaggccatggcaggaggatcacttgagctcaggagtttgagaccagcctggtcaacacagtgagacctcatctctacaaaaattaaataaaaatttagctaggcatagtgatgtgtgcctgtagtcccagctacttgggaagctgaggtgggaggatcacttgagccctggaggtcgaggctgaagtgagctgtgaacatgccactgcactccagcctgtgtgacagagtaagactctctgtattaaaaaaaaaaaaggctctcactgggcactgaatgcctatgcctagattttggacttcccagcctctagaactgtgagaaataaatttctattgcttataaatgacccagtctgtggtattttgtaacagcaacacagactaaggcatgtttgctgtaactctaggtcccagaggcttcagtttcctctagtgacctctagtttttcctctagtattttttgtcttgtgctttcttaagaaccttcttaaatagagtctgagtcttgctgcactttcacatataatccactgttattttactggagtcctattgttgtggtgctaaagtgaagataccatttcatactcactaggctataataaaaaagatggagagtaaaaagttttggtgaagacatggagaaattggcaccctcatacattgctactgggaatttaaaatggtgtagccat

SEQ ID NO: 2475 - DNA, 1067 bp, Homo sapiens
ctactccttccctccgcgttccgggcctcggagccgccttgaggaggatgagtccctggagctggttcctgctgcagaccctctgcctcctgcccacgggcgcagcttcgcggcgcggggcgcccggcaccgccaactgcgagctcaagccccaacaaagcgagctgaattccttcttgtggaccattaagcgagacccaccatcttacttctttggcacaatccatgtcccgtacacccgagtttgggacttcatccccgacaactctaaggaggctttcctgcagagcagcattgtgtactttgagttggatctcacagacccctataccatctcagctctcaccagctgtcagatgctgccacagggcgagaacctccaagatgtgctccccagggacatctactgccgcctcaagcgccacctggagtatgtcaagctcatgatgcccttgtggatgaccccagaccagcgcggcaaggggctctacgcagactacctcttcaatgctattgccggaaactgggagcgcaagaggcctgtctgggtgatgctcatggtcaactccctgactgaagtggacattaagtcccgtggagtgcctgtcttagacctgttccttgcccaggaggctgagcggctgaggaaacagactggggcagtggaaaaggtggaagagcagtgccatccattgaatgggttgaacttttcacaggtcatctttgctttgaaccagaccctcctgcagcaggaaagcctgcgagcaggcagtcttcagatcccctacacgacggaggatctcatcaaacactataactgcggggacctcagctccgtcatcctcagccatgacagctcccaggttcccaattttattaatgccacgctaccacctcaggagcgcatcactgctcaggagattgacagctacttacgccgggagctgatctacaagcggaatgagagaatagggaagcgggtgaaggcccttttggaggagttccctgacaaaggcttcttctttgcctttggagctggtcatttcatgggcaacaacacataactg

SEQ ID NO: 2476 - DNA, 2267 bp, Homo sapiens
ctactccttccctccgcgttccgggcctcggagccgccttgaggaggatgagtccctggagctggttcctgctgcagaccctctgcctcctgcccacgggcgcagcttcgcggcgcggggcgcccggcaccgccaactgcgagctcaagccccaacaaagcgagctgaattccttcttgtggaccattaagcgagacccaccatcttacttctttggcacaatccatgtcccgtacacccgagtttgggacttcatccccgacaactctaaggaggctttcctgcagagcagcattgtgtactttgagttggatctcacagacccctataccatctcagctctcaccagctgtcagatgctgccacagggcgagaacctccaagatgtgctccccagggacatctactgccgcctcaagcgccacctggagtatgtcaagctcatgatgcccttgtggatgaccccagaccagcgcggcaaggggctctacgcagactacctcttcaatgctattgccggaaactgggagcgcaagaggcctgtctgggtgatgctcatggtcaactccctgactgaagtggacattaagtcccgtggagtgcctgtcttagacctgttccttgcccaggaggctgagcggctgaggaaacagactggggcagtggaaaaggtggaagagcagtgccatccattgaatgggttgaacttttcacaggtcatctttgctttgaaccagaccctcctgcagcaggaaagcctgcgagcaggcagtcttcagatcccctacacgacggaggatctcatcaaacactataactgcggggacctcagctccgtcatcctcagccatgacagctcccaggttcccaattttattaatgccacgctaccacctcaggagcgcatcactgctcaggagattgacagctacttacgccgggagctgatctacaagcggaatgagagaatagggaagcgggtgaaggcccttttggaggagttccctgacaaaggcttcttctttgcctttggagctgcttcacagtagccttgaaaatcaggagccttgaactacagtagctgtgaaaactgtttgcctaatggttactggaggggacagaatgggttcaaagttcctccaaagctccatccttaaagaatcatcactatttgacatgtccaatagttccctgaaatttccattcccaagcttgtcttcatttgacctgactcagagcttgctctgtgtgaatagccctattcttagggtgtgtgttgaaaacaatcagtagcagctgtttaacatcatagttgctggaaatagcaatattaattgaagcttacaaggggctgcccaaaaaacttaaaagcaaaatcccatagggggtatagaaaagctctaaaatattcctagagagtcacatgcatgagaagagctgtgcacatgcccaggaaagacctgagaaggtcctaatctctcacctctggctgatcttgaggctctgtgtaagcagagtgtgaaagctaaggcaaagtcataaattgcctgttgaagcatcaaatacatgcccccaaactcacacagcccctctgcaaaggttgggaaacttgcaaggaatttaaggaaatctctgttcagtcattagccagccactaaactaactgagcagatccttcagtgatcacacacaacaaagaatacagactttacagacttagtcctagaaaatcactacacaaacagcaacaacaatgcacctgggactaagggagaggagatgagttccagagttggtatattatttaaatgtctagttttcaataaaaacaattataagacacagagcaaaactagaaagtatggcccatacccagggaaaaacaagcaaccaatagaagctgtccttgaggaagttaatatcttggacttactagaaaatgactttaacactagttattataaatatgttcaaaaaactaaaagaggccaggtgcggaggctcacgcctataatcccagcactttgggaggctgaagcaggtgggtcacctgaggtcaggagtttgagaccagcctgaccaatatggcaaaaccctatctctactaataatacaaaaattagccaggcgttgtggcgcacacctgtaatcccagctacttgggaggctgaagcaggagaactgcttgaaactgggaggaagaggttgcagtaagctgagatcacaccactgtactccagcctgggccacaagagtgaaactccatc

SEQ ID NO: 2477 - DNA, 2870 bp, Homo sapiens
ccacaaacaaactgcagtttgtgccctcagcaatgcccgtgagtatgtggtagttttcttcttctgtaagtcctgtgtttcatgtctggattgggcaccgtgtgcacatttgtactgtctcaacaaatggcttcttggaacaaagctgttagcctgggcctcactcttgaggcaccgtaacagtggtgcagaccccagatgagaaagttaggaaacagagccagtggtggtgtcccaatgcaccaccccgggtctgtgtggatggaaggtgcccaggtgctggagtgtgggcttctgctttccacccctgccagacttaggtgagctcccaaaaacttcccgtatgtcccgtggcaggggtaatggggcgctggggagaggggaaaggtcgactgggttctgggctggtgggaggctggggcacagcttggtctgagcagttcggtgggtgggccctcgtggtgggggttctgccaggcaggtggaacaggcaacaccaacacctgagcttgcccagtactcagggcttgatttgtcatactgatgcagggctagattggggctgacagcccctgggcactcctgatgcccgaagtgcccaggggctgtgagcccccatctagcactggctccttctaaggcaaagttatattcctgtagctgctttctctctgtgccttctgaaggctaagttgaacagaggaaactacagaaattgctccgaaacacattaccgtgtgcttttaaaacttaaaagctgtgtggttagcaaacttttaattgcaaaatgaggataactgaaaatggaaagtactggagttttaaaatcaagcagcgacttttgtcatggggatctggatataaaatgcgaagattagaaatggaaatcacctttgcagtagaagaaaaattgaagtcagaagtgctaagtggaaactataatcacttgttctaaattgccagttccttatttgcaaatgaataacctaggatcagtggtgaaagacatgactttttttcttatttaggtgtcgatcttaaatcagctcatgctgatttttggctcctgtttgccaaacttccctttctgagcccctgctgacccatgaacaccccctttgatgcatgagggtgaaaatgaaagcaggaaccatgggccttctgcttccttctcggggcctatttgctgtactgccgcaggctcccagggttccctggttgtgactcctgagactacagtgggtttgtcctatgcagaaacctccaagaatgacagatcttagattaggttgcctttactttttctagaaagtggtgattgggaagtagccattccttccgtcccaccagcctccctgttttttcagagagcacaattgcattccatcctgtagttgggaattcccccccctccttttttttttaattgagacagagtcttgctctgtcacccaggctggaatgcagtggcatgatctcggctcactgcaacctctgcctcccgggttcaagtgattctcctgcctcagcctctcaagtagctgggattacaggtgcctgccaccatgcccggctaatttttgtatttttagtagagatggggtttaaccatgttggccaggtgggtcttgaactcctgacttcaggtgatccacccgcctcggcctcccaaagtgctgggattacaggtgtgagccactgtgctcagcttgaattcttgtattttctccagaccagtgtcctcacctttcaggatcctgctcacatatcacctcttctgggaggtcttaccaggttgcagtttgatgtccaggctatccccttagctttgtgacttcaggtaacttgctgcattgttctgatcttcagtgtcattgtctctgaaatgctactgatgctgccctgcctgccttgcaggactgttggcaggcctgattccagaagctctctagaactgtactgtgctggacagataggcagggggcttggcagggtaatttcttggttctagggtgtgtgtttggggagtatgtttggtggtcctgagagctgcagcatttcaggttgtttttctcactgcaggtcatttcatgggcaacaacacagtgctggatgttttgcggcgtgaaggctatgaggtagaacacgcccctgctggacgacccatccacaaagggaagagtaaaaagacctccacacggcccactctgtccaccatctttgctccaaaagtccctaccctggaagtaccggcaccagaagccgtatcctcagggcactcaacgctgcctccccttgtgtcccggcctggaagtgccgacacgcccagtgaggccgaacagaggttccggaagaagcggaggcggtcacagcggaggccgcgactccggcaattcagcgatctgtgggtccgcctggaggagagtgacatagtcccgcaactccaggtccctgtcctggacaggcacatctccactgaactgcggctccctcgccgtgggcattcccaccacagccagatggtggccagcagtgcctgcctgtctctctggactcctgtgttctgggtgctggtgctggctttccaaacagagacacccctcctgtaacgactggaagcaccaggctaagaacctgacccctcggacttgaagaatggccattcctgtactccacattctggtctagccttgttgggcccaatccagaagagactgctcttgaaaaagcggcccagtgttgattcttctctttccaaggaatgtgactttgggttatccaactttgggggcaggtgtacagttttgtaacatagtgagttgtgtgaaaataaattataaatgagttgtatgaaaataaatacctttttt

SEQ ID NO: 2478 - DNA, 1826 bp, Homo sapiens; identical to SEQ ID NO: 2472

SEQ ID NO: 2479 - DNA, 924 bp, Homo sapiens; identical to SEQ ID NO: 2473

SEQ ID NO: 2480 - DNA, 3996 bp, Homo sapiens
agagaggatggaggggttttacagagagatctgtctcctttggttaaggttgcatcacaggcacaggaaatattagagtaactgagggaggtaaactatgtggaaggagggatgctgtggtttgaatgtgtcccctccaaaattcagatgttgctagtgtgatggtattaaaaggtgaggcctttaggaggtgattaagccatgaaggctcctctttataaggacctttttgggattaagactcctctttataaggcctttatgggattaaggccctaataaaagaggtgtcatgcagccattcagttagcttgcccttctgtcttcttccatgtgaggatgcagcaagaaggccctcaccagaccaaaggccagtgccttgatctcggacttcccagcctccagaatggtcatctttgctttgaaccagaccctcctgcagcaggaaagcctgcgagcaggcagtcttcagatcccctacacgacggaggatctcatcaaacactataactgcggggacctcagctccgtcatcctcagccatgacagctcccaggttcccaattttattaatgccacgctaccacctcaggagcgcatcactgctcaggagattgacagctacttacgccgggagctgatctacaagcggaatgagagaatagggaagcgggtgaaggcccttttggaggagttccctgacaaaggcttcttctttgcctttggagctgcttcacagtagccttgaaaatcaggagccttgaactacagtagctgtgaaaactgtttgcctaatggttactggaggggacagaatgggttcaaagttcctccaaagctccatccttaaagaatcatcactatttgacatgtccaatagttccctgaaatttccattcccaagcttgtcttcatttgacctgactcagagcttgctctgtgtgaatagccctattcttagggtgtgtgttgaaaacaatcagtagcagctgtttaacatcatagttgctggaaatagcaatattaattgaagcttacaaggggctgcccaaaaaacttaaaagcaaaatcccatagggggtatagaaaagctctaaaatattcctagagagtcacatgcatgagaagagctgtgcacatgcccaggaaagacctgagaaggtcctaatctctcacctctggctgatcttgaggctctgtgtaagcagagtgtgaaagctaaggcaaagtcataaattgcctgttgaagcatcaaatacatgcccccaaactcacacagcccctctgcaaaggttgggaaacttgcaaggaatttaaggaaatctctgttcagtcattagccagccactaaactaactgagcagatccttcagtgatcacacacaacaaagaatacagactttacagacttagtcctagaaaatcactacacaaacagcaacaacaatgcacctgggactaagggagaggagatgagttccagagttggtatattatttaaatgtctagttttcaataaaaacaattataagacacagagcaaaactagaaagtatggcccatacccagggaaaaacaagcaaccaatagaagctgtccttgaggaagttaatatcttggacttactagaaaatgactttaacactagttattataaatatgttcaaaaaactaaaagaggccaggtgcggaggctcacgcctataatcccagcactttgggaggctgaagcaggtgggtcacctgaggtcaggagtttgagacccgcctgaccaatatggcaaaaccctatctctactaataatacaaaaattagccaggcgttgtggcacacacctgtaatcccagctacttgggaggctgaagcaggagaactgcttgaaactgggaggaagaggttgcagtaagctgagatcacaccactgtactccagcctgggccacaagagtgaaactccatctccaaaaaaaaaaaaaaaaaaaaaaaccctaaaattaaccatatctaaagaattaaaggaaagtttgagaacaatatctcaccaatacagaatatcaataaaaatataaaaattattttaaaagaaccaaataggaattctggaatttaaagtgtaggaactgaaatgaaaaattcactacgggggctgaacagtagatttgaactggcagaagaagaatcaacatacatgaagataggttgattgagatgattcagtatgagaaagagaaaggaaaaggaatgaagaaaaatgaatagatcttcagatacctgtgagacaccctcaagtgtgccaatgtatacctaacgggagtcccagaagacaggagagaaaaaaagaaagaaataaaaagaatatttgaatttaaaattgcttgaaaatgtctcaaatttgatgaaaaatattactctgcacattcaacccatgaactataagttgtataaaatcaaaaagtttcacaccaaggcgtgtcatagccaaactgtcaaaagccaaagacacagaatcttgaaagcagtgagagcaaagcagacaagggatccccaataggattaacagcagatttctcatcagaagccatgcaagccagaaggctatgggagacatactcaaaatgctgaaataaaagactgtcaacaaacatttccacatccagcaaaaatcaaaaacgaaggagaaatctgttgcatgtgagctgaatagaatttgtattctgctgttgttggatgaagtattctttaaatgtcaattagatcaatttgattgatgatgctcttcagttcaactatattccctatctgataattccagaatctctatcatgtctgagtctgggtctgatgctttcattgtttcttcagattgtgatttttcttgcctcccagtgtgacttgtaatttttaattgaaagctggatatgatgtatttggcaatgggaagtgagggaaatatgtttttagtgtgagggtttatgttaatctttctcagagttgggctgtttaatgttttgctgtggtctgaatgttccttaaaacttgtgtgttgaaacttaattattattgtcatggtattaagaggtggggcctttgggaagtgattaagacatgaaggctccacattcatgagtggattcatgctttttaaaaggactggaggaaagtagtgtaggctatttttttgcccttgtgccttccaccatgtgaagatatagcattagcccctcctgccatgtaaagactcaggaagaaggccctcagctggacatggtggtgcatgcctgtaatcccagcaccttgggaggccatggcaggaggatcacttgagctcaggagtttgagaccagcctggtcaacacagtgagacctcatctctacaaaaattaaataaaaatttagctaggcatagtgatgtgtgcctgtagtcccagctacttgggaagctgaggtgggaggatcacttgagccctggaggtcgaggctgaagtgagctgtgaacatgccactgcactccagcctgtgtgacagagtaagactctctgtattaaaaaaaaaaaaggctctcactgggcactgaatgcctatgcctagattttggacttcccagcctctagaactgtgagaaataaatttctattgcttataaatgacccagtctgtggtattttgtaacagcaacacagactaaggcatgtttgctgtaactctaggtcccagaggcttcagtttcctctagtgacctctagtttttcctctagtattttttgtcttgtgctttcttaagaaccttcttaaatagagtctgagtcttgctgcactttcacatataatccactgttattttactggagtcctattgttgtggtgctaaagtgaagataccatttcatactcactaggctataataaaaaagatggagagtaaaaagttttggtgaagacatggagaaattggcaccctcatacattgctactgggaatttaaaatggtgtagccat

SEQ ID NO: 2481 - DNA, 1067 bp, Homo sapiens; identical to SEQ ID NO: 2475

SEQ ID NO: 2482 - DNA, 2267 bp, Homo sapiens
ctactccttccctccgcgttccgggcctcggagccgccttgaggaggatgagtccctggagctggttcctgctgcagaccctctgcctcctgcccacgggcgcagcttcgcggcgcggggcgcccggcaccgccaactgcgagctcaagccccaacaaagcgagctgaattccttcttgtggaccattaagcgagacccaccatcttacttctttggcacaatccatgtcccgtacacccgagtttgggacttcatccccgacaactctaaggaggctttcctgcagagcagcattgtgtactttgagttggatctcacagacccctataccatctcagctctcaccagctgtcagatgctgccacagggcgagaacctccaagatgtgctccccagggacatctactgccgcctcaagcgccacctggagtatgtcaagctcatgatgcccttgtggatgaccccagaccagcgcggcaaggggctctacgcagactacctcttcaatgctattgccggaaactgggagcgcaagaggcctgtctgggtgatgctcatggtcaactccctgactgaagtggacattaagtcccgtggagtgcctgtcttagacctgttccttgcccaggaggctgagcggctgaggaaacagactggggcagtggaaaaggtggaagagcagtgccatccattgaatgggttgaacttttcacaggtcatctttgctttgaaccagaccctcctgcagcaggaaagcctgcgagcaggcagtcttcagatcccctacacgacggaggatctcatcaaacactataactgcggggacctcagctccgtcatcctcagccatgacagctcccaggttcccaattttattaatgccacgctaccacctcaggagcgcatcactgctcaggagattgacagctacttacgccgggagctgatctacaagcggaatgagagaatagggaagcgggtgaaggcccttttggaggagttccctgacaaaggcttcttctttgcctttggagctgcttcacagtagccttgaaaatcaggagccttgaactacagtagctgtgaaaactgtttgcctaatggttactggaggggacagaatgggttcaaagttcctccaaagctccatccttaaagaatcatcactatttgacatgtccaatagttccctgaaatttccattcccaagcttgtcttcatttgacctgactcagagcttgctctgtgtgaatagccctattcttagggtgtgtgttgaaaacaatcagtagcagctgtttaacatcatagttgctggaaatagcaatattaattgaagcttacaaggggctgcccaaaaaacttaaaagcaaaatcccatagggggtatagaaaagctctaaaatattcctagagagtcacatgcatgagaagagctgtgcacatgcccaggaaagacctgagaaggtcctaatctctcacctctggctgatcttgaggctctgtgtaagcagagtgtgaaagctaaggcaaagtcataaattgcctgttgaagcatcaaatacatgcccccaaactcacacagcccctctgcaaaggttgggaaacttgcaaggaatttaaggaaatctctgttcagtcattagccagccactaaactaactgagcagatccttcagtgatcacacacaacaaagaatacagactttacagacttagtcctagaaaatcactacacaaacagcaacaacaatgcacctgggactaagggagaggagatgagttccagagttggtatattatttaaatgtctagttttcaataaaaacaattataagacacagagcaaaactagaaagtatggcccatacccagggaaaaacaagcaaccaatagaagctgtccttgaggaagttaatatcttggacttactagaaaatgactttaacactagttattataaatatgttcaaaaaactaaaagaggccaggtgcggaggctcacgcctataatcccagcactttgggaggctgaagcaggtgggtcacctgaggtcaggagtttgagacccgcctgaccaatatggcaaaaccctatctctactaataatacaaaaattagccaggcgttgtggcacacacctgtaatcccagctacttgggaggctgaagcaggagaactgcttgaaactgggaggaagaggttgcagtaagctgagatcacaccactgtactccagcctgggccacaagagtgaaactccatc

SEQ ID NO: 2483 - DNA, 2870 bp, Homo sapiens; identical to SEQ ID NO: 2477

SEQ ID NO: 2484 - DNA, 2440 bp, Homo sapiens
cttgagcgcctcttccggttaccttttcccagcgccagaggcgcctagggttggggtcctcgctcaggcacagagacccgacaccgagcggcggcttccccgggatcgagggacgcgcacgccagaggagacgaaaggaacccgggtcggaccagatcggaaccactgaccattgcccatggcggccctaggccctagcagccagaatgtcactgaatacgtcgttcgagttcctaagaatacaaccaaaaaatataacatcatggcttttaatgcagccgacaaagtcaactttgctacgtggaatcaggctcggctggagcgggacttgagcaacaagaaaatctaccaagaggaggagatgcccgaatcgggcgcgggcagtgagttcaaccgcaagcttcgggaggaggctcggaggaagaagtacggcatcgtcctcaaggagttccggcccgaggaccagccctggctgctccgggtcaacggcaaatcaggcaggaagttcaagggcatcaagaagggaggcgtaacagagaacacgtcctactacatcttcacccagtgccccgacggggccttcgaggccttccccgtgcacaactggtacaatttcacaccgctggcccggcatcgcacgctcactgccgaggaggccgaggaggagtgggagaggaggaacaaggtgctgaaccacttcagcatcatgcagcagcggcggctcaaggatcaggaccaggacgaggatgaggaggagaaggagaaacgtggccgcaggaaggcgagcgagctgcgcatccacgacctggaggacgacctggagatgtcgtccgatgccagtgatgccagtggtgaggaggggggcagagtccccaaggccaagaagaaggcgccgctggccaagggcggcaggaaaaagaagaagaagaagggttcagacgacgaggccttcgaggacagcgatgatggggacttcgagggccaagaggtggactacatgtcagacggctccagtagctcccaagaagagcctgagagcaaggccaaggcgccgcagcaggaggaggggcccaagggtgtcgatgagcagagcgacagtagtgaggagagtgaggaggagaagccgcctgaggaggacaaggaggaggaggaggagaagaaggcacccaccccgcaggagaagaagcgcaggaaagacagcagcgaggagtcggacagctcagaggagagcgacattgacagcgaggcctcctcagccttcttcatggcgaagaagaagacgccacccaagagagagcggaagccgtcgggagggagctcaaggggcaacagccgcccaggcacgcccagcgcagagggtggcagcacctcctccaccctgcgggcggctgccagcaaactcgagcaagggaagcgggtgagcgagatgcctgcagccaagcggttgcggctggacacgggaccccagagcctgtctgggaagtcgacaccccagccaccatcaggcaagacaacacccaacagcggcgacgtgcaggtgactgaggatgccgtgcgccgctacctgacacggaagcccatgaccactaaggacctgctgaaaaagttccagaccaagaagacagggctgagcagcgagcagacagtgaacgtgttggcccagatcctcaagcgactcaaccccgagcgcaagatgatcaacgacaaaatgcacttctccctcaaggagtgaggcttggtccaatacatggctctgccccccagaacttaaggctctcactgccccttcgccatcctagagtgaggctctgtccaatacatggctctgccctccagaacttcaggctctcagtgacccttcgacatcctgcttgctccctgactcccagggccccgtagttagcaattctggaaaagttaagccatctcctcctctggcccttccttctggaatcttcagatgcctgttaggccttcttattgtcctcctcctcctggctcggcctccctcacactgaccaagggcctgtgctgcccactgggtaacttctacagttctcccttccacttccctaagtctctcttcagctgtgacttatccaccacatagcccagtaagtcttcagttttggctgggcatgatggtgagcgcctgcagtcccagctacttgggaggctaagcccagttcaaggctgcagtgaactatgatggtgccactgcattccagcctgggtgacagaatgaaatcctggcacaaaaaaaaaaaagtagccaggcatggtggcgggagcctgttgtcccagctgttccgtaggctgaggcacgagattcacttgaacctgggaggtggaggttgctgtgagctgacaccacgccactgcactccagcctgggtgacagtgagactctgtctcaataaataaaaaataataataaatt

SEQ ID NO: 2485 - DNA, 3079 bp, Homo sapiens
gggccctacagagggtccgccatgttccccggcggcgccgccgcttggctctggtagccgccgcccccgcccccaaccccgcccggcccagagcctagccgagccccgggcccagcatggccgccccggagccggcccgggctgcaccgcccccacccccgcccccgccgccccctcccggggctgaccgcgtcgtcaaagctgtccctttccccccaacacatcgcttgacatctgaagaagtatttgatttggatgggatacccagggttgatgttctgaagaaccacttggtgaaagaaggtcgagtagatgaagaaattgcgcttagaattatcaatgagggtgctgccatccttcggagagagaaaaccatgatagaagtagaagctccaatcacagtgtgtggtgacatccatggccaattttttgatctgatgaaactttttgaagtaggaggatcacctgctaatacacgatacctttttcttggcgattatgtggacagaggttattttagtatagagtgtgtcttatatttatgggttctgaagattctatacccaagcacattatttcttctgagaggcaaccatgaatgcagacaccttactgaatattttacctttaagcaggaatgtaaaattaagtattcggaaagagtctatgaagcttgtatggaagcttttgatagtttgcctcttgctgcacttttaaaccaacagtttctttgtgttcatggtggactttcaccagaaatacacacactggatgatattaggagattagatagattcaaagagccacctgcatttggaccaatgtgtgacttgttatggtccgatccttctgaagattttggaaatgaaaaatcacaggaacattttagtcacaatacagttcgaggatgttcttatttttataactatccagcagtgtgtgaatttttgcaaaacaataatttgttatcgattattagagctcatgaagctcaagatgcaggctatagaatgtacagaaaaagtcaaactacagggttcccttcattaataacaattttttcggcacctaattacttagatgtctacaataataaagctgctgtattaaagtatgaaaataatgtgatgaatattcgacagtttaactgttctccacatccttactggttgcctaattttatggatgtcttcacgtggtctttaccgtttgttggagaaaaagtgacagaaatgttggtaaatgttctgagtatttgctctgatgatgaactaatgactgaaggtgaagaccagtttgatggttcagctgcagcccggaaagaaatcataagaaacaaaattcgagcaattggcaagatggcaagagtcttctctgttctcagggaggagagtgaaagtgtgctgacactcaagggcctgactcccacagggatgttgcctagtggagtgttagctggaggacggcagaccctgcaaagtgccacagttgaggctattgaggctgaaaaagcaatacgaggattctctccaccacatagaatctgcagttttgaagaggcaaagggtttggataggatcaatgagagaatgccacctcggaaagatgctgtacagcaagatggtttcaattctctgaacaccgcacatgccactgagaaccacgggacgggcaaccatactgcccagtgacccactacttcccagggactctcacatctcgggccccaaatggacagatcacccgaggagctggaggggtcggccaagctgactgtaaatttcacagtctctctgaagaaaccattgtgcttctgagaccctagcccccttcctggatggaggcttgagggccctgggacatgtgctatctgataagattgggtcatcgctgccaaggtggagagcagtgagcaaggggcttggggcaatttccagtggagggcatccacacctccattttatgcttgtggttcacacatttaagtttacaaatcagatttcttttccccttcagtagaattagattttgtttttcaatcatgatttcaaatgcaatcctaagagctaatgtggacttttctttttccatgaaatgtctttaaaggatgaattagcatggtcttaaaatacatttctgaggttactagctgtattttgaattgtgagcaaaatgccgagaaacccagttggcatttatacaaaatgttgacctcaggtctatagttcttaaatgtggctaattctgtaacatagtcttggtattttttaattatgaatgcatatcctatttccaggcaggctctcttacttgaacacaaatccaaaaactaatttagagtcttttttgcccagatcttttaagacttacaccccagagatttaagaagaaaacctctaaatttcaaaattatgaagaattacagaattactcatttaaggtactttaaaagaagtttgtacattgtcaaagtaaattttaattcaaatcatgtctgtaaaacttgacgtattttgtgtatgcatgttttcattttgcaaatatttaatatatagacctatgatgtacaggtacgacatgtataggttacctagatgttatgagaaattttagtttattgtgagtactcaagttgcttagagagccaccagggtgatttgctgctggctttctatcatttttatgttttaatgcaaaggaaattttaaaatgttctggaagtgtttttgattaagcaatgcagcctagaagcaatggttctgttcaatcattcagatgttagtggaagcataaaagtcaagactgcatgttgaaacctttcttttgatagttactgaactgcttggttaaactaaatggaaccatgtgctaatttttcacaattattgacctgtattgattgccactgtagtttggtatttccctttactttggtggcctgcttccctcatgccctggaatacaactcagagctccaggcagcggaaccatctattgttttgtttgccagaaagtgcaccctgtatggtctcctgtctaagttggaaatattatgcatgtgcaggactattcgagtatt

SEQ ID NO: 2486 - DNA, 3344 bp, Homo sapiens
ggtacagctgcgcgtctgcgggaataggtgcagcgggcccttggcgggggactctgagggaggagctggggacggcgaccctaggagagttctttggggtgactttcaagatggactctactctaacagcaagtgaaatccggcagcgatttatagatttcttcaagaggaacgagcatacgtatgttcactcgtctgccaccatcccattggatgaccccactttgctctttgccaatgcaggcatgaaccagtttaaacccattttcctgaacacaattgacccatctcaccccatggcaaagctgagcagagctgccaatacccagaagtgcatccgggctgggggcaaacaaaatgacctggacgatgtgggcaaggatgtctatcatcacaccttcttcgagatgctgggctcttggtcttttggagattactttaaggaattggcatgtaagatggctctggaactcctcacccaagagtttggcattcccattgaaagactttatgttacttactttggcggggatgaagcagctggcttagaagcagatctggaatgcaaacagatctggcaaaatttggggctggatgacaccaaaatcctcccaggcaacatgaaggataacttctgggagatgggtgacacgggcccctgtggtccttgcagtgagatccactacgaccggattggtggtcgggacgccgcacatcttgtcaaccaggacgaccctaatgtgctggagatctggaaccttgtgttcatccagtataacagggaagctgatggcattctgaaacctcttcccaagaaaagcattgacacagggatgggcctggaacgactggtatctgtgctgcagaataagatgtccaactatgacactgacctttttgtcccttactttgaagccattcagaagggcacaggtgcccgaccatacactgggaaagttggtgctgaggatgccgatgggattgacatggcctaccgggtgctggctgaccatgctcggaccatcactgtggcactggctgatggtggccggcctgacaacacagggcgtggatatgtgttgagacggattctccgccgagctgtccgatacgcccatgaaaagctcaatgccagcaggggcttctttgctacgttagtggatgttgtcgtccagtccctgggagatgcatttcctgagctgaagaaggacccagacatggtgaaggacatcattaatgaagaagaggtgcagtttctcaagactctcagcagagggcgtcgcatcctggacaggaaaattcagagcctgggagacagcaagaccattcccggagacactgcttggctcctctatgacacctatgggtttccagtggatctgactggactgattgctgaagagaagggcctggtggtagacatggatggctttgaagaggagaggaaactggcccagctgaaatcacagggcaagggagctggtggggaagacctcattatgctggacatttacgctatcgaagagctccgggcacggggtctggaggtcacagatgattccccaaagtacaattaccatttggactccagtggtagctatgtatttgagaacacagtggctacggtgatggctctgcgcagggagaagatgttcgtggaagaggtgtccacaggccaggagtgtggagtggtgctggacaagacctgtttctatgctgagcaaggaggccagatctatgacgaaggctacctggtgaaggtggatgacagcagtgaagataaaacagagtttacagtgaagaatgctcaggtccgaggagggtatgtgctacacattggaaccatctacggtgacctgaaagtgggggatcaggtctggctgtttattgatgagccccgacgaagacccatcatgagcaaccacacagctacgcacattctgaacttcgccctgcgctcagtgcttggggaagctgaccagaaaggctcattggttgctcctgaccgcctcagatttgactttactgccaagggagccatgtccacccaacagatcaagaaggctgaagagattgctaatgagatgattgaggcagccaaggccgtctatacccaggattgccccctggcagcagcgaaagccatccagggcctacgggctgtgtttgatgagacctatcctgaccctgtgcgagtcgtctccattggggtcccggtgtccgagttgctggatgacccctctgggcctgctggctccctgacttctgttgagttctgtgggggaacgcacctgcggaactcgagtcatgcaggagcttttgtgatcgtgacggaagaagccattgccaagggtatccggaggattgtggctgtcacaggtgccgaggcccagaaggccctcaggaaagcagagagcttgaagaaatgtctctctgtcatggaagccaaagtgaaggctcagactgctccaaacaaggatgtgcagagggagatcgctgaccttggagaggccctggccactgcagtcatcccccagtggcagaaggatgaattgcgggagactctcaaatccctaaagaaggtcatggatgacttggaccgagccagcaaagccgatgtccagaaacgagtgttagagaagacgaagcagttcatcgacagcaaccccaaccagcctcttgtcatcctggagatggagagcggcgcctcagccaaggccctgaatgaagccttgaagctcttcaagatgcactcccctcagacttctgccatgctcttcacggtggacaatgaggctggcaagatcacgtgcctgtgtcaagtcccccagaatgcagccaatcggggcttaaaagccagcgagtgggtgcagcaggtgtcaggcttgatggacggtaaaggtggtggcaaggatgtgtctgcacaggccacaggcaagaacgttggctgcctgcaggaggcgctgcagctggccacttccttcgcccagctgcgcctcggggatgtaaagaactgagtggggaaggaggaggctcccactggatccatccgtccagccaagagctcttcatctgctacaagaacatttgaatcttgggacctttaaagagcccctcctaacccagcagtaactggaacacacttgggagcagtcctatgtctcagtgccccttaaatttctgccctgagccctccacgtcagtgccatcggtctagaaccactaaccccgcattgctgttgatcgtcacgctcgcatctatagataacggctctccagacctgagctttccgcgtcagcaagtaggaatcgtttttgctgcagagaataaaaggaccacgtgc

SEQ ID NO: 2487 - DNA, 4446 bp, Homo sapiens
tgccttgaccaggacttgggactttgcgaaaggatcgcggggcccggagaggtgttggagagcacaatggctgaacaagtccttcctcaggctttgtatttgagcaatatgcggaaagctgtgaagatacgggagagaactccagaagacatttttaaacctactaatgggatcattcatcattttaaaaccatgcaccgatacacactggaaatgttcagaacttgccagttttgtcctcagtttcgggagatcatccacaaagccctcatcgacagaaacatccaggccaccctggaaagccagaagaaactcaactggtgtcgagaagtccggaagcttgtggcgctgaaaacgaacggtgacggcaattgcctcatgcatgccacttctcagtacatgtggggcgttcaggacacagacttggtactgaggaaggcgctgttcagcacgctcaaggaaacagacacacgcaactttaaattccgctggcaactggagtctctcaaatctcaggaatttgttgaaacggggctttgctatgatactcggaactggaatgatgaatgggacaatcttatcaaaatggcttccacagacacacccatggcccgaagtggacttcagtacaactcactggaagaaatacacatatttgtcctttgcaacatcctcagaaggccaatcattgtcatttcagacaaaatgctaagaagtttggaatcaggttccaatttcgcccctttgaaagtgggtggaatttacttgcctctccactggcctgcccaggaatgctacagataccccattgttctcggctatgacagccatcattttgtacccttggtgaccctgaaggacagtgggcctgaaatccgagctgttccacttgttaacagagaccggggaagatttgaagacttaaaagttcactttttgacagatcctgaaaatgagatgaaggagaagctcttaaaagagtacttaatggtgatagaaatccccgtccaaggctgggaccatggcacaactcatctcatcaatgccgcaaagttggatgaagctaacttaccaaaagaaatcaatctggtagatgattactttgaacttgttcagcatgagtacaagaaatggcaggaaaacagcgagcaggggaggagagaggggcacgcccagaatcccatggaaccttccgtgccccagctttctctcatggatgtaaaatgtgaaacgcccaactgccccttcttcatgtctgtgaacacccagcctttatgccatgagtgctcagagaggcggcaaaagaatcaaaacaaactcccaaagctgaactccaagccgggccctgaggggctccctggcatggcgctcggggcctctcggggagaagcctatgagcccttggcgtggaaccctgaggagtccactggggggcctcattcggccccaccgacagcacccagcccttttctgttcagtgagaccactgccatgaagtgcaggagccccggctgccccttcacactgaatgtgcagcacaacggattttgtgaacgttgccacaacgcccggcaacttcacgccagccacgccccagaccacacaaggcacttggatcccgggaagtgccaagcctgcctccaggatgttaccaggacatttaatgggatctgcagtacttgcttcaaaaggactacagcagaggcctcctccagcctcagcaccagcctccctccttcctgtcaccagcgttccaagtcagatccctcgcggctcgtccggagcccctccccgcattcttgccacagagctggaaacgacgcccctgctggctgcctgtctcaagctgcacggactcctggggacaggacggggacgagcaagtgcagaaaagccggctgcgtgtattttgggactccagaaaacaagggcttttgcacactgtgtttcatcgagtacagagaaaacaaacattttgctgctgcctcagggaaagtcagtcccacagcgtccaggttccagaacaccattccgtgcctggggagggaatgcggcacccttggaagcaccatgtttgaaggatactgccagaagtgtttcattgaagctcagaatcagagatttcatgaggccaaaaggacagaagagcaactgagatcgagccagcgcagagatgtgcctcgaaccacacaaagcacctcaaggcccaagtgcgcccgggcctcctgcaagaacatcctggcctgccgcagcgaggagctctgcatggagtgtcagcatcccaaccagaggatgggccctggggcccaccggggtgagcctgcccccgaagacccccccaagcagcgttgccgggcccccgcctgtgatcattttggcaatgccaagtgcaacggctactgcaacgaatgctttcagttcaagcagatgtatggctaaccggaaacaggtgggtcacctcctgcaagaagtggggcctcgagctgtcagtcatcatggtgctatcctctgaacccctcagctgccactgcaacagtgggcttaagggtgtctgagcaggagaggaaagataagctcttcgtggtgcccacgatgctcaggtttggtaacccgggagtgttcccaggtggccttagaaagcaaagcttgtaactggcaagggatgatgtcagattcagcccaaggttcctcctctcctaccaagcaggaggccaggaacttctttggacttggaaggtgtgcggggactggccgaggcccctgcaccctgcgcatcaggactgcttcatcgtcttggctgagaaagggaaaagacacacaagtcgcgtgggttggagaagccagagccattccacctcccctcccccagcatctctcagagatgtgaagccagatcctcatggcagcgaggccctctgcaagaagctcaaggaagctcagggaaaatggacgtattcagagagtgtttgtagttcatggtttttccctacctgcccggttcctttcctgaggacccggcagaaatgcagaaccatccatggactgtgattctgaggctgctgagactgaacatgttcacattgacagaaaaacaagctgctctttataatatgcaccttttaaaaaattagaatattttactgggaagacgtgtaactctttgggttattactgtctttacttctaaagaagttagcttgaactgaggagtaaaagtgtgtacatatataatatacccttacattatgtatgagggatttttttaaattatattgaaatgctgccctagaagtacaataggaaggctaaataataataacctgttttctggttgttgttggggcatgagcttgtgtatacactgcttgcataaactcaaccagctgcctttttaaagggagctctagtcctttttgtgtaattcactttatttattttattacaaacttcaagattatttaagtgaagatatttcttcagctctggggaaaatgccacagtgttctcctgagagaacatccttgctttgagtcaggctgtgggcaagttcctgaccacagggagtaaattggcctctttgatacacttttgcttgcctccccaggaaagaaggaattgcatccaaggtatacatacatattcatcgatgtttcgtgcttctccttatgaaactccagctatgtaataaaaaactatactctgtgttctgttaatgcctctgagtgtcctacctccttggagatgagatagggaaggagcagggatgagactggcaatggtcacagggaaagatgtggccttttgtgatggttttattttctgttaacactgtgtcctgggggggctgggaagtcccctgcatcccatggtaccctggtattgggacagcaaaagccagtaaccatgagtatgaggaaatctctttctgttgctggcttacagtttctctgtgtgctttgtggttgctgtcatatttgctctagaagaaaaaaaaaaaaggaggggaaatgcattttccccagagataaaggctgccattttgggggtctgtacttatggcctgaaaatatttgtgatccataactctacacagcctttactcatactattaggcacactttccccttagagccccctaagtttttcccagacgaatctttataatttctttccaaagataccaaataaacttcagtgttttcatctaattctcttaaagttgatatcttaatattttgtgttgatcattatttccattcttaatgtgaaaaaaagtaattatttatacttattataaaaagtatttgaaatttgcacatttaattgtccctaatagaaagccacctattctttgttggatttcttcaagtttttctaaataaatgtaacttttcacaagagtcaacattaaaaaataaattatttaagaacaaaaaaaaaaaaaaa

SEQ ID NO: 2488 - DNA, 2098 bp, Homo sapiens
cgcggcgcggcatactcagcggcagagacggaagaacagcgctcccgaggccgcgggagcctgcagagaggacagccggcctgcgccgggacatgcggccccaggagctccccaggctcgcgttcccgttgctgctgttgctgttgctgctgctgccgccgccgccgtgccctgcccacagcgccacgcgcttcgaccccacctgggagtccctggacgcccgccagctgcccgcgtggtttgaccaggccaagttcggcatcttcatccactggggagtgttttccgtgcccagcttcggtagcgagtggttctggtggtattggcaaaaggaaaagataccgaagtatgtggaatttatgaaagataattaccctcctagtttcaaatatgaagattttggaccactatttacagcaaaattttttaatgccaaccagtgggcagatatttttcaggcctctggtgccaaatacattgtcttaacttccaaacatcatgaaggctttaccttgtgggggtcagaatattcgtggaactggaatgccatagatgaggggcccaagagggacattgtcaaggaacttgaggtagccattaggaacagaactgacctgcgttttggactgtactattccctttttgaatggtttcatccgctcttccttgaggatgaatccagttcattccataagcggcaatttccagtttctaagacattgccagagctctatgagttagtgaacaactatcagcctgaggttctgtggtcggatggtgacggaggagcaccggatcaatactggaacagcacaggcttcttggcctggttatataatgaaagcccagttcggggcacagtagtcaccaatgatcgttggggagctggtagcatctgtaagcatggtggcttctatacctgcagtgatcgttataacccaggacatcttttgccacataaatgggaaaactgcatgacaatagacaaactgtcctggggctataggagggaagctggaatctctgactatcttacaattgaagaattggtgaagcaacttgtagagacagtttcatgtggaggaaatcttttgatgaatattgggcccacactagatggcaccatttctgtagtttttgaggagcgactgaggcaaatggggtcctggctaaaagtcaatggagaagctatttatgaaacccatacctggcgatcccagaatgacactgtcaccccagatgtgtggtacacatccaagcctaaagaaaaattagtctatgccatttttcttaaatggcccacatcaggacagctgttccttggccatcccaaagctattctgggggcaacagaggtgaaactactgggccatggacagccacttaactggatttctttggagcaaaatggcattatggtagaactgccacagctaaccattcatcagatgccgtgtaaatggggctgggctctagccctgactaatgtgatctaaagtgcagcagagtggctgatgctgcaagttatgtctaaggctaggaactatcaggtgtctataattgtagcacatggagaaagcaaatgtaaaactggataagaaaattattttggcagttcagccctttccctttttcccactaaattttttcttaaattacccatgtaaccattttaactctccagtgcactttgccattaaagtctcttcacattgatttgtttccatgtgtgactcagaggtgagaattttttcacattatagtagcaaggaattggtggtattatggaccgaactgaaaattttatgttgaagccatatcccccatgattatatagttatgcatcacttaatatggggatattttctgggaaatgcattgctagtcaatttttttttgtgccaacatcatagagtgtatttacaaaatcctagatggcatagcctactacacacctaatgtgtatggtatagactgttgctcctaggctacagacatatacagcatgttactgaatactgtaggcaatagtaacagtggtatttgtatatcgaaacatatggaaacatagagaaggtacagtaaaaatactgtaaaa

SEQ ID NO: 2489 - DNA, 2334 bp, Homo sapiens
gtcccggccgccgggaggaagtggccgggcggtcgcagggactccggggcgaccgccgcgagtccgcagtagttcgggccatggaggcggagccgccgctctacccgatggcgggggctgcggggccgcagggcgacgaggacctgctcggggtcccggacgggcccgaggccccgctggacgagctggtgggcgcgtaccccaactacaacgaggaggaggaggagcgccgctactaccgccgcaagcgcctgggcgtgctcaagaacgtgctggctgccagcgccgggggcatgctcacctacggcgtctacctgggcctcctgcagatgcagctgatcctgcactacgacgagacctaccgcgaggtgaagtatggcaacatggggctgcccgacatcgacagcaaaatgctgatgggcatcaacgtgactcccatcgccgccctgctctacacacctgtgctcatcaggttttttggaacgaagtggatgatgttcctcgctgtgggcatctacgccctctttgtctccaccaactactgggagcgctactacacgcttgtgccctcggctgtggccctgggcatggccatcgtgcctctttgggcttccatgggcaactacatcaccaggatggcgcagaagtaccatgagtactcccactacaaggagcaggatgggcaggggatgaagcagcggcctccgcggggctcccacgcgccctatctcctggtcttccaagccatcttctacagcttcttccatctgagcttcgcctgcgcccagctgcccatgatttatttcctgaaccactacctgtatgacctgaaccacacgctgtacaatgtgcagagctgcggcaccaacagccacgggatcctcagcggcttcaacaagacggttctgcggacgctcccgcggagcggaaacctcattgtggtggagagcgtgctcatggcagtggccttcctggccatgctgctggtgctgggtttgtgcggagccgcttaccggcccacggaggagatcgatctgcgcagcgtgggctggggcaacatcttccagctgcccttcaagcacgtgcgtgactaccgcctgcgccacctcgtgcctttctttatctacagcggcttcgaggtgctctttgcctgcactggtatcgccttgggctatggcgtgtgctcggtggggctggagcggctggcttacctcctcgtggcttacagcctgggcgcctcagccgcctcactcctgggcctgctgggcctgtggctgccacgcccggtgcccctggtggccggagcaggggtgcacctgctgctcaccttcatcctctttttctgggcccctgtgcctcgggtcctgcaacacagctggatcctctatgtggcagctgccctttggggtgtgggcagtgccctgaacaagactggactcagcacactcctgggaatcttgtacgaagacaaggagagacaggacttcatcttcaccatctaccactggtggcaggctgtggccatcttcaccgtgtacctgggctcgagcctgcacatgaaggctaagctggcggtgctgctggtgacgctggtggcggccgcggtctcctacctgcggatggagcagaagctgcgccggggcgtggccccgcgccagccccgcatcccgcggccccagcacaaggtgcgcggttaccgctacttggaggaggacaactcggacgagagcgacgcggagggcgagcatggggacggcgcggaggaggaggcgccgcccgcagggcccaggcctggccccgagcccgctggactcggccgccggccctgcccgtacgaacaggcgcaggggggagacgggccggaggagcagtgaggggccgcctggtccccggactcagcctccctcctcgccggcctcagtttaccacgtctgaggtcggggggaccccctccgagtcccgcgctgtcttcaaaggcccctgtctcccctcccccacgttggggacgcccctcccagagcccaggtcacctccgggcttccgcagccccctccaaggcggagtggagccttgggaacccctcggccaagcacaggggttcgaaaatacagctgaaaccccgcgggcccttagcacgcgccccagcgccggagcacggtcagggtcttcttgcgacccggcccgctccagatccccacagctctcggccgcggacccgggccgcgtgtgagcgcactttgcacctcctatccccagggtccgccgagagccacgattttttacagaaaatgagcaataaagagattttgtactgtcaaaaaaaaaaaaaaaaaa

SEQ ID NO: 2490 - DNA, 3163 bp, Homo sapiens
cggaagctgagagggcccgcgggtaggcatggcggcgcaccttaagaagcgggtttatgaggaattcacgaaagtggttcagccacaggaggaaattgctactaagaaactccgactaacaaaaccaagtaaatctgcagcactccacatagatctgtgtaaagctacctccccagcagatgctttgcaatacttgctccagtttgccaggaagcctgtcgaggcggaaagcgtagagggagtagtcaggattctcttggaacattattacaaggagaatgatccatctgtgagactgaaaattgcatcattgttgggtttattatcaaagacagcaggattttcaccagactgcattatggatgatgccatcaacatcctgcagaatgaaaagtctcatcaagtcctagctcaactgctggatactttgcttgcaattggcactaagctaccagagaatcaagctatccaaatgcgattagttgatgtggcctgcaagcatctgacagatacgtctcatggtgtaagaaataagtgcctgcagttacttggcaatcttggctctttggagaaaagtgtcacaaaagatgcagaaggcctagctgccagagatgtccagaagattataggggattacttcagtgaccaagacccacgtgtcagaacagcagctataaaagccatgttgcagctccatgaaagaggactgaaattacaccaaacaatttataatcaggcctgtaaattactctctgatgactatgaacaagtgcgcagtgctgcagtccagcttatctgggtcgtcagtcagctctatcctgaaagcattgtcccaattccttcttctaatgaagaaatacgcttagttgatgatgcgtttggcaaaatttgtcacatggtcagtgatggctcttgggtggttcgtgttcaggcagcaaaactgttgggctctatggagcaagtcagttctcatttcttggagcagacccttgacaagaagctgatgtcagatctgaggaggaaacgtactgcacatgagcgtgccaaggaactttacagttcgggggagttttccagtggcagaaagtggggagatgatgctcccaaggaagaagtagataccggggctgtgaacttgattgagtcaggagcttgtggagcttttgttcatgggttggaagatgagatgtatgaggttcgtattgctgctgtggaggccctctgcatgttggcccagtcttcaccctcttttgctgagaagtgccttgatttcctagttgacatgttcaacgatgaaattgaggaagtacgtctgcagtctatacataccatgagaaaaatctctaacaacatcaccctccgagaagatcagcttgacactgtcctggctgtgctagaggattcatccagagatattcgagaggctcttcatgaactcttatgctgtactaatgtttcaaccaaagaagggattcatcttgcattggtggagctgctgaaaaatttaaccaagtaccctactgatagggactccatatggaagtgcttgaagtttctgggaagtcggcatccaaccctggtgcttcccttggtgccagagcttctgagcacccacccattttttgacacagctgaaccagacatggatgatccagcttatattgcagttttggtacttattttcaatgctgctaaaacctgtccaacaatgccagcattgttctcagatcacaccttcaggcactatgcctacctccgagacagtctttctcatcttgttcctgccttgaggttaccaggtagaaaactggtgtcatcagctgtttctcccagcatcatacctcaagaggatccttcccagcagttcctgcagcagagccttgaaagagtgtatagtcttcagcacttggaccctcagggagcccaggagctgctggaattcaccatcagggatctgcaaagacttggagaacttcaatctgaattggcaggagtagctgatttctctgccacctatcttcgctgtcaactacttctcatcaaggccttgcaggaaaagttgtggaatgtagctgcccctttgtatttgaagcagagtgatttggcctcagcagcagcgaaacagattatggaagagacctacaaaatggaattcatgtacagtggtgtggagaataagcaggtggtgattatacatcacatgaggctgcaggccaaagctttgcaacttatagtaacagcacgaactacacgaggacttgaccccttatttgggatgtgtgaaaaatttttacaggaagtagacttttttcagaggtatttcatcgctgatttgccccacttgcaggacagctttgtggacaaactccttgaccttatgccccgactcatgacatccaaacctgcagaagtggtcaaaattctacagaccatgctgcgacagagtgcctttctgcatctcccgcttccagagcagatccacaaagcctcagccaccatcatcgagccagcgggcgagtcagacaaccctttgcggtttacctctgggttggtggttgccctggatgttgatgcaaccctggagcatgtgcaggatcctcagaacactgttaaggtccaggtcttatatccagatggccaggctcagatgattcaccccaagcctgcagacttccggaatcctggcccagggcggcaccggctcatcactcaggtttatctctcccacaccgcttggacagaggcatgccaggtggaagtgaggctgctgctggcctacaactccagtgctcgcattccaaaatgcccctggatggagggtggtgagatgtcaccacaggtggaaaccagcatcgagggcaccattcccttcagcaagcctgtaaaagtttatataatgcccaaacctgcacggcgctaaggcaaaaacagtcttcccaaccgtggcctagagggcccttcttaggtgtcagaatgagccaagcctgaagcacttcacctggaattgatgtgtaggcttaaggagtatgtgacccttacagtctcatctggtatcaaacacaggataaattgtttcttcattaaaaaataaaaaaccttcaagtctacttacccttctcctgtccacaataaagttgagaaaacaccaaaaaaaaaaaaaaaa

SEQ ID NO: 2491 - DNA, 1805 bp, Homo sapiens
ggcatagcgccgaccctcgctccccgcccaggacccgaatgaacctggagagcggatgccagcagtggccgaggcgctaggacaggaaggaccgccagacctctcaagatcagccttcctcgccaccgttctcacctctttgtccgctgccttctcctcaatgcctagcagcgcgtacagcctgcccttctccaggtcgctggagttagattaccacacttcctcctgcttccggggcaccatggtgaaggctgactgtcctgtccctatcacagacctgccagattcctctggtaaactgcagtacggctgtaagaattgtggcagggccttctgttcaggctgcctaagcttcagtgcagcagtgcctcggactgggaacacccaacagaaagtctgcaagcaatgccatgaggtcctgaccagagggtcttctgccaatgcctccaagtggtcaccacctcagaactataagaagcgtgtggcagccttggaagccaagcaaaagcccagcacttcccagagccagggactgacacgacaagaccagatgattgctgagcgcctagcacgactccgccaggagaacaagcccaagttagtcccctcacaggcagagatagaggcacggctggctgccctaaaggatgaacgtcagggttccatcccttccacccaggaaatggaggcacgacttgcagcgttgcagggcagagttctaccttctcaaaccccccagccggcacatcacacaccggacaccaggacccaagcccagcagacacaggatctgctaacgcagctggcagctgaggtggctatcgatgaaagctggaaaggaggaggcccagctgcctctctccagaatgatctcaaccagggtggcccagggagcactaattccaagaggcaggccaactggtccttggaggaggagaagagcagactgctggctgaggcagcacttgagttgcgggaggagaacacgaggcaggaacggattctggccctggccaagcgactagccatgctgcggggacaggaccccgagagagtgaccctccaggactatcgcctcccagacagtgatgacgacgaggatgaggagacagccatccaaagagtcctgcagcagctcactgaagaagcttccctggatgaggcaagtggctttaacatccctgcagagcaggcttctcgaccctggacgcaaccccgcggggcagagcctgaggcccaggatgtggaccccaggcctgaggctgaggaagaggagctcccctggtgctgcatctgcaatgaggatgccaccctacgctgcgctggctgcgatggggacctcttctgtgcccgctgcttccgagagggccatgatgcctttgagcttaaagagcaccaagacatctgcctactctcctccacgtgcaggccaagagcactgaagacaccctggtcctcccggaagggcagtcccacaggcagcggcacccatttctgggcccagccacaggacgtccgatgggagagcttgtctggctctactgatgatggataggccccttcctgagccttggtgtccctggaatgaggaaagattctccattcgagagaatgactgggagggaagaagtcggggccctcctattagaagcccagactggaagtgagaggcatgatggggagagaccagactgaatctacgggtgagccctgtaacctggctctagggcacaggcccctcccctggcacttagtgggtctaataaagtatgttgattcattgggaaaaaaaaaaaaaaaaaaaa

SEQ ID NO: 2492 - DNA, 1929 bp, Homo sapiens
ctggggacgggggccgagtagcgccttccccgggccccgtgaaccggctgcgggtcgcccttggggggcagcggccgcagccccccacctgggccctcggtccgccctcccggcgcgtccatgaactcagtgtcgccggccgccgcgcagtaccggagcagcagcccggaggacgcgcgccgccggcccgaggcccgcaggccgcggggtcccagaggcccagaccccaacggcctggggccttccggagccagcggccccgctcttggctctcccggggctggcccgagtgagccggacgaagtggacaagttcaaggccaagttcctgacagcctggaacaacgtcaagtacggttgggtggttaaaagccggaccagctttagcaagatctccagcatccacctctgtggccgccgctaccgtttcgagggcgagggtgacatacagcgtttccagcgggactttgtgtcccgcctgtggctcacataccgccgggacttcccgccccttcctgggggctgcctgacctcggactgtggctgggggtgcatgttacgcagcggccagatgatgctggcacagggccttctgctgcatttcctgcccagagactggacatgggccgagggcatgggcctgggcccccctgagctgtcagggtcagcctctcccagccggtaccatgggcctgcccgctggatgcccccacgctgggcccagggtgcccctgagctggagcaggaacgccggcaccggcagattgtgtcctggttcgccgaccacccccgggccccctttggcctacaccggctggtggagcttgggcagagctcaggcaagaaggcaggtgactggtatgggccatcgctagtggcacacatcctcaggaaagccgtggagagctgctccgacgtcacccgcctggtggtgtacgtttctcaggactgcacagtgtacaaggcggatgtggcacgcctggtggccaggccagaccccacagccgagtggaagtctgtggtcatcctggtgcccgtgcgactgggtggcgagactctcaaccccgtgtatgtgccctgcgtgaaggaactcctgcgttgcgagctgtgcctgggcatcatgggtgggaaaccgcgacactcactgtacttcattggctaccaagatgacttcctgctgtacctggaccctcactactgccagcccactgtggatgtcagccaggccgacttccccctggagtccttccactgcacctcgccccgcaagatggcctttgccaagatggacccaagctgtaccgtgggcttctatgctggagacaggaaggagtttgagacactctgctcagagctgaccagggtcctcagctcctcctcagccacagagcggtaccccatgttcaccctggccgagggccatgctcaggaccacagcctggacgacctctgctcccagctcgcccagcccacactccggctccctcgcacagggcggctcctcagggccaaacgccccagctctgaggactttgtgtttttataaagggaggggatgaggggaaagatacaacactatttatttttttatttatgtcatgtcgggtgtgggatcttgagctctggcagtgatgatggtacttcctgttgtcagcccctcaagcccagctgcaaccagtctggggccattcagccagggacagagcccacagagcccatacacctgtctcccaccagcggggccctcctggcagggtagggaaggaggaccccgggcacccccctcagggcctgactcacgtactgtagtttgcactggacgcccgggccctccctgtcccaaagcccccttgggggaactgtggctgctgggggccaataaagctgtgtaacttgaaaaaaaaaaaaaaaaaaaaaaaaaaaaaaaaaa

SEQ ID NO: 2493 - DNA, 3347 bp, Homo sapiens
ctatcccatagtctcgctgccctgagcctcccgtgccggccggccggccgggggaacaggcgggcgctcggggggcgctcggggggcggggggagttccggttccggttctttgtgcggctgcatcggcggctccgggaagatggcggcccgggcgggtttccagtctgtggctccaagcggcggcgccggagcctcaggaggggcgggcgcggctgctgccttgggcccgggcggaactccggggcctcctgtgcgaatgggcccggctccgggtcaagggctgtaccgctccccgatgcccggagcggcctatccgagaccaggtatgttgccaggcagccgaatgacacctcagggaccttccatgggaccccctggctatggggggaacccttcagtccgacctggcctggcccagtcagggatggatcagtcccgcaagagacctgcccctcagcagatccagcaggtccagcagcaggcggtccaaaatcgaaaccacaatgcaaagaaaaagaagatggctgacaaaattctacctcaaaggattcgtgaactggtaccagaatcccaggcctatatggatctcttggcttttgaaaggaaactggaccagactatcatgaggaaacggctagatatccaagaggccttgaaacgtcccatcaagcaaaaacggaagctgcgaattttcatttctaacactttcaatccggctaagtcagatgccgaggatggggaagggacggtggcttcctgggagcttcgggtagaaggacggctcctggaggattcagccttgtccaaatatgatgccactaaacaaaagaggaagttctcttccttttttaagtccttggtgattgaactggacaaagacctgtatgggccagacaaccatctggtagaatggcacaggaccgccactacccaggagaccgatggctttcaggtgaagcggccgggagacgtgaatgtacggtgtactgtcctactgatgctggattaccagcctccccagtttaaattagacccccgcctagctcgactcctgggcatccatacccagactcgtccagtgatcatccaagcactgtggcaatatattaagacacataagctccaggaccctcacgagcgggagtttgtcatctgtgacaagtacctgcagcagatctttgagtctcaacgtatgaagttttcagagatccctcagcggctccatgccttgcttatgccaccagaacctatcatcattaatcatgtcatcagtgttgacccgaatgatcagaaaaagacagcttgttatgacattgatgttgaagtggatgacaccttgaagacccagatgaattcttttctgctgtccactgccagccaacaggagattgctactctagacaacaagatccatgagacaatagaaaccatcaaccagctgaagactcagcgggagttcatgctgagctttgccagagaccctcagggtttcatcaatgactggcttcagtcccagtgcagggacctcaagacaatgactgatgtggtgggtaacccagaggaggagcgccgagctgagttctacttccagccctgggctcaggaggctgtgtgccgatacttctactccaaggtgcagcagagacgacaagaattagagcaagccctgggaatccggaatacatagggcctctcccacagccctgattcgactgcaccaattcttgatttgggccctgtgctgcctgcctcatagtatctgccttggtcttgcttggggcgttccaggggatgctgttggttcaaggacaacaccagaatgaagagggtctcacaagacacctgttatcctcttctttcaccctatctcttcccacccccagcttccctttgccccacaaagttcccatgtgcctgtaccctcccctggtctacataggacctctagatagtgttagagagagaacatgtagtggtaatgagtgcttggaatggattgggcctcaggccaggtggtcttcaaggggaccagctaactgatcctgcccttcagagacccaggagttgggagctttcgctccttctccaagactcaggcctgtgggcactctataagctagttgatcttggctctcctgataacagaatccaatttccttccttccctccacaggtttggaacaaactctcccttcacttgttgccctgtagcactacagaaaccctggttcttgggctccactgagccccaggtcagtccccagccctctgggttggcctgctgtcagtgcttctctcactccttagttggggtccacatcagtattggagttttgttctttattgctccctcccagacactccctgtggctgccctttgtgattccctcagatctgccctaatcccgggcatttgggtgggggaatcttgcctttccctttcagagccccagggatctcatctggggaactgtcattgccagcagaggctgttccttcctgctgtttggagatgtgactcattcattcactcactccaccctgcctctgcatcccttaatggagaaacgggcctaaaaccaaacgggtaaaaagccctgggccatccctgtcttcctgtcccttgtctgcccagttgacacctactggtgacttctagggcactgaggagtgaaagcgcctagggctggagaatagcgctgagttgggtttgtgactcttccctctccctgcctcacaggattgtgactccccagcccctgccctcaaagcttcagacccctcaggtagcagcaggaccttgtgatcttggccccttggatctgagatggtttttgcatctttccaggagagcctcacattcttcttccaggttgtatcacccccgagttagcatatcccaggctcgcagactcaacacagcaagggtgggagacagctgggcacaaagggggaattccgttcagcatgggctctaaacccacagaactgacaaagcccctgcttccccaccccctcctcaggctcctgcgagcacacccccacccccaaatccctccctgttctacactggggacagcagaattttctccccgtcttccccttcctgccattttccctcccttgaaaggttgacactggacaaccttggggcagctgagccctggccgcctcctggctggaaccatgagaaggaagctcagtacttcccacagtgtccctgttgataactgtttttattaactgaattgtttttttcatggaccaaacttttttttgtactgtccccttattgatgttacccagttttaataaaagaatcttctgaaaaaaaaaaaaaaaaaa

SEQ ID NO: 2494 - DNA, 3208 bp, Homo sapiens
ctatcccatagtctcgctgccctgagcctcccgtgccggccggccggccgggggaacaggcgggcgctcggggggcgctcggggggcggggggagttccggttccggttctttgtgcggctgcatcggcggctccgggaagatggcggcccgggcgggtttccagtctgtggctccaagcggcggcgccggagcctcaggaggggcgggcgcggctgctgccttgggcccgggcggaactccggggcctcctgtgcgaatgggcccggctccgggtcaagggctgtaccgctccccgatgcccggagcggcctatccgagaccaggtatgttgccaggcagccgaatgacacctcagggaccttccatgggaccccctggctatggggggaacccttcagtccgacctggcctggcccagtcagggatggatcagtcccgcaagagacctgcccctcagcagatccagcaggtccagcagcaggcggtccaaaatcgaaaccacaatgcaaagaaaaagaagatggctgacaaaattctacctcaaaggattcgtgaactggtaccagaatcccaggcctatatggatctcttggcttttgaaaggaaactggaccagactatcatgaggaaacggctagatatccaagaggccttgaaacgtcccatcaagcaaaaacggaagctgcgaattttcatttctaacactttcaatccggctaagtcagatgccgaggatggggaagggacggtggcttcctgggagcttcgggtagaaggacggctcctggaggattcagccttgtccaaatatgatgccactaaacaaaagaggaagttctcttccttttttaagtccttggtgattgaactggacaaagacctgtatgggccagacaaccatctggtagaatggcacaggaccgccactacccaggagaccgatggctttcaggtgaagcggccgggagacgtgaatgtacggtgtactgtcctactgatgctggattaccagcctccccagtttaaattagacccccgcctagctcgactcctgggcatccatacccagactcgtccagtgatcatccaagcactgtggcaatatattaagacacataagctccaggaccctcacgagcgggagtttgtcatctgtgacaagtacctgcagcagatctttgagtctcaacgtatgaagttttcagagatccctcagcggctccatgccttgcttatgccaccagaacctatcatcattaatcatgtcatcagtgttgacccgaatgatcagaaaaagacagcttgttatgacattgatgttgaagtggatgacaccttgaagacccagatgaattcttttctgctgtccactgccagccaacaggagattgctactctagacaacaagacaatgactgatgtggtgggtaacccagaggaggagcgccgagctgagttctacttccagccctgggctcaggaggctgtgtgccgatacttctactccaaggtgcagcagagacgacaagaattagagcaagccctgggaatccggaatacatagggcctctcccacagccctgattcgactgcaccaattcttgatttgggccctgtgctgcctgcctcatagtatctgccttggtcttgcttggggcgttccaggggatgctgttggttcaaggacaacaccagaatgaagagggtctcacaagacacctgttatcctcttctttcaccctatctcttcccacccccagcttccctttgccccacaaagttcccatgtgcctgtaccctcccctggtctacataggacctctagatagtgttagagagagaacatgtagtggtaatgagtgcttggaatggattgggcctcaggccaggtggtcttcaaggggaccagctaactgatcctgcccttcagagacccaggagttgggagctttcgctccttctccaagactcaggcctgtgggcactctataagctagttgatcttggctctcctgataacagaatccaatttccttccttccctccacaggtttggaacaaactctcccttcacttgttgccctgtagcactacagaaaccctggttcttgggctccactgagccccaggtcagtccccagccctctgggttggcctgctgtcagtgcttctctcactccttagttggggtccacatcagtattggagttttgttctttattgctccctcccagacactccctgtggctgccctttgtgattccctcagatctgccctaatcccgggcatttgggtgggggaatcttgcctttccctttcagagccccagggatctcatctggggaactgtcattgccagcagaggctgttccttcctgctgtttggagatgtgactcattcattcactcactccaccctgcctctgcatcccttaatggagaaacgggcctaaaaccaaacgggtaaaaagccctgggccatccctgtcttcctgtcccttgtctgcccagttgacacctactggtgacttctagggcactgaggagtgaaagcgcctagggctggagaatagcgctgagttgggtttgtgactcttccctctccctgcctcacaggattgtgactccccagcccctgccctcaaagcttcagacccctcaggtagcagcaggaccttgtgatcttggccccttggatctgagatggtttttgcatctttccaggagagcctcacattcttcttccaggttgtatcacccccgagttagcatatcccaggctcgcagactcaacacagcaagggtgggagacagctgggcacaaagggggaattccgttcagcatgggctctaaacccacagaactgacaaagcccctgcttccccaccccctcctcaggctcctgcgagcacacccccacccccaaatccctccctgttctacactggggacagcagaattttctccccgtcttccccttcctgccattttccctcccttgaaaggttgacactggacaaccttggggcagctgagccctggccgcctcctggctggaaccatgagaaggaagctcagtacttcccacagtgtccctgttgataactgtttttattaactgaattgtttttttcatggaccaaacttttttttgtactgtccccttattgatgttacccagttttaataaaagaatcttctgaa

SEQ ID NO: 2495 - DNA, 4705 bp, Homo sapiens
ggaaaaaaatccgtctctaaaaaagcaatcacaaagaagaggaaaactgtcataaagtcacctactgtaccagagtttcagggaaaatggtatcatcggaggcaagctgtaaaagaattacatagtacattgatacgtcttttaaatgaattgctgccatgggaaccaaagttaatgaaggctttccaaagaaacaggagccgcctgaagaaagactatgatgatttcagaagacaacctgatcatgatacatttaatagagaactatggaccactgatgaaggtgaaggagatcttggaaaagactctcctaagggagaaatcagtaagtctatagactcaacagaacctctggatatcctggagaaagatcactttgattcagatgatatgaagttgtcagaaatagattttcctatggctagaagcaagctgttgaaaaaggaattgccttcaaaagacttaccgaagacactgcttaaaacacttaaacgacagtccaaacaaactgattatgtggatgacagcacaaaagagctttctccaaggaagaaggcaaagttaagcacaaatgagacaacagttgagaatctagaaagtgatgtgcagattgactgtttcagtgaatcaaagcatacagagccatcatttccagagtcatttgcctcattggattcagtaccagtgtctactctccagaaagggaccaaacccattcaggctttgcttgcaaagaatattgggaataaagtgaccttaacaaatcaactgcctccttccacaggtagaaatgctcttgctgtggaaaaaccagttttatctcctccggaagcaagcccgataaagccagcattgacctgccacaccaatacaaaaggtcctttacaaatggtatacaaaatgccctgtggccagtggttgccaatagatcttcaaaatagctctgtaaagattcaggtgcagcctatggtggatcctaaaacaggagaaaaaatcatgcagcaagttcttattctgcctaagaattttgtgattcagcataaagaaggaaaagcagttgcaaaagaagtgccaccacttcaacagaaaggtacagaacaacattgttcatctttcccacagacaacaaatataaattcttctttagcatcagtttttgtcaactcaccaggaactgtttctacccaactaccaaatacagctttcaacaaaacaattacacctttatcaaatataagtagtgctagaccacagcctttgtcgcctgtaacctctgtaagtaacttattaacaccatcagttaagactagccagagtgaggcaggaaaagccaagaatgcagtttcagcagccacattctccttgcccagtgcttcaccgaccatttcctccacaggtcagcctctgtcatcaacaacaacactaaatgggtctacaaatcctggtagttccttcaactgttttgcacaacagactgctgattcttctgaagcaaagcaagagctgaaaactgtgtgcataagagattcacagtcaattcttgttaggacacgaggtgggaacactggagttgtaaaagtacagaccaacccagatcaaaattcacccaatactgtatcttcaagttcagttttcacttttgctcctcagctgcaggcatttctggtgccaaaatcaacaacttcttcctctgctttttcacctgtagctggaacaactactacatctagtctttcaccttttagccaaacaccaacttctgtttccattccagctagctttgccccatccatggggaaaaatctcaaacttacattaggccacaccactggcagtggtgatttgggccacgtgatagataaaacttcacacatgccctcttctcccttgaagtcctctatttgttctagtactctactaccatcaacaacaagtagttcggtaagtgtaattagcatatcagcagcaaattttggacaaaacaatgcaaatattattcatactccaactaaacagcaacaagtagattatatcacaaaaagttaccctgttacaaggtcagaagcaacagcagcaacaaatggagatgtaatcagtgggactccagttcagaaacttatgctggtatcagctccatctattctttcttctggcaatggaactgcaattaatatgacacctgcgctgacatctacaggtgtttctgcccagaaattagtttttattaatgccccagttcctagtggtacatcaaccccaactcttgttgcagaatcattaaaacaaactcttcctcctccattgcataaagcatatgttaagactccagagcaaccccaaatagtactgattccgtctacagtgggcacaccaataaaaataaattcatcaccagctgtgtctcagataaaggatgtgaaaattggactaaacataggtcaagcaattgtaaatacttcaggcactgtgccagctataccatcaattaacatattacaaaatgtaaccccaaaaggagaagacaaaagtagcaagggctatattttgccattgtcaacaagtggtaattcagttccagtaagctcaaattttgtgagtcagaatattacccctgttaatgaatcagtggtttcttcagcaagagcagtaaatgtgctttcagttaccggagcaaatttatctttgggttcctttccagtgacctcagcctctgcttcagctggggcacaacctcctgttttagtcagtggaaatgatacctcttcaagaattatgcctattttgtcaaatagactttgctcatcaagtctcggaaacactgtggctatatcaactgtgaaaacaggacaccttgcatcatctgttctgatttcaactacacaaccagtagtgtctcctaaatgtttaacatcagctttgcaaattcctgttacggttgccttacctacacctgcgactacatcccctaaaataataaacacagttccacattcggcagcagtaccaggagccacacgttctgtatctatttctaaaagacaatctcggacttcactccagttccattcaccagggatttcaactacagtgccaacaaatgtaaacacaaataaacctcaaactgaattgtcgtccctttcaacaagtccaggtaaaataactaatacgtccaattttgcttctctgccaaatcagcaagctttagtaaaaacccccagttacagttctgctccaggtggcactaccattcacacggcttcggcaccatccaatgtaactagtctagtcgggagtcagttcagtgaaccttgtattcagcaaaaaatagtcatcaataccagtacacctttggcacctggtactcagattatgattaacggaacccggtttattgttccaccacaaggtcttggagctggcagccatgttctccttatatctactaatccaaaatatggagcccccttagttcttaacagtggccaaggcattcaatctacaccaatagataactctgcccagaagatcacactagcatcaaataattccttaagtggccaacctctacaacatcctctaagaagccctacaaaatttataaactcttttgggaatgcaagttctatacccacagtacatacatcaccacaactcataaacacaactgctaaggttcctgttccacctcctgtaccaacagtatcactgacttcagtaattaagtctccagctactcttttggctaagacatctttggtttctgccatttgccccagtaatcctccactgccaagtagcacttcagtgtttcatttggacccacctgtcaaaaaattgttggttagcccagaaggagccattttgaataccataaatactccagcatctaaggtttcttcactctctccatctctctctcagattgttgtatctgccagtcgaagtcctgcgtctgtcttccctgcttttcagtcgtcgggcttagagaagcctgacagagctgcatcttgaatttagactaaaagagccagtttttaaataatggggcattgttttgactcccataaaaattttcaatgtttattatactgttgaaagcatactatacattgtgtgtgtgtgtgtgtgtgtgtgtgtgtgtgtgtgtgtgtgtgtgtgtgtgttttaatgtatcttttcattagcttgcaacaaggctttgttttcttggggagggaaagatctgttccatttcacttactgttctgaggagggtttcaaggttctgtgtttaaagtcaggatttacctgtctgtagaacataaagtgaacaaagtttgaatagtttagagtaagctagccttttgcacatttacattgacatgtttcttcttgaatttggactgttgcagcatatctatgatatggtattcagtgtcattagtgaaatcttatttttgtttctgtaaaaaaaaaaatacatatatatatttatgcattgtgaaaaatgcagtccatgatgtaaaattgtacatattccagaatccctaacaacctgtactaaatatatgtacaaagaactatgctgtcttatttatgttttgtttacataatgtatagttttttaagtattttagtaattttggaccagtgaactgttagcaacaatgcagaagaatctgcatgtaataaactgagttgctgtaaaaaaaaaaaaaaaaaaaca

SEQ ID NO: 2496 - DNA, 1764 bp, Homo sapiens
ctgctatagtacgcgggtggctggacctacatgcttcctgctgtggctgtctcggaacccgtggtcctccgcttcatgattttctgccgtctcttggcaaaaatggcaaataatgatgctgttctgaagagactggagcagaagggtgcagaggcagatcaaatcattgaatatcttaagcagcaagtttctctacttaaggagaaagcaattttgcaggcaactttgagggaagagaagaaacttcgagttgaaaatgctaaactgaagaaagaaattgaagaactgaaacaagagctaattcaggcagaaattcaaaatggagtgaagcaaataccatttccatctggtactccactgcacgctaattctatggtttctgaaaatgtgatacagtctacagcagtaacaaccgtatcttctggtaccaaagaacagataaaaggaggaacaggagacgaaaagaaagcgaaagagaaaattgaaaagaaaggagagaagaaggagaaaaaacagcaatcaatagctggaagtgccgactctaagccaatagatgtttcccgtctggatcttcgaattggttgcatcataactgctagaaaacaccctgatgcagattctttgtatgtggaagaagtagatgtcggagaaatagccccaaggacagttgtcagtggcctggtgaatcatgttcctcttgaacagatgcaaaatcggatggtgattttactttgtaacctgaaacctgcaaagatgaggggagtattatctcaagcaatggtcatgtgtgctagttcaccagagaaaattgaaatcttggctcctccaaatgggtctgttcctggagacagaattacttttgatgctttcccaggagagcctgacaaggagctgaatcctaagaagaagatttgggagcagatccagcctgatcttcacactaatgatgagtgtgtggctacatacaaaggagttccctttgaggtgaaagggaagggagtatgtagggctcaaaccatgagcaacagtggaatcaaataaaatgcttccactaccaaaagacattagagaaaaccttaaaagtaataaagagaaatatatttgtcacttatacctaaaatatgagtggctcatttttgcattactctcttctagacttgactagtcatttacttggtatatattgttttcattgattggggaaacactagatttttacctcggtttttgatcatttataatggagagaggaagttgcctatgttttgtaataatttattttttagcaggaatattgattagcagcttttttttctttatacacatagataactaactagattaatgtttagtttcttatttgtaggcacaggatgcatgaaatttcaagctctgggattttttgtatattgtgtatctgtatcaaaaatatcctctccttttcaaaaatgacaggttggaaaatgtttgtcagacttattaactggtcatattataataatactgataatgaccaactgctcattctgaaagccaaacataaaagctaggagaagtggcatctgaacatttttgctttgctgccagagtaaccctgactaataatacaataacagcaatttttttaaaaaactgagatttcctactggcttgaagtttttctatttagcaaaataattagtaataagttttgactaggtctaaagaatgaacacattgtaaacagttgccacagtagtttctaataaattgatcataaaagca

SEQ ID NO: 2497 - DNA, 2359 bp, Homo sapiens
aagagctagtttatggatatgatcatatcaggaagagactgagcctctcacaaagggtgacatgaaaggtgtaaagggatcagggcttcagttattctatatttcccaatctttgtgggaatctgttcctcaccatatcatcccacgcctttccatgggataatagggacctaacaaagcatgatatccttatttctcaccactaggacatcaaaggccagttctggaatgatgacgactcggagggagataatgaatcagaggaatttctctatggcgttcaggggagctgtgcagctgacctgtatcgacacccacagcttgatgcagacattgaagccgtgaaggagatctacagtgagaactctgtatccatcagagaatatggaactatcgatgacgtggacattgacctccacatcaacatcagcttcctcgatgaggaagtctctacagcctggaaggtcctccggacagaacctattgtgttgaggctgcgattttctctctcccagtacctagatggaccagaaccatccattgaggttttccagccatcaaataaggaaggatttgggctgggtcttcagttgaaaaagatcctgggtatgtttacatcccaacaatggaaacatctgagcaatgatttcttgaagacccagcaggagaagaggcacagttggttcaaggcaagtggtaccatcaagaagttccgagctggcctcagcatcttttcacccatccccaagtctcccagtttccctatcatacaggactccatgctgaaaggcaaactaggtgtaccagagcttcgggttgggcgcctcatgaaccgttccatctcctgtaccatgaagaaccccaaagtggaagtgtttggctaccctcccagcccccaggtcagtggtcactgcaagaacattcccactctggagtatggattcctcgttcagatcatgaagtatgcagaacagaggattccaacattgaatgagtactgtgtggtgtgtgatgagcagcatgtcttccaaaatggatctatgctgaagccagctgtctgtactcgtgaactatgcgttttctccttctacacactgggcgtcatgtctggagctgcagaggaggtggccactggagcagaggtggtggatctgctggtggccatgtgtagggcagctttagagtcccctagaaagagcatcatctttgagccttatccctctgtggtggaccccactgatcccaagactctggcctttaaccctaagaagaagaattatgagcggcttcagaaagctctggatagtgtgatgtctattcgggagatgacccagggctgtaggaattgcataaaatgagggagacccacctgcatgttgttttggctcatatttggaaatcaagaaacagatggacaagttggatcccctggcccatcctctcctgcagtggatcatctctagcaacaggtcacacattgtcaaactacctctcagcaggctgaagttcatgcacacctcacaccagttcctcctgctgagcagccctcctgccaaggaggctcggttccggaccgccaagaagctctatggcagcacctttgccttccatgggtcccacattgagaactggcattcgatcctgcgcaatgggctggtcaatgcatcctacaccaaactgcagctgcatggagcagcctatggcaaaggcatctacctgagccccatctccagtatttcctttggatactcaggaatgggaaaaggacagcacaggatgccctccaaggatgagctggtccagagatacaacaggatgaataccatcccccagacccgatccattcagtcacggttcctgcagagtcggaatctaaactgtatagcactttgtgaagtgattacatctaaggacctccagaagcatgggaacatctgggtgtgccctgtgtccgaccatgtctgcacaagattcttctttgtatatgaggatggtcaggtgggcgatgccaacattaatactcaggaccccaagatacagaaggaaatcatgcgtgtgatcggaactcaggtttacacaaactgagggggccccagccctcgtaccacccctgttaccccaggatccatctgccctcataaaagtgttcaggtacagcagctgaggctgccctgaggaatcaaggggccattaccaaggggcaggaaaaggatatgtaagaggtggccttcatggtagagcttgacccaagaactactccacattcggatggcccagactgactccatcccctgactttccctttgacttcaccctgtttgtaaataaaacaataaaatggaaaaaaaaaaaaaaaaaa

SEQ ID NO: 2498 - DNA, 2305 bp, Homo sapiens
cacattctggatctcagctgctcttgaaggacagtgacttgttaccaccgcaacagcagagcctgccatccccaacagatcaccagttgtccctgacatcgtgccctaccttgtctccctttgtggtctcctaaatgcccatctcgttggccttggttcggctagtggtatggaggggtgctgcctagcactgacctgagagtgtgtgtgacccactgacccaatggacatcaaaggccagttctggaatgatgacgactcggagggagataatgaatcagaggaatttctctatggcgttcaggggaactgtgcagccgacctgtatcgacacccacagcttgatgcagacattgaagccgtgaaggagatctacagtgagaactctgtatccatcagagaatatggaactatcgatgacgtggacattgacctccacatcaacatcagcttcctcgatgaggaagtctctacagcctggaaggtcctccggacagaacctattgtgttgaggctgcgattttctctctcccagtacctagatggaccagaaccatccattgaggttttccagccatcaaataaggaaggatttgggctgggtcttcagttgaaaaagatcctgggtatgtttacatcccaacaatggaaacatctgagcaatgatttcttgaagacccagcaggagaagaggcacagttggttcaaggcaagtggtaccatcaagaagttccgagctggcctcagcatcttttcacccatccccaagtctcccagtttccctatcatacaggactccatgctgaaaggcaaactaggtgtaccagagcttcgggttgggcgcctcatgaaccgttccatctcctgtaccatgaagaaccccaaagtggaagtgtttggctaccctcccagcccccaggcaggtctcctgtgccctcagcacgtgggcctccctcccccagcacggacctctcctttggtcagtggtcactgcaagaacattcccactctggagtatggattcctcgttcagatcatgaagtatgcagaacagaggattccaacattgaatgagtactgtgtggtgtgtgatgagcagcatgtcttccaaaatggatctatgctgaagccagctgtctgtactcgtgaactatgcgttttctccttctacacactgggcgtcatgtctggagctgcagaggaggtggccactggagcagaggtggtggatctgctggtggccatgtgtagggcagctttagagtcccctagaaagagcatcatctttgagccttatccctctgtggtggaccccactgatcccaagactctggcctttaaccctaagaagaagaattatgagcggcttcagaaagctctggatagtgtgatgtctattcgggagatgacccagggctcatatttggaaatcaagaaacagatggacaagttggatcccctggcccatcctctcctgcagtggatcatctctagcaacaggtcacacattgtcaaactacctctcagcaggcagctgaagttcatgcacacctcacaccagttcctcctgctgagcagccctcctgccaaggaggctcggttccggaccgccaagaagctctatggcagcacctttgccttccatgggtcccacattgagaactggcattcgatcctgcgcaatgggctggtcaatgcatcctacaccaaactgcaggaatgggaaaaggacagcacaggatgccctccaaggatgagctggtccagagatacaacaggatgaataccatcccccagacccgatccattcagtcacggttcctgcagagtcggaatctaaactgtatagcactttgtgaagtgattacatctaaggacctccagaagcatgggaacatctgggtgtgccctgtgtccgaccatgtctgcacaagattcttctttgtatatgaggatggtcaggtgggcgatgccaacattaatactcaggaccccaagatacagaaggaaatcatgcgtgtgatcggaactcaggtttacacaaactgagggggccccagccctcgtaccacccctgttaccccaggatccatctgccctcataaaagtgttcaggtacagcagctgaggctgccctgaggaatcaaggggccattaccaaggggcaggaaaaggatatgtaagaggtggccttcatggtagagcttgacccaagaactactccacattcggatggcccagactgactccatcccctgactttccctttgacttcaccctgtttgtaaataaaacaataaaatgg

SEQ ID NO: 2499 - DNA, 7026 bp, Homo sapiens
gacacgcacgcacccgggcgccgaagggaaagccgcgtctcgccctcccgccccgccgtcggtcctgtctcagtccctcagcagagcgggaaagcggaggccggagccgtgacctctgaccccgtggttatgcggagccgccgcattccttagcgatcgcggggcagccgccgctgccgccgtgggcgactgacgcagcgcgggcgcgtggagccgccgccgcccctcccccaccgccgctctcgcgccagccggtccccgcgtgcccgccccttctccccggccgcacccgagacctcgcgcgccgccgctgccacgcgccccccccaccgccgccgccgccccagccccgcgccaccgccccagcccgcccagcccggaggtcccgcgtggagctgccgccgccgccggggagaaggatgaaggacaaacagaagaagaagaaggagcgcacgtgggccgaggccgcgcgcctggtattagaaaactactcggatgctccaatgacaccaaaacagattctgcaggtcatagaggcagaaggactaaaggaaatgagaagtgggacttcccctctcgcatgcctcaatgctatgctacattccaattcaagaggaggagaggggttgttttataaactgcctggccgaatcagccttttcacgctcaagaaggatgccctgcagtggtctcgccatccagctacagtggagggagaggagccagaggacacggctgatgtggagagctgtgggtctaatgaagccagcactgtgagtggtgaaaacgatgtatctcttgatgaaacatcttcgaacgcatcctgttctacagaatctcagagtcgacctctttccaatcccagggacagctacagagcttcctcacaggcgaacaaacaaaagaaaaagactggggtgatgctgcctcgagttgtcctgactcctctgaaggtaaacggggcccacgtggaatctgcatcagggttctcgggctgccacgccgatggcgagagcggcagcccgtccagcagcagcagcggctctctggccctgggcagcgctgctattcgtggccaggccgaggtcacccaggaccctgccccgctcctgagaggcttccggaagccagccacaggtcaaatgaagcgcaacagaggggaagaaatagattttgagacacctgggtccattcttgtcaacaccaacctccgtgccctgatcaactctcggaccttccatgccttaccatcacacttccagcagcagctcctcttcctcctgcctgaagtagacagacaggtggggacggatggcctgttgcgtctcagcagcagtgcactaaataacgagttttttacccatgcggctcagagctggcgggagcgcctggctgatggtgaatttactcatgagatgcaagtcaggatacgacaggaaatggagaaggaaaagaaggtggaacaatggaaagaaaagttctttgaagactactatggacagaagctgggtttgaccaaagaagagtcattgcagcagaacgtgggccaggaggaggctgaaatcaaaagtggcttgtgtgtcccaggagaatcagtgcgtatacagcgtggtccagccacccgacagcgagatgggcattttaagaaacgctctcggccagatctccgaaccagagccagaaggaatctgtacaaaaaacaggagtcagaacaagcaggggttgctaaggatgcaaaatctgtggcctcagatgttcccctctacaaggatggggaggctaagactgacccagcagggctgagcagtccccatctgccaggcacatcctctgcagcacccgacctggagggtcccgaattcccagttgagtctgtggcttctcggatccaggctgagccagacaacttggcacgtgcctctgcatctccagacagaattcctagcctgcctcaggaaactgtggatcaggaacccaaggatcagaagaggaaatcctttgagcaggcggcctctgcatcctttcccgaaaagaagccccggcttgaagatcgtcagtcctttcgtaacacaattgaaagtgttcacaccgaaaagccacagcccactaaagaggagcccaaagtcccgcccatccggattcaactttcacgtatcaaaccaccctgggtggttaaaggtcagcccacttaccagatatgcccccggatcatccccaccacggagtcctcctgccggggttggactggcgccaggaccctcgcagacattaaagcccgtgctctgcaggtccgaggggcgagaggtcaccactgccatagagaggcggccaccactgccatcggaggggggggtggcccgggtggaggtggcggcggggccaccgatgagggaggtggcagaggcagcagcagtggtgatggtggtgaggcctgtggccaccctgagcccaggggaggcccgagcacccctggaaagtgtacgtcagatctacagcgaacacaactactgccgccttatcctctaaatggggagcatacccaggccggaactgccatgtccagagctaggagagaggacctgccttctctgagaaaggaggaaagctgcctactacagagggctacagttggactcacagatgggctaggagatgcctcccaactccccgttgctcccactggggaccagccatgccaggccttgcccctactgtcctcccaaacctcagtagctgagagattagtggagcagcctcagttgcatccggatgttagaactgaatgtgagtctggcaccacttcctgggaaagtgatgatgaggagcaaggacccaccgttcctgcagacaatggtcccattccgtctctagtgggagatgatacattagagaaaggaactggccaagctcttgacagtcatcccactatgaaggatcctgtaaatgtgacccccagttccacacctgaatcctcaccgactgattgcctgcagaacagagcatttgatgacgaattagggcttggtggctcatgccctcctatgagggaaagtgatactagacaagaaaacttgaaaaccaaggctctcgtttctaacagttctttgcattggatacccatcccatcgaatgatgaggtagtgaaacagcccaaaccagaatccagagaacacataccatctgttgagccccaggttggagaggagtgggagaaagctgctcccacccctcctgcattgcctggggatttgacagctgaggagggtctagatcctcttgacagccttacttcactctggactgtgccatctcgaggaggcagtgacagcaatggcagttactgtcaacaggtggacattgaaaagctgaaaatcaacggagactctgaagcactgagtcctcacggtgagtccacggatacagcctctgactttgaaggtcacctcacggaggacagcagtgaggctgacactagagaagctgcagtgacaaagggatcttcggtggacaaggatgagaaacccaattggaaccaatctgccccactgtccaaggtgaatggtgacatgcgtctggttacaaggacagatgggatggttgctcctcagagctgggtgtctcgagtatgtgcggtccgccaaaagatcccagattccctactgctggccagtactgagtaccagccaagagccgtgtgcctgtccatgcctgggtcctcagtggaggccactaacccacttgtgatgcagttgctgcagggtagcttgcccctagagaaggttcttccaccagcccacgatgacagcatgtcagaatccccacaagtaccacttacaaaagaccagagccatggctcgctacgcatgggatctttacatggtcttggaaaaaacagtggcatggttgatggaagcagccccagttctttaagggctttgaaggagcctcttctgccagatagctgtgaaacaggcactggtcttgccaggattgaggccacccaggctcctggagcaccccaaaagaattgcaaggcagtcccaagttttgactccctccatccagtgacaaatcccattacatcctctaggaaactggaagaaatggattccaaagagcagttctcttcctttagttgtgaagatcagaaggaagtccgtgctatgtcacaggacagtaattcaaatgctgctccaggaaagagcccaggagatcttactacctcgagaacacctcgtttctcatctccaaatgtgatctcctttggtccagagcagacaggtcgggccctgggtgatcagagcaatgttacaggccaagggaagaagctttttggctctgggaatgtggctgcaacccttcagcgccccaggcctgcggacccgatgcctcttcctgctgagatccctccagtttttcccagtgggaagttgggaccaagcacaaactccatgtctggtggggtacagactccaagggaagactgggctccaaagccacatgcctttgttggcagcgtcaagaatgagaagacttttgtggggggtcctcttaaggcaaatgccgagaacaggaaagctactgggcatagtcccctggaactggtgggtcacttggaagggatgccctttgtcatggacttgcccttctggaaattaccccgagagccagggaaggggctcagtgagcctctggagccttcttctctcccctcccaactcagcatcaagcaggcattttatgggaagctttctaaactccaactgagttccaccagctttaattattcctctagctctcccacctttcccaaaggccttgctggaagtgtggtgcagctgagccacaaagcaaactttggtgcgagccacagtgcatcactttccttgcaaatgttcactgacagcagcacggtggaaagcatctcgctccagtgtgcgtgcagcctgaaagccatgatcatgtgccaaggctgcggtgcgttctgtcacgatgactgtattggaccctcaaagctctgtgtattgtgccttgtggtgagataataaattatggccatgggaaacattgtatatttagtgtgtgtattttgataatgattgatcttaaatctgtatacagaatatcattgatataatactctttaggcaggagcactcttgccttcccccaaaatttacactgctaaagccctctgtcacttggcgacccttctggtcttgctggaggggtttcctgggtataacccattgggctgcccaaggccagccagcctgagctctcctgcaagacagagcctgatgtggcacggagtggggttgcggggggtggggggactgcctgactcccagagggacttgaaactgaagcaagaaggttgcattctccaccaagggagttaacctacctgaactaagtagaaatgccagtcttccactaccccctccctgccatcttttcttctgctactttggggagttgatggccaggaaagaagccagcacagggttaaagtaactcctggcattgcccaccagggggctggtgcacctgctgacctcagggtcacagttgagtcatttgccagttgacggagcaagtttgaccttggttctgttgctgaagcaaatttggaacttttctgtctcagtgtgatccactaacccacaggatcatttggaaccttgaatagctctgcttggacaatggggttggggaatagggttgtctttcctatgaaaatgccatctgtagaccttgtgagtcagccgtccagatgtttgcaggtgaattcctctgcttgacatcctccctgtcactttggaccctatgggagtgggcatctccacgcacctgtgtatgtgaaagtcattttacatttcaaagcagtgtgtgtttcttatttttatatttttaactctttattcttggatgtataaagtgaactttttggcttctgtaagtatgctctatgcacctctaatgttttatcatgtatttatatgttgtacacagtactggctgattctgtaaatggatgtattgtacagagaacatgaacgtctcttcctaattttacatcttcagcatcattgcattaaagtggtgtaatctccttctctacatctgttgtcagagccactgagtgctgtgctgctcgacgtgagggtgaaatgattgacttgtgacctgccaggttgcccgatgccctgttgggtcaccggctggacctgctgcagcctgcagagccacagtcagcctgcccacatgccaccgagcaaacgcatcttgcttttcacatctctcctcctacagccttaatggctgcttgctgccatatgtgacaaatcaccaccaccagtgttaagtgcttctggattcatgggtgagttccctgggcagcccccaggaaggccttccagatctggctccagggtcaccacctgtcacagcaatacctgggaccatgctctcctgggactgtgaggctccttttgacgtacttttgacatcaggcaggtttgggaagaaacaaagccatgcctgctcctgcctctctcccaacatgtttccagcaagtagatgcccctgtgtgtgttttcccttgccttgtttcctgccttatatcttgtatttcgacttattacagagttgagggttcttgcttaatttagatcaagtataaaatttgtatgacttcaagtctcattttatctgaaaggtttttttctcatttaatctgatgtggcattttcgtcatctgaagcatgagtgacaagttgggaatgatgtggtgatttagaatgcagtattggccaagtccaagttgtcaacttaagcgtctgtttaccaaagaccgggaacaggggcccaaacatgtccagtcctcttcttccctctgctggaacctttggggacactcaagggtacagtttgacactgatctggtccatgaggctgcccagagaaagcactgcttctgtatgtctcttgtggtattggaacaataaacccgtacaacctgca

SEQ ID NO: 2500 - DNA, 4805 bp, Homo sapiens
cgggtcgctgctcggctcgccggctgggcggtgggggttggtgacgcgggccggggctcacgagaggcccgggaggcggggctttgctggcttcccagagagaggcaggacagaatgctttgacctccaagctgttttaaatctagtagataagccagatcctgtgttgccataagcccttggcccacatttaagtgggaatgcagctagcttggatgtctgaaactttgtaggcgcctctgtctgaatcctgaacacaggcaccaggactactgagagctcgtcatctgtgcaggatagccacacagcaaacatgtttgcaaaactgaagaagaaaattgcagaagagactgctgttgctcagaggccaggaggtgctactaggatcccacggtctgtgagcaaggaatcagttgcctcaatgggagctgactcaggagatgactttgcttccgatggaagcagctccagagaagatctttcatcccagcttctgagaaggaatgaacagatacggaagttagaggccagactttctgactatgctgaacaggtccgaaacttgcagaagataaaagagaagcttgaaattgcattagaaaaacaccaggattcttccatgcggaaatttcaagagcagaatgagacattccaagccaacagagccaaaatggcagaaggactggctttggcattagccagaaaggaccaggaatggtcagaaaagatggatcagcttgaaaaggagaaaaatattctgacagcccagttacaggaaatgaagaaccagagtatgaatcttttccaaaggagagatgaaatggatgaattagaggggttccagcagcaggaactaagtaaaataaagcacatgcttttaaaaaaagaagaaagtctagggaaaatggaacaagaattggaggcacgaaccagagaacttagtcgtacccaggaggagttgatgaactccaatcagatgtcatcagacttaagccagaagctagaagaattgcagagacactactcaacgctggaagagcagagagatcatgtgatagcttcaaaaacaggtgcagaaagtaagatcacagccctggaacaaaaggaacaagagctccaagcactcattcagcagctttccattgatttgcaaaaggtcactgctgaaactcaagagaaagaagacgttatcacacatttgcaagagaaggttgcatccttggagaagagactagaacagaacttatcaggagaagaacacgtgcaagaactcctgaaagagaaaacacttgctgagcagaatttggaggataccagacaacagctcttggcagccagaagcagccaggctaaggccattaacaccctggagactcgggtgagagaactggagcagaccttgcaggcctctgaggagcagctccaacagagcaagggcattgtggctgcccaggaaactcagatacaggagctcgctgccgccaaccaggagagcagccatgtgcagcagcaggcccttgctctggagcagcagttcttggagcgcacccaggcgctagaagcccagatagtggccctggagagaacgcgggcagctgaccagaccaccgcagagcaagggatgagacaactggagcaagaaaatgcagcccttaaagaatgcaggaatgaatatgaacgttctttacaaaatcaccaatttgaactaaagaagctgaaggaagaatggagccaaagagaaattgtgagcgtggccatggctcaagccctggaggaggtgcggaagcaaagggaagagttccagcaacaggcagctaacctgacagccataatagacgagaaggaacagaatctgcgggaaaaaaccgaagtgcttctccagaaagagcaggagattctccagctggagcgaggtcacaactctgccctgctgcagatacaccagctgcaggccgagctggaggccctgaggaccctcaaggcggaggaggctgcagtggtcgcggagcaggaggacctgctgaggctgcggggcccattgcaggccgaagcactctcagtcaatgagtcgcacgtgacctcgagggccatgcaggaccctgtgttccagcttccaactgcaggaagaacaccaaatggtgaggttggggccatggatctcacacagctacagaaggagaaacaggacttggagcagcaacttctggagaaaaataagaccataaagcagatgcagcagcggatgctggagctccggaagactctgcagaaggagctgaaaatcagacccgataatgagctcttcgaagtccgggagaaacctggacctgagatggcaaacatggcgccttccgtcacgaataacactgacctgacagatgcccgcgagatcaactttgagtaccttaaacatgtggttttaaaattcatgtcttgtcgcgaatccgaggcttttcatcttataaaagctgtgtcagtgttgctgaacttttcccaagaggaggagaacatgctcaaggaaactctggaatataagatgtcatggtttgggtccaaaccagctcccaagggcagcatccggccgtctatctcaaaccctcggataccatggtcctagaggggactacccaaggatggagctccgtgggttgacactttttctgtgaaaagaacactgacacaccagtctgggtgggtttttaatcactgtaactgcagtattttgtacaagtgtctaaacattgtttacaagactaaggcccacttccctgcaggctgacctgaacctcagggggtagctgatcctgtcattctggtcaccaaacaggagggtcctggcactacccagatttccacagtgctgctaatatcccagctccagccagcaccccatctgcacctgaatcctctaacttcacggtagcacttacagctgaagccatcagcatctggcaggcacacctgagtcaccatgtagcgctgctactggaggtagagacggccctttgagatggtgcccagcaggccaaacccacctgcctctgccaggaacagccaactccatgggaactctatgggagtggcttttaaaaattcagatgagttagaagctttttatcccttcctctcaagaaaatattctttcaccctgtctctcaaaccacctagaactttagaggatccatctttaagggccggtgtggatgaatgagaaaatgcacctttctgacagtatctccactttacttaagaaaactagcaaatatatgaaaagacccttagtaccaaatacactcaattgcctttttaatgaatgtacttgtcttggataggttgctggtaaaccattttaaactattttttatagctgaagttcttcactactataaacatgtcttctgtactataaaatccatttaactggtgttcttaaaatcagagcgtccagaggaaattcttcctaaaactaggattcctgttcctttgtcttctcactcgcactctggcactgctccctctgaagtgcagtgggatctcgtgtgctttgtcttgattctgtgctgcgctgccgctgggcgatgcagaccacctgtcttctactgaaggacagtccgctgtctccagtgggggcagcagctgtcccccagcctcgatggagacactggggcagtctgccttgtctgtggagctgctctctctccctcatcccaccccaaatacttaaaatgacactacacccagacggcgcccagctggctgcagcacttgtagcatgcacatgactctggtagtaaccaacaaaaacttgttttatggattcctcgtttactgaggaaagggaacatgctggttctggaaaagccacaatattgaatctaaaaggaaaccgtttattgtttgatgaaagtttcactggttaaataaaaaactaaattaataactggagcctctaaatttattatccattatccagtgatggaaagttgtatttctcaatcatgcttagggccaaaataggtatataaaatgtgtcacagaaaaacacgcatttgcaacgttaacctaacgaaatttccatgaagaaccaagtcagggcagcatctccttagtcccagctcaggctctctgccttccagaggccgcttctccagtgactaacctcctcctctggctcctccttgcagacagttatcccttgtttagaacacgaatttccatttacctggtgggaacacgaaacaggagtctcttctgttctgcaagtttgatgggtaagaggtagccttttttcaaagtaggatttcctttttcaactgttccaggaaagaatctctaagactgggtagctcacagccagccaaaggcagctacatttccacagaagcccgtccgctgcctccgtggcttctccagccattgaactggtcccacacgcaccccaggccccactcctcggcagtttcaggtgtagctgtggggcccgttcctaggtctgtactcactttagggaggcttcactgactaggctttcctcctgcatgttgaatttccttcagctttaagaggaagagtggaataaatattctaagtgatttaatgcactttgacttgtataaaactttctgtgttagcgacggtatctatagccctttatacgagcgatggatcttgagctctccttccatgttgtaaatagggattgtattcttgaaaactgctgtagcaaattcatctgtggtgcaatacactttttgattaaagctcttcaatccagatgcaactacaatggattttactaaaaaaaa

SEQ ID NO: 2501 - DNA, 3386 bp, Homo sapiens
gcggtgtttgtctgccggactgacgggcggccgggcggtgcgcggcggcggtggcggcggggaagatggcggcgtcctccctggaacagaagctgtcccgcctggaagcaaagctgaagcaggagaaccgggaggcccggcggaggatcgacctcaacctggatatcagcccccagcggcccaggcccaccctgcagctcccgctggccaacgatgggggcagccgctcgccatcctcagagagctccccgcagcaccccacgccccccgcccggccccgccacatgctggggctcccgtcaaccctgttcacaccccgcagcatggagagcattgagattgaccagaagctgcaggagatcatgaagcagacgggctacctgaccatcgggggccagcgctaccaggcagaaatcaacgacctggagaacttgggcgagatgggcagcggcacctgcggccaggtgtggaagatgcgcttccggaagaccggccacgtcattgccgttaagcaaatgcggcgctccgggaacaaggaggagaacaagcgcatcctcatggacctggatgtggtgctgaagagccacgactgcccctacatcgtgcagtgctttgggacgttcatcaccaacacggacgtcttcatcgccatggagctcatgggcacctgcgctgagaagctcaagaagcggatgcagggccccatccccgagcgcattctgggcaagatgacagtggcgattgtgaaggcgctgtactacctgaaggagaagcacggtgtcatccaccgcgacgtcaagccctccaacatcctgctggacgagcggggccagatcaagctctgcgacttcggcatcagcggccgcctggtggactccaaagccaagacgcggagcgccggctgtgccgcctacatggcacccgagcgcattgaccccccagaccccaccaagccggactatgacatccgggccgacgtatggagcctgggcatctcgttggtggagctggcaacaggacagtttccctacaagaactgcaagacggactttgaggtcctcaccaaagtcctacaggaagagcccccgcttctgcccggacacatgggcttctcgggggacttccagtccttcgtcaaagactgccttactaaagatcacaggaagagaccaaagtataataagctacttgaacacagcttcatcaagcgctacgagacgctggaggtggacgtggcgtcctggttcaaggatgtcatggcgaagactgagtcaccgcggactagcggcgtcctgagccagccccacctgcccttcttcaggtagctgcttggcggcggccagccccacagggggccaggggcatggccacaggcccccctccccacttggccacccagctgcctgccaggggagacctgggacctggacggccacctaggactgaggacagagagtggggggtgcccacccaccccccccgccccgggcctaccaagcccccgcccttcccaccccggggtcagccggccgtgtgcgtcccccgacagacactgtgaacggaagacagcaggccgcgatcagagtcgctgttcattcagccgcagcctctgggccggggcggcccccaggggccaggagagagccctggagtcccgcagccaccatgcacgctcccagcgtgctgtgtccttcgccactcccacgcgcccgttcctcttccgtcgccctctgtcccctgctctacctctctgtccttgtctggctctcccgtcaccctccctgcctctgtctctcttctggcctgagcctgggcccagccacctcctgacgggtcccctgggtctgcataggtctcccatggcgcaatgagtcagtggcccccagccaggcagtgtgggcattgccactgcggctggacggggctgcgcgctcgcgctctctctctctctctctctctctctttgatctcagggggtcctttttggagtttattgtattttattgtacttggtggggtgtttggggtgggggcggaggagagcttgttctcgtggggttgtcggtaccttcagaaacttttaccaaagtcacgattagctgcttgtggtggggccccaaccgccctcgggcactggggagctgggctggggctgctgctctggggtctccgggggccacagcttggggtgagttgaagacctcaggggatgtggaggggtctgcggggccctggccgcacaggatggccttcagggaaggtggtcttggggcatggtgcagagcaggtgaccggagggaatcggtgacggagcggggccaagggaggggtccggagggagtcagggatggagggcagagggagtggatgtgggggtttgaggacgtgtgacaagctccagcaggggtgggggccgggctgagggtgggggtgcgaggtggtcactcccatcgtgcccctggccgtccctccactcacccacacctggcccagtccacgttgaggtccaggactgggaaggaccgggtgagtgcaccggggacccaggccaggtgccccccggagcctgctggggtggccagagcaggagggggtgtgtttcctttttgtgggtgttgcatgcaaatcaagtggacaagaaaaaataacaaaacaaaaaacaagaaaaaaaaaacacaaaaccccgtaaaatcacaaagaaaatccaacaccaaaggcgcagaagccggctggccgtggtgggggcagcgtaggcgtagcatccctctcctctcacttagcctgttgactcttgttattatcatgatattcacaaaacgccgcatgtttaaaaagtcatagatgtcatcttctctctgcccccagggaggaaagccaccttctcttgccccttggcccctttgtcaggggccaggggtctgccgggtgggggtgccaacaggcctggccctttcctcccctgcatccagccatgggggcctctgcgattgccggaaggttgcatggctggtcccagggccagcacaggcccgaggccgggctgcctggttttatttttatttaactttattttctgttttatgagtgtgtgtccgcccacccccacccccttcagtgttaagtggggagccctgggggagtctctcctgcctcccagcctctcccaagacctcccccctcgtcaccagccatccctctggaccaggcagagggcggaccgggtgggcaggggcctgagggtggctcgggccagcccaccagccaatggacccctcctcaggccgccagtgtcgccctgcccctttttaaaacaaaatgccctcgtttgtaaacccttagacgcttgagaataaaccccttccttttcttccaaaaaaaaaaaaaaa

SEQ ID NO: 2502 - DNA, 1925 bp, Homo sapiens
gcggccgtcgcgtctgacagaccactgcagaccacgggccgaggcccagcgcccgtccgcagcgcggccggcatggcggcgacaaggagccccacgcgggcaagggagcgggagcggtctggcgctcccgccgcaggaagtgaccaagttcactcctggatgctagctacaagccaagccttagacactgtctggagaatggcaaaaggctttgtgatgttggcagtttcatttctggtggctgccatctgctacttccggaggctacatttatattcagggcacaagctgaaatggtggattggatatctgcagagaaaattcaaaaggaacctcagtgtggaggcagaggttgatttactcagttattgtgcaagagaatggaaaggagagacaccccgtaacaagctgatgaggaaggcttatgaggagctattttggcggcatcacattaaatgtgttcgacaagtaaggagagataactatgatgctctcagatcagtgttatttcagatattcagccagggcatctcttttccatcatggatgaaagaaaaggacattgttaagcttcctgaaaaactgctgttttcacaaggttgtaattggattcagcagtacagttttggtcctgagaagtatacaggctcgaatgtgtttggaaaactacggaaatatgtggaattattgaaaacacagtggactgaatttaatggcattagagattatcacaagagaggaagtatgtgcaacacccttttttcagatgccattctggaatataaactttatgaagctttaaagttcatcatgctgtatcaagtcactgaagtttatgaacaaatgaagactaaaaaggtcattcccagtctttttagactcctgttttccagggagacatcctctgatcctttgagcttcatgatgaatcacctgaattctgtaggcgacacatgtggactagagcagattgatatgtttatacttggatactcccttgaagtaaagataaaagtgttcagactgttcaagtttaactccagagactttgaagtctgctacccagaggagcctctcagggactggccggagatctccctgctgaccgagaacgaccgccactaccacattccagtcttttaagtccgctgggggccgaacagcagtgctcaccagtgacggtggtcacagttgcaataaagtctctctctgaaaccaaagctagcatttcagcatggaaggaattaggaccttttcttcaggattacaggtacactggatgcagccatgcatggatggtttttctttatttttcagtgatttcctctgaagcagctgcactgatacatttgggagttggtggcttgactttgtccataaggggcgtggccacttcacatgatggcgggcctttaagagcacaaagaagtttaatatggacaacaacaggaaaaagcaagaagaaaacaagtagggaaaaacagctaacctggagagaaagaatttctttaacctttatgttcttcattaaaaatcttatcttggactgatttgagggatttttagaaacatggccttattttatataagcattaccttcccaggaatctttgttgtatattaatttttgataaccatttgattaactttaaaattaagtatatgtgtgtatatatacatatgtatgtttatatacacacatgtatctgtatagttttatatatacatatatacacatagacatacagagaaccactactttgtaatagtgtacagtttgttttatatctctttactttttttgttactattttatctggccagcgtaatagttttatttagattttttaaaattctgtagattaaagcaaatgacagttattgaactatcacaaaactattaaactgtggtacatttaatgtgt

SEQ ID NO: 2503 - DNA, 3434 bp, Homo sapiens
gccccgctgcccacctgcccgcctgcccacctgcccaggtgcgagtgcagccccgcgcgccggcctgagagccctgtggacaacctcgtcattgtcaggcacagagcggtagaccctgcttctctaagtgggcagcggacagcggcacgcacatttcacctgtcccgcagacaacagcaccatctgcttgggagaaccctctcccttctctgagaaagaaagatgtcgaatgggtattccacagacgagaatttccgctatctcatctcgtgcttcagggccagggtgaaaatgtacatccaggtggagcctgtgctggactacctgacctttctgcctgcagaggtgaaggagcagattcagaggacagtcgccacctccgggaacatgcaggcagttgaactgctgctgagcaccttggagaagggagtctggcaccttggttggactcgggaattcgtggaggccctccggagaaccggcagccctctggccgcccgctacatgaaccctgagctcacggacttgccctctccatcgtttgagaacgctcatgatgaatatctccaactgctgaacctccttcagcccactctggtggacaagcttctagttagagacgtcttggataagtgcatggaggaggaactgttgacaattgaagacagaaaccggattgctgctgcagaaaacaatggaaatgaatcaggtgtaagagagctactaaaaaggattgtgcagaaagaaaactggttctctgcatttctgaatgttcttcgtcaaacaggaaacaatgaacttgtccaagagttaacaggctctgattgctcagaaagcaatgcagagattgagaatttatcacaagttgatggtcctcaagtggaagagcaacttctttcaaccacagttcagccaaatctggagaaggaggtctggggcatggagaataactcatcagaatcatcttttgcagattcttctgtagtttcagaatcagacacaagtttggcagaaggaagtgtcagctgcttagatgaaagtcttggacataacagcaacatgggcagtgattcaggcaccatgggaagtgattcagatgaagagaatgtggcagcaagagcatccccggagccagaactccagctcaggccttaccaaatggaagttgcccagccagccttggaagggaagaatatcatcatctgcctccctacagggagtggaaaaaccagagtggctgtttacattgccaaggatcacttagacaagaagaaaaaagcatctgagcctggaaaagttatagttcttgtcaataaggtactgctagttgaacagctcttccgcaaggagttccaaccatttttgaagaaatggtatcgtgttattggattaagtggtgatacccaactgaaaatatcatttccagaagttgtcaagtcctgtgatattattatcagtacagctcaaatccttgaaaactccctcttaaacttggaaaatggagaagatgctggtgttcaattgtcagacttttccctcattatcattgatgaatgtcatcacaccaacaaagaagcagtgtataataacatcatgaggcattatttgatgcagaagttgaaaaacaatagactcaagaaagaaaacaaaccagtgattccccttcctcagatactgggactaacagcttcacctggtgttggaggggccacgaagcaagccaaagctgaagaacacattttaaaactatgtgccaatcttgatgcatttactattaaaactgttaaagaaaaccttgatcaactgaaaaaccaaatacaggagccatgcaagaagtttgccattgcagatgcaaccagagaagatccatttaaagagaaacttctagaaataatgacaaggattcaaacttattgtcaaatgagtccaatgtcagattttggaactcaaccctatgaacaatgggccattcaaatggaaaaaaaagctgcaaaagaaggaaatcgcaaagaacgtgtttgtgcagaacatttgaggaagtacaatgaggccctacaaattaatgacacaattcgaatgatagatgcgtatactcatcttgaaactttctataatgaagagaaagataagaagtttgcagtcatagaagatgatagtgatgagggtggtgatgatgagtattgtgatggtgatgaagatgaggatgatttaaagaaacctttgaaactggatgaaacagatagatttctcatgactttattttttgaaaacaataaaatgttgaaaaggctggctgaaaacccagaatatgaaaatgaaaagctgaccaaattaagaaataccataatggagcaatatactaggactgaggaatcagcacgaggaataatctttacaaaaacacgacagagtgcatatgcgctttcccagtggattactgaaaatgaaaaatttgctgaagtaggagtcaaagcccaccatctgattggagctggacacagcagtgagttcaaacccatgacacagaatgaacaaaaagaagtcattagtaaatttcgcactggaaaaataaatctgcttatcgctaccacagtggcagaagaaggtctggatattaaagaatgtaacattgttatccgttatggtctcgtcaccaatgaaatagccatggtccaggcccgtggtcgagccagagctgatgagagcacctacgtcctggttgctcacagtggttcaggagttatcgaacatgagacagttaatgatttccgagagaagatgatgtataaagctatacattgtgttcaaaatatgaaaccagaggagtatgctcataagattttggaattacagatgcaaagtataatggaaaagaaaatgaaaaccaagagaaatattgccaagcattacaagaataacccatcactaataactttcctttgcaaaaactgcagtgtgctagcctgttctggggaagatatccatgtaattgagaaaatgcatcacgtcaatatgaccccagaattcaaggaactttacattgtaagagaaaacaaagcactgcaaaagaagtgtgccgactatcaaataaatggtgaaatcatctgcaaatgtggccaggcttggggaacaatgatggtgcacaaaggcttagatttgccttgtctcaaaataaggaattttgtagtggttttcaaaaataattcaacaaagaaacaatacaaaaagtgggtagaattacctatcacatttcccaatcttgactattcagaatgctgtttatttagtgatgaggattagcacttgattgaagattcttttaaaatactatcagttaaacatttaatatgattatgattaatgtattcattatgctacagaactgacataagaatcaataaaatgattgttttactctgcaaaaaaaaaaaaaa

SEQ ID NO: 2504 - DNA, 7011 bp, Homo sapiens
agtgtgggcgggggccggggggccgagaggtaccgccgccaccgcgcggggagccgcagcggttccgagcggggcccaacatggcggagagagaggtggagtccggcccccgaaagaggtttgaacaaaaaagtggtgcagtttttgatgaaattgtagagaactgtggtggtatcatggatacagaaatgtctgaagatatagaccacaacttaactcctacccttgacagcatgtcttatggaatgccgaatcaaacaggatctgaaaattcattgctggatgaagatgattattttttgaactctggggatcttgcaggaattccagtcgttggtagtgacaatgaggatgaacaggattttagttcaaaggacaatcttgtttcttcaattcatactgatgatagcttggaagtagagagaagagtcacacagcatgaatcagacaatgaaaatgaaatacaaattcaaaataagttaaaaaaagactttcctaaacaatttgatcaggtttctgtctttaaatcaatacggaaagattttagtctagtaagagaaaacagcaaagagacattttctggaaaggagaaaaatagagacctaacttatgaacgtgaaaaacggttggataaaccccataaagatttggattcaaggttgaaaagcagtttttttgataaagcagctaatcaagttgaagaaacattacatacccatttaccacaaaccccagaaacaaactttagggattccagctacccatttgccaataaagaatccattggttcggaactggggaattcctttgcatcaaatattagaattaaagaagaacctttggatgatgagtatgacaaagcaatggcaccacagcagggactactagacaaaataaaagatgaacctgacaatgctcaagagtatagtcatggccaacagcaaaaaactcaagagggggaactgaaaattagtgctgtgttttcagtcagtggcagccctcttgctccacagttgactactggctttcagccctcactggcgtcatctggcatgaataaaatgcttccttcagttccagccacagctgttcgagtttcctgttctggttgtaaaaaaatcctccagaaggggcaaactgcttatcagaggaaagggtctactcagctattctgctccacactgtgcctcactggatatacagttccacctgcccgcccaccgcctcctctcaccaagaaaacttgttcaagttgctcaaaagacattttaaatccaaaggatgtgatcagtgcccagtttgaaaacaccaccactagtaaagatttttgcagtcagtcatgtttgtcaacatatgaactgaaaaaaaaacctattgttaccataaatacaaatagtatttcaaccaaatgcagcatgtgtcagaagaatgctgttattcgacatgaagttaattaccagaatgtggtccataaactttgcagtgatgcctgcttctctaagtttcgttctgctaacaacctcaccatgaactgttgtgagaactgtgggggttactgttacagtgggtcgggacaatgccacatgcttcagatagagggacagtctaagaagttttgtagttcatcgtgtatcacggcatacaagcagaaatcagccaaaattacaccgtgtgcgctttgcaaatcattgagatcctcagcagaaatgattgaaaataccaatagcttggggaagacagagcttttctgttctgttaattgcttatctgcttacagagttaaaatggttacttctgcaggtgtacaagttcagtgtaacagttgtaaaacctcagcaattcctcagtatcacctagccatgtcagatggaagtatacgcaacttctgcagctacagctgtgtggtagctttccagaatttattcaacaaaccaactggaatgaattcttcagtagtgcccttgtctcagggccaagtaattgtaagcatccccacaggttccacagtgtcagccggaggaggtagcacatctgctgtttctcccacctccatcagtagctctgctgcagctggtctccagcgtctcgctgcccagtcccagcatgttgggtttgcacgaagtgttgtgaaactcaaatgtcaacactgtaaccgtctttttgccacaaaaccagaacttcttgactataagggcaaaatgtttcagttctgtggcaagaattgttctgatgaatataagaaaataaataatgtaatggcaatgtgtgaatattgtaaaattgagaaaattgtaaaggagactgttcggttctcaggtgctgacaagtcattctgtagtgaaggttgcaaattgctttataaacatgacttggcaaaacgctggggaaatcactgtaaaatgtgcagttattgtttacagacatctcccaaattggtacagaataatttaggagggaaagtggaagagttctgttgtgaagaatgcatgtccaaatatacagttttgttctatcagatggccaaatgtgatgcttgtaagcgacagggtaaactcagtgagtccttgaaatggcgaggggaaatgaaacatttctgtaacctgctttgtatcttgatgttctgtaatcagcaaagtgtatgtgacccgccttcacaaaataatgcagcaaatatttccatggttcaagctgcttcagcaggacccccatctctgagaaaagattcgactccagttatagccaatgtagtatcattggcaagtgcccctgctgctcagcctacagtgaattctaacagtgtcttacaaggtgcagttccaacagtaacagcgaaaatcatcggtgatgcaagtactcaaacagatgccctgaaactgccaccttcccaacctccaaggcttttgaagaacaaagctttattatgcaaacccatcacacagactaaagccacctcttgcaaaccacatacccaaaacaaagaatgccagacagaagacactccaagtcagccccagattattgtggtgccagttcccgtaccagtgtttgttcccatacctcttcacctttatactcaatatgctccagtcccatttggaattccagttccaatgcctgtccctatgcttattccatcttcaatggatagtgaagataaagtcacagagagtattgaagacattaaagaaaagcttcccacacatccatttgaagctgatctccttgagatggcagaaatgattgcagaagatgaagagaagaagactctatctcagggagagtcccaaacttctgaacacgaactctttctagacaccaagatatttgaaaaagaccaaggaagtacatacagtggtgatcttgaatcagaggcagtatctactccacatagctgggaggaagagctgaatcactatgccttaaagtcaaatgctgtgcaagaggctgattcagaattgaagcagttctcaaaaggggaaactgaacaggacctggaagcagattttccatcagactcctttgacccacttaataaaggacagggaatccaggcacgttcccgaacaagacgacgacacagagatggcttcccccaacccagacgaagaggacggaagaagtctatagtggctgtggagcccaggagtcttattcaaggagcctttcaaggctgctcagtgtccgggatgacactgaaatacatgtatggggtaaatgcttggaagaactgggttcagtggaaaaatgccaaggaagagcagggggatctaaaatgtggaggggttgaacaggcctcatctagcccacgttctgaccccttaggaagtactcaagaccatgcactctctcaagaatcctcagagccaggctgtagagtccgctctatcaagctgaaggaagacattctgtcctgcacttttgctgagttgagtttgggcttatgccagtttatccaagaggtgcggagaccaaatggtgaaaaatatgatccagacagtatcttatacttgtgccttggaattcaacagtacctgtttgaaaatggtagaatagataacatttttactgagccctattccagatttatgattgaacttaccaaactcttgaaaatatgggaacctacaatacttcctaatggttacatgttctctcgcattgaggaagagcatttgtgggagtgcaaacagctgggcgcttactcaccaatcgtccttttaaacaccctccttttcttcaataccaaatacttccaactaaagaatgttactgagcacttgaagctttcctttgcccatgtgatgagacggaccaggactctgaagtacagtaccaagatgacatatctgaggttcttcccacctttacagaagcaggagtcagaaccagataaactgactgttggcaagaggaaacgaaatgaagatgatgaggttccagtgggggtggagatggcagagaatactgacaatccactaagatgcccagtccgactttatgagttttacctgtcaaaatgttctgaaagtgtgaagcaaaggaatgatgtgttttaccttcaacctgagcgctcctgtgtcccgaatagccccatgtggtactccacattcccgatagaccctggaaccctggacaccatgttaacacgtattctcatggtgagggaggtacatgaagaacttgccaaagccaaatctgaagactctgatgttgaattatcagattaaaacggaagtgaggttcttattttcatacatattggtatgcaccaaactgtgaatgcatccagctgttggaaaatgatgtataagtctaagtcctcttgacttgaccataagatcatggaaaacagatgacttgtgaaccccacagtgtggatgtgcaaatgaaaattgaaggaaagaatatgaactgagaaatgttctttggcagtgatatagttcttagacatcttcagaatgactaatttctccgagtggtgcataatcttattttgtttgggagtaacaaatcgtggaatatttttaaggaaaactgttgtataaaactttaccatagtaaccttagaccttagagaggtagctttggagtgaaactttggctgcaataggctactttggcaagccctccgtaaaagtcagaggagagatcagtacagagctaagagtgacatcaaatgaggactgtgggacccagatttgaagacccaataaaaatactcaactttttaaaaaagatagtgaagtggtcttgattgattttgattttcactgccaagccaatcatgtgaaggacagaagcttttgccatgggcccctcacatcagggaaaatgaccttcactgctgttaacagtaatgtgtccctttcattttctggatcaagccttctcagcggtgggtctggatgtgggtaaactaaggtaaaggggatgatattccacaaactaattatgcacacagaaaatctgtggagcctatcagaccccaagtgtcttgaaatgtttgtagaaacccactaaaatgccccttctctgggtgtgggcccttattgcagctgtctcacagcctgagctgtggtacagagaaatgggggttctccttttattttcattttttttccccaatggcagcttttctcccgttgttttaccttcctatttcccaaacagttcctcttattttgtcttttgcaccagtttctggaggcccttgtcatttcaaaaaggatagtctcttttcttactctggcaaacctgtgagtgattccacaaagatacagtattacttagctatctgaattatgatagaaaaggtcctagttaggttcctatataaagcatttggaagatgaccttgttgcccttgaaacttgaaaatagggattctggggtgaggatacaaagacattgtcttgcatatccataagcaggtcttagagcattattccaaactctagctgtttcagtagttctatgaggattgcaagtcataggtgtgtgtggcatatcagtccatctccctcatctccattctcagtttcttccccacaaaatttggaatcaaagcttttatgacgtttgccaattgcagaacttcttcagctaaggttaatttgacgctatgataaaactgagagatgtcaaaaagcctcttagaaattttaatcttgaaagacttttcagggtatctcattttttaggtgggggtggcaggtgtatttcttttttaacaaataaaaggcatttaagtaaaactaaaatgaaaaaagtaggccttctgacattgtgtacttggtggttctgtccctctgcctgtaacaaatctcatttttgttaccaagaactgtatgaaagaagtaaatccaccccgattctgtatgattaattccatctgtgtttgtcatttctgactggaaaacttcttactccataccttgttcgatatggaggacaaataattggattgtctgataagtctgccaataaactatccagaaatagcaagtgtaatagtccccactatacgaattttatggtttgtataaacactaacattttccccttctgtagttgtatgaaaaaacaaatattgttagcatagtagataaattgttatgaaataccagaaaaaaaaatctgtatcttttactgagaacacccaatacccagataaatgactgtatcaggatttcatttgcatgttagtccacagagttgcccagaaccctaaatttattcataagagaaaatattgattaattattggtcattcctcataagtgtagctgttgatgtgtgcgtctgattattgcttttttaattttatgaaaattgtgtaaaattacattttttttccaggggagaaaaaaacatcaaacaaaaacatctaaatcatcctttttgttctttttcagtttttaaccacttttaggttttccccttacagaaaccacagaaatattcccttagaataaaatagtatatttgtatttgaaaaaaaaaaaaaaaaaa

SEQ ID NO: 2505 - DNA, 5984 bp, Homo sapiens
cgcgctgtgtgtgtgtgtgagtggagagtgagtgcgggacctgaggctgtgtgtgtgtgaactgtggccactggcggggtcgggggggggcagcggcggagccgcctcggacgataaggaaattgagatttggagaagttaaataaccaagacttcacaggcaaagccatgactacagtagtggtacatgtggactccaaagctgagctcactaccctgctggagcagtgggaaaaggaacatggcagtgggcaggacatggtacctatccttaccaggatgtctcaattgattgaaaaagaaactgaagagtatcgtaaaggggatccagacccatttgatgatcgacatcctggtcgagctgatccagagtgtatgctgggccacttgctgagaatactcttcaagaatgatgatttcatgaatgcactggtgaatgcatatgtgatgacaagccgagagccccctttaaacactgcagcttgcagactcctattagacatcatgccagggctggaaactgctgtcgtctttcaagaaaaggagggaattgtcgagaatcttttcaaatgggcccgagaggccgatcaaccattgaggacatattctactggactgttaggaggtgctatggaaaatcaagacattgctgccaactatagagatgaaaattcacagctggtggcaatagtgcttcgaagactgagggagctacagctacaggaagtggctttgcggcaggaaaacaagcgtcccagtccacggaagctctcttctgaaccccttttgcctctggatgaggaggctgtggatatggactatggtgacatggctgtagatgtagtggatggagaccaagaggaagcttctggagacatggagatctcctttcatcttgattcaggccacaagactagtagcagagtgaactcaacaaccaaacctgaggatggaggattaaagaaaaacaagtcagcaaaacagggtgacagagagaactttaggaaagccaagcaaaagttgggtttctcatcttctgatccagatcgcatgtttgttgagctgtctaatagcagttggtcagaaatgtctccctgggtgattggcaccaattataccctttatcctatgactcctgctatcgagcagcgactcattctccaatatttgacccctctaggagaatatcaggagctacttcccatattcatgcaacttggatcacgggagctgatgatgttctatattgacctgaagcaaactaatgatgtcctgcttacatttgaggcactaaagcacctagcatctctcctgctccataacaaatttgccacagaatttgttgcgcatggtggagtacagaaattactggaaatacctcgtccttctatggctgcaaccggtgtgtctatgtgtttgtattacctatcctacaatcaggatgccatggaaagagtttgcatgcatccccacaatgttctgtctgatgtggtgaactataccctgtggttaatggagtgttctcatgcttcaggatgctgccatgctaccatgtttttttcaatttgcttctcatttcgggccgtcttggagctctttgaccgctatgatggtcttcgtcgtctggtgaacttgatcagtactttggagattctaaatttggaagatcagggtgcacttctgagtgatgatgaaatatttgctagccgccaaactgggaaacatacctgcatggccttgcgcaaatactttgaggctcacctggccattaaattggaacaagtgaagcagtcacttcagaggactgagggtggcattcttgtccacccacaacccccgtacaaggcatgctcatatactcatgaacagattgtggaaatgatggaatttttgatagaatatggcccagcgcagctatattgggaaccagctgaagttttcctcaaactttcttgtgtgcaactcttgttgcagcttatttctattgcctgcaattggaagacctattatgcaaggaatgacactgtgcgctttgctttggatgtcctggctattcttactgtggtgccaaaaatccagctccagttggcagaatcagtggacgtgttggatgaggctggatctacagtctctactgtaggtatcagcattattttgggagtggctgagggtgagttcttcatccatgatgctgaaattcagaagtcagcacttcagattatcatcaattgtgtgtgtggcccagataaccgaatatccagtattggtaaatttatctctggtactcctcggagaaagctgcctcagaaccctaaaagcagtgagcacaccctggccaagatgtggaatgtggttcagtccaacaacggcatcaaggtgctcctgtccttactgtccattaagatgcccatcacagatgcagaccaaatccgggccctggcctgcaaagccctagtgggcctgtctcgcagtagcactgtccggcagatcatcagtaaactgccccttttcagcagctgccagatccagcagctgatgaaggagcctgtgctgcaggacaagcgcagtgaccatgtcaagttctgcaagtatgctgctgaactcattgaacgggtgtcaggaaaaccacttctcattggcactgatgtttccctagcacgactgcagaaagcagatgttgttgcccagtcaaggatctccttccctgagaaagagctgcttttgttgatacgaaaccatcttatttctaaagggcttggagaaacagcaaccgtgctgacaaaagaggctgacctgcccatgactgctgcctcccattcttctgcctttaccccagtcactgctgctgcttctcctgtctctctaccccgaacccctcgtatcgctaatggcattgcaactcgtctgggcagccatgctgctgtgggtgcctctgcgccttctgcccctactgctcatcctcagccacggcccccccagggtccgctagctctgcccggcccatcttatgcaggcaactcccctttgattggtagaatcagttttatcagagagaggccatcaccctgcaatggcaggaaaatcagagtgttgcggcagaagtcggaccatggtgcctacagccaaagcccagccataaaaaaacagctggacagacatcttccttccccacctacgctggacagtataatcacagagtatcttagagaacaacatgctcgctgcaagaatccagttgccacctgcccacctttctccctctttactcctcaccaatgtcctgagccaaaacagaggcggcaagcgccaataaactttacgtcaaggctaaaccgcagggcatcatttccaaagtatggaggggtggatggcggatgctttgataggcaccttatctttagcagattccgtcctatttcagtgttccgggaagccaatgaagatgagagtggcttcacctgctgtgcattctcagcacgggagcggttcctgatgcttggcacctgcacagggcagctgaagctctataatgtgtttagtggacaggaggaggccagctataactgtcacaactcagccatcacacatcttgaaccttccagggatgggtccttgctgctgacatctgctacttggagccagcctttgtctgcactttggggaatgaagtcagtatttgatatgaagcattccttcacagaagatcactatgttgagttcagtaagcactcccaggatcgggtcatcggcacaaaaggagacattgcccacatttatgatattcagactggcaacaagctgttgactctgtttaacccagatcttgccaacaactacaagaggaactgtgccacctttaatcctacagatgatcttgtcttaaatgatggcgtcctctgggatgtccgctctgcacaggccatccacaagtttgacaagttcaatatgaacatcagtggtgttttccatccaaatggactggaggtgatcattaatactgagatttgggaccttcgaacttttcatcttttgcatactgttcccgctctggatcagtgtcgcgtggtgttcaatcacacgggaacagtgatgtatggagctatgttgcaggcagatgatgaagatgacttaatggaagagaggatgaaaagcccctttgggtcatccttccgaacatttaatgcaactgactacaaacctatagcaaccattgatgtgaaacggaacatctttgacctgtgtacagacaccaaagactgctatcttgctgtcattgagaatcaaggcagcatggatgccctgaacatggacacagtatgcaggctgtatgaagtgggcaggcagcgtctggcagaggatgaggatgaagaggaggaccaggaagaggaagaacaggaggaagaagatgatgatgaagatgatgatgacaccgatgatttagatgagcttgacactgaccagttgctggaggcggagttggaggaggacgacaataatgagaacgcaggggaagatggggacaatgacttctctccctctgatgaggagctagcaaaccttctagaggagggagaggacggggaggatgaagactctgatgcagatgaggaggtggaactgatcctgggggacactgacagctctgacaactctgatttggaagatgacatcatcttatctctgaatgagtgaggagccatcactgcttggaagagattcttggcagagagaagaggggacaaatttggttgtgaagtaaacaagaaacacaagacggctaaaactctccaggggcaggtaaagccctgctgggctcagaagcactatagaatttgctgtacacactgaagtgggtctgtgtcacacaggtatttcttggtcctctggagagcagaggactcactcagctctttgcttcatgcctcgctttaatggtagtaaacacttaaccagtggaatagtctgactgctggtactgatggcatcagaagaaaacaggttaacaatcaagtagtgaaagcactatattctagtcattaactcaacggagccagtctcaactctgctgggagcacccacaggtctctgtgggggagacagggactataacagggaggcagaattcaggttggcttgacaacacaccttaggaacatgtgctaaggggctaaggaggcatcagctgtcttccttattctaccagggctgaaaatcggagtcacttaggaggcagcatgagaacagtggcacaccaccagtgaggcacatgttgcctttttgtctttaagcaacaccttagacagggcctgaaccctgggtgggggcactggatgcctgaagtaagtaagttttctcagtggggcagtctcataaaatcaccaggacattgaccacctgacctcccctaactagtgctggccaaggcctgagagttcacagaacctgctaggtcttaagagccaaaggaaggaagtggttgagggccaggaaagagaaggaatgtcatgccagggtgttactcctcaccaaaacttggcagttctttttggggccatgggacacctttctctgaagaggggttggataaggcaaaggttgaagtgtcttctctaggcacgttttctagcatgtttccttttacttggttctgtctcacaaagctgggaggtagatgattcttccgggtcctgagcacctgcttcatgaaggaagataggtagcccagagaagaagttttggacttaacaacataccaaggcagctctggcctgtgactcaggcgtttgttggagagctgcaggaaaaccactgcagtgtgcctgcaacaggacaagacccactcctgtttctggcggtaccagctaccctggaatggtggcgtgtcctgctgtacccaactgacttgcttaggtacctggcagctgtgaccacagctcaagtaaaaaaacaaaaacaggcaaataaataaacatgcttaacatgtc

SEQ ID NO: 2506 - DNA, 1503 bp, Homo sapiens
gcacgcccagcgagttccagaggcgccagtggaagctgcggcggcggtgtctcgcgttcggcgggatttctcttcgctccggctcggcctaggtctacgtccccagctccagccgccggctcggactcggtctctgacccccaactcggtcccctagtccggccccggctccgggccccccaaccctcgctccggcccggcccggcccccaccccagccctgccgcccggccccaggcccggccgcggccgctcccgcctggagccgccgcgcgcccccagcccccctgcaccccctcggcccctcgccttcctcttcccggcgcggccccccggcttccgcgcgccgcccgccaccaatcctcttgctaccatgtccgtggagctcgaggaggccctgccagtgacgaccgccgagggaatggccaagaaggtgaccaaggctggcggctcggcggcgttgtccccatctaagaagaggaagaatagcaagaagaagaaccagccgggcaagtacagccagctggtggtggagaccatccgtaggctgggcgagcgcaacggctcgtcgctggccaagatctacaccgaggccaagaaggttccgtggttcgaccagcagaatgggcgcacctacctcaagtactcgatcaaggcgctggtgcagaacgacacgcttctgcaggtgaagggcaccggcgccaacggttccttcaagctcaaccgcaagaagctggagggcggcggggagcggcgcggagccccggcggccgccaccgccccggcccccaccgcgcacaaagcgaagaaggcagccccgggcgcggccggctcccggcgcgcggacaagaagcccgccaggggccagaagccggagcagcgctcgcacaagaagggcgctggcgccaagaaggacaaaggcggcaaggccaagaagacggcggccgccgggggcaagaaggtgaagaaggcggccaagcccagcgtccccaaagtgcccaagggccgcaagtgagcgtgtcggccggtcagagcggccggcgtgggcttttcggtgtttttgtttttctaccccaagtgacgtagattttgtacggctcacgccggccggggccgcgaggcctggtctgagcctcagggaggggccccgggtcctctcagtctttcccctcccccaacgatgtagcgtttttcgttgtttgctttaggtttttgaaacagccccggcgacgcctctattggctctcggccttggcaacggccgtcgtcatggttactggcccctaggcgccgatggccgaggccgcgcctgcccaccgggcggggtcgctggttggccgggcccaggcgcgcggggacgcggaggccgcgcatcctttcccagctccccaccctccttgcctttgggtgcgcgacaaacaatcgctccgggctcagggctgcgcggctcttcccttcattccatgggcctttttttgggcacaataaagcgtttaaacctttc

SEQ ID NO: 2507 - DNA, 1358 bp, Homo sapiens
ggcccttgcgatcagggcttgaggaacccgcgccatgaagtgcgtgtttgttaccgtagggaccaccagctttgacgacctcattgcgtgtgtgtcggcgcccgacagtctgcaaaaaatcgagagccttggttacaaccgacttatcctgcaaattggtagaggaacggtggtacctgaacccttcagtactgagtcgtttactctggatgtttacaggtacaaggattccttgaaagaagacattcagaaagcagatcttgttattagtcacgcaggtgcaggaagctgtttggagactctggaaaaaggaaagccactcgtagtggttataaacgaaaagttgatgaacaatcatcagctggaactggcaaagcagctacacaaagagggtcatctcttctattgtacctgcagcacgcttcctgggctgttacagtcaatggacttatcaacactgaaatgttatcctcctggccagccagaaaaattttctgcatttttggataaagttgttggattacaaaaataaacactaaactctcaacactttaaaagcaacccccaaattcaacctatgtaatgtgattaaatcaaattaaatacataatatatatttacaaaataatataattaataaacttcctacatctatagaatgtataggaaattttatgttgtgcacatttgcattgggtccaaatcctaattgcagtttagtgaaattactagatttttttctaatcttcagtatgtagtgagcattcacaggttttctcctagaatctcaagtggaattggaatcataaaaatgaatgagatttgaaaactttcacaaagattataaatgtagttagtttgatactccttagaataaaaaaatgaaacagtaacaacttttatgtaaaaaaattttacataagagttagcatctttagctttataatctaaggaaccaaatttaaaaaatgatggattatgctctgtgaaatgaaaagttcaatcattgcctaaaaaagatgatcaagttagttgatctcttgtacttggaaaagctacttttttcctaaagaacagagtggagtggatatattcactttttttttctaaaacatacaaagtgataaaataatcgtgcctaatgtcaaaactttactggtttgagaagaataatcaaaaaggacttataccaataggacttactattgttttttaaggatctcctctcacagtggtaatgaaacattaactgtaacagaaatttacaatttatgtgcttataaaattagttttatgaatgaacaataaactgatgcatataatggctgaaaaaaaaaaaaaaaaaaaaaaaaaaaaaa

SEQ ID NO: 2508 - DNA, 2466 bp, Homo sapiens
acgtgaccctgacccaataagggtggaaggctgagtccgcagagccaataacgagagtccgagaggcgacggaggcggactctgtgaggaaacaagaagagaggcccaagatggagacggcggcggctgtagcggcgtgacaggagccccatggcacctgcccagccccacctcagcccatcttgacaaaatctaaggctccatggagccaccacggggcccccctgccaatggggccgagccatcccgggcagtgggcaccgtcaaagtatacctgcccaacaagcaacgcacggtggtgactgtccgggatggcatgagtgtctacgactctctagacaaggccctgaaggtgcggggtctaaatcaggactgctgtgtggtctaccgactcatcaagggacgaaagacggtcactgcctgggacacagccattgctcccctggatggcgaggagctcattgtcgaggtccttgaagatgtcccgctgaccatgcacaattttgtacggaagaccttcttcagcctggcgttctgtgacttctgccttaagtttctgttccatggcttccgttgccaaacctgtggctacaagttccaccagcattgttcctccaaggtccccacagtctgtgttgacatgagtaccaaccgccaacagttctaccacagtgtccaggatttgtccggaggctccagacagcatgaggctccctcgaaccgccccctgaatgagttgctaaccccccagggtcccagcccccgcacccagcactgtgacccggagcacttccccttccctgccccagccaatgcccccctacagcgcatccgctccacgtccactcccaacgtccatatggtcagcaccacggcccccatggactccaacctcatccagctcactggccagagtttcagcactgatgctgccggtagtagaggaggtagtgatggaaccccccgggggagccccagcccagccagcgtgtcctcggggaggaagtccccacattccaagtcaccagcagagcagcgcgagcggaagtccttggccgatgacaagaagaaagtgaagaacctggggtaccgggactcaggctattactgggaggtaccacccagtgaggtgcagctgctgaagaggatcgggacgggctcgtttggcaccgtgtttcgagggcggtggcatggcgatgtggccgtgaaggtgctcaaggtgtcccagcccacagctgagcaggcccaggctttcaagaatgagatgcaggtgctcaggaagacgcgacatgtcaacatcttgctgtttatgggcttcatgacccggccgggatttgccatcatcacacagtggtgtgagggctccagcctctaccatcacctgcatgtggccgacacacgcttcgacatggtccagctcatcgacgtggcccggcagactgcccagggcatggactacctccatgccaagaacatcatccaccgagatctcaagtctaacaacatcttcctacatgaggggctcacggtgaagatcggtgactttggcttggccacagtgaagactcgatggagcggggcccagcccttggagcagccctcaggatctgtgctgtggatggcagctgaggtgatccgtatgcaggacccgaacccctacagcttccagtcagacgtctatgcctacggggttgtgctctacgagcttatgactggctcactgccttacagccacattggctgccgtgaccagattatctttatggtgggccgtggctatctgtccccggacctcagcaaaatctccagcaactgccccaaggccatgcggcgcctgctgtctgactgcctcaagttccagcgggaggagcggcccctcttcccccagatcctggccacaattgagctgctgcaacggtcactccccaagattgagcggagtgcctcggaaccctccttgcaccgcacccaggccgatgagttgcctgcctgcctactcagcgcagcccgccttgtgccttaggccccgcccaagccaccagggagccaatctcagccctccacgccaaggagccttgcccaccagccaatcaatgttcgtctctgccctgatgctgcctcaggatcccccattccccaccctgggagatgagggggtccccatgtgcttttccagttcttctggaattgggggacccccgccaaagactgagccccctgtctcctccatcatttggtttcctctttggctttggggatacttctaaattttgggagctcctccatctccaatggctgggatttgtggcagggattccactcagaacctctctggaatttgtgcctgatgtgccttccactggattttggggttcccagcaccccatgtggattttgggggtcccttttgtgtctcccccgccattcaaggactcctctctttcttcaccaagaagcacagaattc

SEQ ID NO: 2509 - DNA, 2375 bp, Homo sapiens
acagtcacttactctacaggcagtggggcccgacacagacagcgccgcccccgccagccagcctcgcacgccctcggaagcgcaggctcccggcgctgcgctggagggttccccggcaccccagcctcccgtccccagcccgctgcacctccgggccccccttacccttgagaggcaccgggagttgtcgcgggggggcctcgggaaattccccggacccctgtgccaggaggtgcccggttcgcccgctcttcaccccccgccccccccgagggcggtgcccgggggtgctgccccatggagcggggaggcgggcgccgtctgctccgggagccctgacccgagtcggagctgtgtgtcgcagccgccccgaccccccgccgatcatgcgccggcgcccctggctctccagtcccactgggctgtgagccccccactcccagcccgtcagggcctgcgcgccatgggcagcgcccaccctcgcccctggctgcggctccgaccccagccccagccgcggccagcgctctgggtgctcctgttcttcctactgctgctggctgctgccatgcccaggtcagcacccaatgacattctggacctccgcctccccccggagcccgtgctcaatgccaacacagtgtgcctaacattgccaggcctgagccggcggcagatggaggtgtgtgtgcgtcaccctgatgtggctgcctcagccatacagggcatccagatcgccatccacgaatgccaacaccaattcagggaccagcgctggaactgctcaagcctggagactcgcaacaagatcccctatgagagtcccatcttcagcagaggtttccgagagagcgcttttgcctacgccatcgcagcagctggcgtggtgcacgccgtgtccaatgcgtgtgccctgggcaaactgaaggcctgtggctgtgatgcgtcccggcgaggggacgaggaggccttccgtaggaagctgcaccgcttacaactggatgcactgcagcgtggtaagggcctgagccatggggtcccggaacacccagccctgcccacagccagcccaggcctgcaggactcctgggagtggggcggctgcagccccgacatgggcttcggggagcgcttttctaaggactttctggactcccgggagcctcacagagacatccacgcgagaatgaggcttcacaacaaccgagttgggaggcaggcagtgatggagaacatgcggcggaagtgcaagtgccacggcacgtcaggcagctgccagctcaagacgtgctggcaggtgacgcccgagttccgcaccgtgggggcgctgctgcgcagccgcttccaccgcgccacgctcatccggccgcacaaccgcaacggcggccagctggagccgggcccagcgggggcaccctcgccggctccgggcgctcccgggccgcgccgacgggccagccccgccgacctggtctacttcgaaaagtctcccgacttctgcgagcgcgagccgcgcctggactcggcgggcaccgtgggccgcctgtgcaacaagagcagcgccggctcggatggctgcggcagcatgtgctgcggccgcggccacaacatcctgcgccagacgcgcagcgagcgctgccactgccgcttccactggtgctgtttcgtggtctgcgaagagtgccgcatcaccgagtgggtcagcgtctgcaagtgagcggcccggggtcccctgggccctgatcgaggtcccctcctggagcctggccctctgaggcttacggtcttggcaaggcagcatcgccttggctcttgggaagaggagattggaccacatgatcttataggaacccctcagctctgaggtctgtgatcgccggacagtccaggcctgtctgaaccccaccactcacttctgtgggctctaggactgactgggttcttcctccctccccgaagcccagacagttcagttgggctgggggttgctccacaccctaaaacaagcctcagccaggcaacccgtcagtctgtctccatcctttcaccccttccctggagatgggaggtggggaatgaatggaagctgacgggcagagagaggaggattaaaaaaaagaaatagacataactgagctgaagtaattccataaagggcccagacagcctcctccaccattcccttcatcattcatttaacaaatatttattttgcactctctttgcggcactctgggggcggtggggtgcgtgggggtggcaatgcaaggcactgaggccacagatgtgagtaagcgagacacaacacttgtcctcttggaggttacattcttgctggggggaggcatgggcaataaacaagtaaatatacaaac

SEQ ID NO: 2510 - DNA, 3804 bp, Homo sapiens
ctgtctgagcatttcactgcggagcctgagcgcgcctgcctgggaaaacactgcagcggtgctcggactcctcctgtccagcaggaggcgcggcccggcagctcccgcatgcgcagtgcgctcggtgtcagacggcccggatcccggttaccggcccctcgctcgctgctcgccagcccagactcggccctggcagtggcggctggcgattcggaccgatccgacctgggcggaggtggcccgcgccccgcggcatgagccggtgaccaagctcggggccgagcgggaggcagccgtggccgagccacagggatctgattcctcccagggggatgtcctgcgcctcagggtccggtggtggcctgcggcatcccttgcggtgccagaagccgtgggacgagtgtctttaatgttatagagctactcagagttgctgtttctccttgagatgcttttggagtgtgaggaagaggctgtctgtgtcattatgtgtgcgtcggtcaagtataatatccggggtcctgccctcatcccaagaatgaagaccaagcaccgaatctactatatcaccctcttctccattgtcctcctgggcctcattgccactggcatgtttcagttttggccccattctatcgagtcctcaaatgactggaatgtagagaagcgcagcatccgtgatgtgccggttgttaggctgccagccgacagtcccatcccagagcggggggatctcagttgcagaatgcacacgtgttttgatgtctatcgctgtggcttcaacccaaagaacaaaatcaaggtgtatatctatgctctgaaaaagtacgtggatgactttggcgtctctgtcagcaacaccatctcccgggagtataatgaactgctcatggccatctcagacagtgactactacactgatgacatcaaccgggcctgtctgtttgttccctccatcgatgtgcttaaccagaacacactgcgcatcaaggagacagcacaagcgatggcccagctctctaggtgggatcgaggtacgaatcacctgttgttcaacatgttgcctggaggtcccccagattataacacagccctggatgtccccagagacagggccctgttggctggtggcggcttttctacgtggacttaccggcaaggctacgatgtcagcattcctgtctatagtccactgtcagctgaggtggatcttccagagaaaggaccaggtccacggcaatacttcctcctgtcatctcaggtgggtctccatcctgagtacagagaggacctagaagccctccaggtcaaacatggagagtcagtgttagtactcgataaatgcaccaacctctcagagggtgtcctttctgtccgtaagcgctgccacaagcaccaggtcttcgattacccacaggtgctacaggaggctactttctgtgtggttcttcgtggagctcggctgggccaggcagtattgagcgatgtgttacaagctggctgtgtcccggttgtcattgcagactcctatattttgcctttctctgaagttcttgactggaagagagcatctgtggttgtaccagaagaaaagatgtcagatgtgtacagtattttgcagagcatcccccaaagacagattgaagaaatgcagagacaggcccggtggttctgggaagcgtacttccagtcaattaaagccattgccctggccaccctgcagattatcaatgaccggatctatccatatgctgccatctcctatgaagaatggaatgaccctcctgctgtgaagtggggcagcgtgagcaatccactcttcctcccgctgatcccaccacagtctcaagggttcaccgccatagtcctcacctacgaccgagtagagagcctcttccgggtcatcactgaagtgtccaaggtgcccagtctatccaaactacttgtcgtctggaataatcagaataaaaaccctccagaagattctctctggcccaaaatccgggttccattaaaagttgtgaggactgctgaaaacaagttaagtaaccgtttcttcccttatgatgaaatcgagacagaagctgttctggccattgatgatgatatcattatgctgacctctgacgagctgcaatttggttatgaggtctggcgggaatttcctgaccggttggtgggttacccgggtcgtctgcatctctgggaccatgagatgaataagtggaagtatgagtctgagtggacgaatgaagtgtccatggtgctcactggggcagctttttatcacaagtattttaattacctgtatacctacaaaatgcctggggatatcaagaactgggtagatgctcatatgaactgtgaagatattgccatgaacttcctggtggccaacgtcacgggaaaagcagttatcaaggtaaccccacgaaagaaattcaagtgtcctgagtgcacagccatagatgggctttcactagaccaaacacacatggtggagaggtcagagtgcatcaacaagtttgcttcagtcttcgggaccatgcctctcaaggtggtggaacaccgagctgaccctgtcctgtacaaagatgactttcctgagaagctgaagagcttccccaacattggcagcttatgaaacgtgtcattggtggaggtctgaatgtgaggctgggacagagggagagaacaaggcctcccagcactctgatgtcagagtagtaggttaagggtggaaggttgacctacttggatcttggcatgcacccacctaacccactttctcaagaacaagaacctagaatgaatatccaagcacctcgagctatgcaacctctgttcttgtatttcttatgatctctgatgggttcttctcgaaaatgccaagtggaagactttgtggcatgctccagatttaaatccagctgaggctccctttgttttcagttccatgtaacaatctggaaggaaacttcacggacaggaagactgctggagaagagaagcgtgttagcccatttgaggtctggggaatcatgtaaagggtacccagacctcacttttagttatttacatcaatgagttctttcagggaaccaaacccagaattcggtgcaaaagccaaacatcttggtgggatttgataaatgccttgggacctggagtgctgggcttgtgcacaggaagagcaccagccgctgagtcaggatcctgtcagttccatgagctattcctctttggtttggctttttgatatgattaaaattattttttattcctttttctactgtgtcttaaacaccaattcctgatagtccaaggaaccacctttctcccttgatatatttaactccgtctttggcctgacaacagtcttctgcccatgtctgggaacacacgccaggaggaatgtctgataccctctgcatcaagcgtaagaaggtcccaaatcataaccattttaagaacagatgactcagaaacctccagaggaatctgtttgcttcctgattagatccagtcaatgttttaaaggtattgtcagagaaaaacagagggtctgtactagccatgcaaggagtcgctctagctggtacccgtaaaagttgtgggaattgtgacccccatcccaaggggatgccaaaatttctctcattcttttggtataaacttaacattagccagggaggttctggctaacgttaaatgctgctatacaactgctttgcaacagttgctggtatatttaaatcattaaatttcagcatttactaatactgcaaaaaaaaaaaaaaaaaa

SEQ ID NO: 2511 - DNA, 3651 bp, Homo sapiens
ctgtctgagcatttcactgcggagcctgagcgcgcctgcctgggaaaacactgcagcggtgctcggactcctcctgtccagcaggaggcgcggcccggcagctcccgcatgcgcagtgcgctcggtgtcagacggcccggatcccggttaccggcccctcgctcgctgctcgccagcccagactcggccctggcagtggcggctggcgattcggaccgatccgacctgggcggaggtggcccgcgccccgcggcatgagccggtgaccaagctcggggccgagcgggaggcagccgtggccgaggagtgtgaggaagaggctgtctgtgtcattatgtgtgcgtcggtcaagtataatatccggggtcctgccctcatcccaagaatgaagaccaagcaccgaatctactatatcaccctcttctccattgtcctcctgggcctcattgccactggcatgtttcagttttggccccattctatcgagtcctcaaatgactggaatgtagagaagcgcagcatccgtgatgtgccggttgttaggctgccagccgacagtcccatcccagagcggggggatctcagttgcagaatgcacacgtgttttgatgtctatcgctgtggcttcaacccaaagaacaaaatcaaggtgtatatctatgctctgaaaaagtacgtggatgactttggcgtctctgtcagcaacaccatctcccgggagtataatgaactgctcatggccatctcagacagtgactactacactgatgacatcaaccgggcctgtctgtttgttccctccatcgatgtgcttaaccagaacacactgcgcatcaaggagacagcacaagcgatggcccagctctctaggtgggatcgaggtacgaatcacctgttgttcaacatgttgcctggaggtcccccagattataacacagccctggatgtccccagagacagggccctgttggctggtggcggcttttctacgtggacttaccggcaaggctacgatgtcagcattcctgtctatagtccactgtcagctgaggtggatcttccagagaaaggaccaggtccacggcaatacttcctcctgtcatctcaggtgggtctccatcctgagtacagagaggacctagaagccctccaggtcaaacatggagagtcagtgttagtactcgataaatgcaccaacctctcagagggtgtcctttctgtccgtaagcgctgccacaagcaccaggtcttcgattacccacaggtgctacaggaggctactttctgtgtggttcttcgtggagctcggctgggccaggcagtattgagcgatgtgttacaagctggctgtgtcccggttgtcattgcagactcctatattttgcctttctctgaagttcttgactggaagagagcatctgtggttgtaccagaagaaaagatgtcagatgtgtacagtattttgcagagcatcccccaaagacagattgaagaaatgcagagacaggcccggtggttctgggaagcgtacttccagtcaattaaagccattgccctggccaccctgcagattatcaatgaccggatctatccatatgctgccatctcctatgaagaatggaatgaccctcctgctgtgaagtggggcagcgtgagcaatccactcttcctcccgctgatcccaccacagtctcaagggttcaccgccatagtcctcacctacgaccgagtagagagcctcttccgggtcatcactgaagtgtccaaggtgcccagtctatccaaactacttgtcgtctggaataatcagaataaaaaccctccagaagattctctctggcccaaaatccgggttccattaaaagttgtgaggactgctgaaaacaagttaagtaaccgtttcttcccttatgatgaaatcgagacagaagctgttctggccattgatgatgatatcattatgctgacctctgacgagctgcaatttggttatgaggtctggcgggaatttcctgaccggttggtgggttacccgggtcgtctgcatctctgggaccatgagatgaataagtggaagtatgagtctgagtggacgaatgaagtgtccatggtgctcactggggcagctttttatcacaagtattttaattacctgtatacctacaaaatgcctggggatatcaagaactgggtagatgctcatatgaactgtgaagatattgccatgaacttcctggtggccaacgtcacgggaaaagcagttatcaaggtaaccccacgaaagaaattcaagtgtcctgagtgcacagccatagatgggctttcactagaccaaacacacatggtggagaggtcagagtgcatcaacaagtttgcttcagtcttcgggaccatgcctctcaaggtggtggaacaccgagctgaccctgtcctgtacaaagatgactttcctgagaagctgaagagcttccccaacattggcagcttatgaaacgtgtcattggtggaggtctgaatgtgaggctgggacagagggagagaacaaggcctcccagcactctgatgtcagagtagtaggttaagggtggaaggttgacctacttggatcttggcatgcacccacctaacccactttctcaagaacaagaacctagaatgaatatccaagcacctcgagctatgcaacctctgttcttgtatttcttatgatctctgatgggttcttctcgaaaatgccaagtggaagactttgtggcatgctccagatttaaatccagctgaggctccctttgttttcagttccatgtaacaatctggaaggaaacttcacggacaggaagactgctggagaagagaagcgtgttagcccatttgaggtctggggaatcatgtaaagggtacccagacctcacttttagttatttacatcaatgagttctttcagggaaccaaacccagaattcggtgcaaaagccaaacatcttggtgggatttgataaatgccttgggacctggagtgctgggcttgtgcacaggaagagcaccagccgctgagtcaggatcctgtcagttccatgagctattcctctttggtttggctttttgatatgattaaaattattttttattcctttttctactgtgtcttaaacaccaattcctgatagtccaaggaaccacctttctcccttgatatatttaactccgtctttggcctgacaacagtcttctgcccatgtctgggaacacacgccaggaggaatgtctgataccctctgcatcaagcgtaagaaggtcccaaatcataaccattttaagaacagatgactcagaaacctccagaggaatctgtttgcttcctgattagatccagtcaatgttttaaaggtattgtcagagaaaaacagagggtctgtactagccatgcaaggagtcgctctagctggtacccgtaaaagttgtgggaattgtgacccccatcccaaggggatgccaaaatttctctcattcttttggtataaacttaacattagccagggaggttctggctaacgttaaatgctgctatacaactgctttgcaacagttgctggtatatttaaatcattaaatttcagcatttactaatactgcaaaaaaaaaaaaaaaaaa

SEQ ID NO: 2512 - DNA, 2320 bp, Homo sapiens
gtgagcgcctgagagtctttttgcctttcagagttaaggcctcactggcctgggaaaataattgctgccttttgcatccgcgttggctccgtccccaggatcttcccggttcagggacctggcgatttctgagtgttccggaatcccaataaccctgtttaaagaggaatggagattgccactgtccatttagattaatgaggtgtcctgaagtgatggtgacatcaatgaaaggagggttctgacacgttctcacctcgcgggatggcagctgctgatttgtcccatggacattatctttctggggacccagtttgccttcatgaagaaaagacaccagcaggaagaatagtggctgactgcctaacagattgttatcaggattcagtgacctttgacgatgtggctgtggacttcacccaggaggagtggactttactggactcaactcagagaagcctctacagtgacgtgatgctggagaactacaagaacctggccacagtaggaggtcagatcatcaaacccagtctaatctcttggttggaacaagaagagtcaaggacagttcagggaggagttctccaaggatgggaaatgcgacttgaaacccagtggtctatacttcagcaggactttttgaggggtcagacatccattgggatacaattggaaggaaaacacaatggaagggaactctgtgactgtgagcaatgtggagaagtcttcagtgaacactcatgccttaagacgcacgtgagaactcaaagtacagggaacactcatgactgtaatcagtatggaaaagatttccttaccctgtgtgagaaaacctctactggtgagaaactttctgagtttaatcagagtgaaaaaatcttcagcctgacaccaaatattgtataccagagaactagcacacaagaaaagtcatttgaatgtagtcactgtggaaaatccttcattaatgagtcataccttcaggcacatatgagaactcacaatggagaaaaactctacgaatggaggaattatgggccaggttttattgactctacaagcctttctgtgcttatagaaaccctcaatgcaaaaaagccctacaaatgtaaggaatgtggaaaaggctatagatacccagcctacctcagtattcacatgcgaacccacactggggagaaaccatatgaatgtaaggaatgtgggaaagccttcaattattccaactcatttcagatacatggaagaactcacactggagagaaaccctatgtatgtaaggaatgtgggaaagccttcactcagtactcgggccttagtatgcatgtacgatctcacagtggagacaagccctatgaatgtaaggaatgtgggaaatccttccttacatcctcacgccttattcaacatataagaactcacactggagagaagccttttgtatgtgttgaatgtgggaaagcctttgcagtttcctcaaatcttagtggacatttgagaactcacactgaagagaaggcctgtgagtgtaagatatgtgggaaagtatttgggtatccctcatgtcttaataatcacatgcgaacgcacagtgcccagaaaccatacacctgtaaggaatgtgggaaggcttttaactattccacccaccttaaaattcacatgcgaatccacactggagaaaaaccctatgagtgtaaacaatgtggaaaggccttcagtcattccagttcatttcaaatacatgaaaggactcacactggagagaaaccctatgaatgcaaggagtgtgggaaagccttcacgtgttccagttcctttagaattcatgaaaaaactcacacagaagagaaaccctataaatgtcagcaatgcgggaaagcttacagtcatccccgttcacttcgaagacatgaacaaattcactagtgagaaactgtccatgtaataaatgtgggaaagctctcatttgttccagttcactttaaagacatgaatgaactcactctggagagaagaagctgcatgaaaattacttaattcctgtaatcccagcattttgagaggctgaggtgggtggatcacttgaggtcaggagtttgagaccaccctggccaacatggtgaaaccttgtctctactgaaaatacaaaaaatttagccaggtgtggtgggcacctgtaatcccagctacttgggaggctgaggcaagtgaatcacttgaacccaggaagcagaggttgcagtgagcagagatcatgccactgcactccagcctgggcgatggagtgagactccatctcaaaaaaaaaaaaaaaaaa

SEQ ID NO: 2513 - DNA, 1099 bp, Homo sapiens
cggccggagtgcggcgctgggcggaagctaccatggcggccgagagaaagacaaagttgtccaagaatctgctgcgcatgaagtttatgcaaaggggactggactcagaaaccaagaaacaactagaagaagaagaaaagaaaatcattagtgaagagcactggtacttggatttgccagagcttaaagagaaagagagtttcataatagaagagcagagtttcttactatgtgaagatcttctctatggaagaatgtcattcagaggatttaatcctgaggttgagaaattgatgcttcagatgaatgctaagcacaaagcagaagaagttgaagatgaaacagtagagcttgatgtgtcagatgaagagatggctagaagatatgagaccttggtggggacaattgggaaaaagtttgccagaaagagagaccatgccaattatgaagaagatgaaaatggagacatcacaccaattaaagcaaagaagatgttcttaaagccccaggattaagatggatgccttaagcgatggcccaggggtgcttggtggaagtcagcagggcatctggagctcatcccaatggtgtctctatagttattaatactgtaacgtttacttgtaaagagattatcattttagaaacatgctgtttttgaaacagatgtgtgatggatgttgtacatcctttgcttcttggtattcattcagagtggatttttagcccctgatctacaaatgtacattgttacagggctgcttcctaaagattttttttacctcaggtttctcttaatatagttctccagtcactgaccttgaattgacttacataaactactgccaatgtttaaattgcccttatgtttatgtttattatgtcaagccaattcgtacatacaatttggaatcaagtgtcataagaatttattatataaatttatcaagaataaaaatgcctctccagccttaagtatttacatgctcccaggtcattgtcagtttatggtattatgttgttttatttaaagcattgaattgatagaaaaatttgctctgtaataaaaatctactttcaaaaaaaaaaaaaaaaaaaa

SEQ ID NO: 2514 - DNA, 2993 bp, Homo sapiens
cgctggggcgctttccgaggaaattcgggactcgagtttcccggggaagaggcgcggcctgagcccggcgagggtggggagggcaggcgcaggtggaccccggcgccccccgagccccgctgtgaccttggccgcgggggaggggctgggccgctgcggggcagtcgcggccgccagagggggcagcggagaagaacttgcccaacttggcggcgcgggctggggcggctctgcgcctccgcgcccgcctccccggcctccgccttctcccctcccgcgagcctcctcccctcccgcgagcctcctcccctgggccctcctcccgtcctccccgccgccgccggtcccggtgcgcgcccatccctgcccgcagccccgcgcgccggccgagtcgctgagccgcggctgccggacgggacgggaccggctaggctgggcgcgccccccgggccccgccgtgggcatgggcgcactggcccgggcgctgctgctgcctctgctggcccagtggctcctgcgcgccgccccggagctggcccccgcgcccttcacgctgcccctccgggtggccgcggccacgaaccgcgtagttgcgcccaccccgggacccgggacccctgccgagcgccacgccgacggcttggcgctcgccctggagcctgccctggcgtcccccgcgggcgccgccaacttcttggccatggtagacaacctgcagggggactctggccgcggctactacctggagatgctgatcgggacccccccgcagaagctacagattctcgttgacactggaagcagtaactttgccgtggcaggaaccccgcactcctacatagacacgtactttgacacagagaggtctagcacataccgctccaagggctttgacgtcacagtgaagtacacacaaggaagctggacgggcttcgttggggaagacctcgtcaccatccccaaaggcttcaatacttcttttcttgtcaacattgccactatttttgaatcagagaatttctttttgcctgggattaaatggaatggaatacttggcctagcttatgccacacttgccaagccatcaagttctctggagaccttcttcgactccctggtgacacaagcaaacatccccaacgttttctccatgcagatgtgtggagccggcttgcccgttgctggatctgggaccaacggaggtagtcttgtcttgggtggaattgaaccaagtttgtataaaggagacatctggtatacccctattaaggaagagtggtactaccagatagaaattctgaaattggaaattggaggccaaagccttaatctggactgcagagagtataacgcagacaaggccatcgtggacagtggcaccacgctgctgcgcctgccccagaaggtgtttgatgcggtggtggaagctgtggcccgcgcatctctgattccagaattctctgatggtttctggactgggtcccagctggcgtgctggacgaattcggaaacaccttggtcttacttccctaaaatctccatctacctgagagacgagaactccagcaggtcattccgtatcacaatcctgcctcagctttacattcagcccatgatgggggccggcctgaattatgaatgttaccgattcggcatttccccatccacaaatgcgctggtgatcggtgccacggtgatggagggcttctacgtcatcttcgacagagcccagaagagggtgggcttcgcagcgagcccctgtgcagaaattgcaggtgctgcagtgtctgaaatttccgggcctttctcaacagaggatgtagccagcaactgtgtccccgctcagtctttgagcgagcccattttgtggattgtgtcctatgcgctcatgagcgtctgtggagccatcctccttgtcttaatcgtcctgctgctgctgccgttccggtgtcagcgtcgcccccgtgaccctgaggtcgtcaatgatgagtcctctctggtcagacatcgctggaaatgaatagccaggcctgacctcaagcaaccatgaactcagctattaagaaaatcacatttccagggcagcagccgggatcgatggtggcgctttctcctgtgcccacccgtcttcaatctctgttctgctcccagatgccttctagattcactgtcttttgattcttgattttcaagctttcaaatcctccctacttccaagaaaaataattaaaaaaaaaacttcattctaaaccaaaacagagtggattgggctgcaggctctatggggttcgttatgccaaagtgtctacatgtgccaccaacataaaacaaaaccaagccttggctcgttctcttctctcttcaatctctggaaaaataagtacatatagttgataacccctcttagcttacaggaagctttttgtattaattgcctttgaggttattttccgccagacctcaacctgggtcaaagtggtacaggaaggcttgcagtatgatggcaggagaatcagcctggggcctggggatgtaaccaagctgtacccttgagacctggaaccagagccacaggccccttttgtgggtttctctgtgctctgaatgggagccagaattcactaggaggtcatcaaccgatggtcctcacaagcctcttctgaagatggaaggccttttgcccgttgaggtagaggggaaggaaatctcctcttttgtacccaatacttatgttgtattgttggtgcgaaagtaaaaacactacctcttttgagactttgcccagggtcctgtgcctggatgggggtgcaggcagccttgaccacggctgttcccctcacccaaaagaattatcatcccaacagccaagacccaacaggtgctgaactgtgcatcaaccaggaagagttctatccccaagctggccactatcacatatgcttactcttgcttaaaattaataaatcatgttttgatgagaaaaaactattcta

SEQ ID NO: 2515 - DNA, 2843 bp, Homo sapiens
cgctggggcgctttccgaggaaattcgggactcgagtttcccggggaagaggcgcggcctgagcccggcgagggtggggagggcaggcgcaggtggaccccggcgccccccgagccccgctgtgaccttggccgcgggggaggggctgggccgctgcggggcagtcgcggccgccagagggggcagcggagaagaacttgcccaacttggcggcgcgggctggggcggctctgcgcctccgcgcccgcctccccggcctccgccttctcccctcccgcgagcctcctcccctcccgcgagcctcctcccctgggccctcctcccgtcctccccgccgccgccggtcccggtgcgcgcccatccctgcccgcagccccgcgcgccggccgagtcgctgagccgcggctgccggacgggacgggaccggctaggctgggcgcgccccccgggccccgccgtgggcatgggcgcactggcccgggcgctgctgctgcctctgctggcccagtggctcctgcgcgccgccccggagctggcccccgcgcccttcacgctgcccctccgggtggccgcggccacgaaccgcgtagttgcgcccaccccgggacccgggacccctgccgagcgccacgccgacggcttggcgctcgccctggagcctgccctggcgtcccccgcgggcgccgccaacttcttggccatggtagacaacctgcagggggactctggccgcggctactacctggagatgctgatcgggacccccccgcagaagctacagattctcgttgacactggaagcagtaactttgccgtggcaggaaccccgcactcctacatagacacgtactttgacacagagaggtctagcacataccgctccaagggctttgacgtcacagtgaagtacacacaaggaagctggacgggcttcgttggggaagacctcgtcaccatccccaaaggcttcaatacttcttttcttgtcaacattgccactatttttgaatcagagaatttctttttgcctgggattaaatggaatggaatacttggcctagcttatgccacacttgccaagccatcaagttctctggagaccttcttcgactccctggtgacacaagcaaacatccccaacgttttctccatgcagatgtgtggagccggcttgcccgttgctggatctgggaccaacggaggtagtcttgtcttgggtggaattgaaccaagtttgtataaaggagacatctggtatacccctattaaggaagagtggtactaccagatagaaattctgaaattggaaattggaggccaaagccttaatctggactgcagagagtataacgcagacaaggccatcgtggacagtggcaccacgctgctgcgcctgccccagaaggtgtttgatgcggtggtggaagctgtggcccgcgcatctctgctttacattcagcccatgatgggggccggcctgaattatgaatgttaccgattcggcatttccccatccacaaatgcgctggtgatcggtgccacggtgatggagggcttctacgtcatcttcgacagagcccagaagagggtgggcttcgcagcgagcccctgtgcagaaattgcaggtgctgcagtgtctgaaatttccgggcctttctcaacagaggatgtagccagcaactgtgtccccgctcagtctttgagcgagcccattttgtggattgtgtcctatgcgctcatgagcgtctgtggagccatcctccttgtcttaatcgtcctgctgctgctgccgttccggtgtcagcgtcgcccccgtgaccctgaggtcgtcaatgatgagtcctctctggtcagacatcgctggaaatgaatagccaggcctgacctcaagcaaccatgaactcagctattaagaaaatcacatttccagggcagcagccgggatcgatggtggcgctttctcctgtgcccacccgtcttcaatctctgttctgctcccagatgccttctagattcactgtcttttgattcttgattttcaagctttcaaatcctccctacttccaagaaaaataattaaaaaaaaaacttcattctaaaccaaaacagagtggattgggctgcaggctctatggggttcgttatgccaaagtgtctacatgtgccaccaacataaaacaaaaccaagccttggctcgttctcttctctcttcaatctctggaaaaataagtacatatagttgataacccctcttagcttacaggaagctttttgtattaattgcctttgaggttattttccgccagacctcaacctgggtcaaagtggtacaggaaggcttgcagtatgatggcaggagaatcagcctggggcctggggatgtaaccaagctgtacccttgagacctggaaccagagccacaggccccttttgtgggtttctctgtgctctgaatgggagccagaattcactaggaggtcatcaaccgatggtcctcacaagcctcttctgaagatggaaggccttttgcccgttgaggtagaggggaaggaaatctcctcttttgtacccaatacttatgttgtattgttggtgcgaaagtaaaaacactacctcttttgagactttgcccagggtcctgtgcctggatgggggtgcaggcagccttgaccacggctgttcccctcacccaaaagaattatcatcccaacagccaagacccaacaggtgctgaactgtgcatcaaccaggaagagttctatccccaagctggccactatcacatatgcttactcttgcttaaaattaataaatcatgttttgatgagaaaaaactattcta

SEQ ID NO: 2516 - DNA, 2824 bp, Homo sapiens
cgctggggcgctttccgaggaaattcgggactcgagtttcccggggaagaggcgcggcctgagcccggcgagggtggggagggcaggcgcaggtggaccccggcgccccccgagccccgctgtgaccttggccgcgggggaggggctgggccgctgcggggcagtcgcggccgccagagggggcagcggagaagaacttgcccaacttggcggcgcgggctggggcggctctgcgcctccgcgcccgcctccccggcctccgccttctcccctcccgcgagcctcctcccctcccgcgagcctcctcccctgggccctcctcccgtcctccccgccgccgccggtcccggtgcgcgcccatccctgcccgcagccccgcgcgccggccgagtcgctgagccgcggctgccggacgggacgggaccggctaggctgggcgcgccccccgggccccgccgtgggcatgggcgcactggcccgggcgctgctgctgcctctgctggcccagtggctcctgcgcgccgccccggagctggcccccgcgcccttcacgctgcccctccgggtggccgcggccacgaaccgcgtagttgcgcccaccccgggacccgggacccctgccgagcgccacgccgacggcttggcgctcgccctggagcctgccctggcgtcccccgcgggcgccgccaacttcttggccatggtagacaacctgcagggggactctggccgcggctactacctggagatgctgatcgggacccccccgcagaagctacagattctcgttgacactggaagcagtaactttgccgtggcaggaaccccgcactcctacatagacacgtactttgacacagagaggtctagcacataccgctccaagggctttgacgtcacagtgaagtacacacaaggaagctggacgggcttcgttggggaagacctcgtcaccatccccaaaggcttcaatacttcttttcttgtcaacattgccactatttttgaatcagagaatttctttttgcctgggattaaatggaatggaatacttggcctagcttatgccacacttgccaagccatcaagttctctggagaccttcttcgactccctggtgacacaagcaaacatccccaacgttttctccatgcagatgtgtggagccggcttgcccgttgctggatctgggaccaacggaggtagtcttgtcttgggtggaattgaaccaagtttgtataaaggagacatctggtatacccctattaaggaagagtggtactaccagatagaaattctgaaattggaaattggaggccaaagccttaatctggactgcagagagtataacgcagacaaggccatcgtggacagtggcaccacgctgctgcgcctgccccagaaggtgtttgatgcggtggtggaagctgtggcccgcgcatctctgattccagaattctctgatggtttctggactgggtcccagctggcgtgctggacgaattcggaaacaccttggtcttacttccctaaaatctccatctacctgagagacgagaactccagcaggtcattccgtatcacaatcctgcctcagaaattgcaggtgctgcagtgtctgaaatttccgggcctttctcaacagaggatgtagccagcaactgtgtccccgctcagtctttgagcgagcccattttgtggattgtgtcctatgcgctcatgagcgtctgtggagccatcctccttgtcttaatcgtcctgctgctgctgccgttccggtgtcagcgtcgcccccgtgaccctgaggtcgtcaatgatgagtcctctctggtcagacatcgctggaaatgaatagccaggcctgacctcaagcaaccatgaactcagctattaagaaaatcacatttccagggcagcagccgggatcgatggtggcgctttctcctgtgcccacccgtcttcaatctctgttctgctcccagatgccttctagattcactgtcttttgattcttgattttcaagctttcaaatcctccctacttccaagaaaaataattaaaaaaaaaacttcattctaaaccaaaacagagtggattgggctgcaggctctatggggttcgttatgccaaagtgtctacatgtgccaccaacataaaacaaaaccaagccttggctcgttctcttctctcttcaatctctggaaaaataagtacatatagttgataacccctcttagcttacaggaagctttttgtattaattgcctttgaggttattttccgccagacctcaacctgggtcaaagtggtacaggaaggcttgcagtatgatggcaggagaatcagcctggggcctggggatgtaaccaagctgtacccttgagacctggaaccagagccacaggccccttttgtgggtttctctgtgctctgaatgggagccagaattcactaggaggtcatcaaccgatggtcctcacaagcctcttctgaagatggaaggccttttgcccgttgaggtagaggggaaggaaatctcctcttttgtacccaatacttatgttgtattgttggtgcgaaagtaaaaacactacctcttttgagactttgcccagggtcctgtgcctggatgggggtgcaggcagccttgaccacggctgttcccctcacccaaaagaattatcatcccaacagccaagacccaacaggtgctgaactgtgcatcaaccaggaagagttctatccccaagctggccactatcacatatgcttactcttgcttaaaattaataaatcatgttttgatgagaaaaaactattcta

SEQ ID NO: 2517 - DNA, 2945 bp, Homo sapiens
acgcggcggcgtgccagcctagccactctagcgacggcggggaagagtgtgtacgtggtgggggcttcctcggtggcgggcatggaggcttcgcgctgccggctcagtcccagcggcgacagtgtcttccatgaagaaatgatgaagatgcgacaggctaagctggattatcagaggctactacttgagaagaggcaaaggaaaaagcgccttgagccatttatggtgcagcccaatccagaagccaggctacgtcgggcaaagccaagggccagtgatgagcagactcccttggtgaactgtcatactccccacagcaatgtcatcttacatggtattgatggtccagctgctgtcctgaaaccagacgaagttcatgctccatcagtaagctcctctgttgtggaagaagatgctgaaaacaccgtggatactgcttccaagccaggacttcaggagcgtctccaaaagcatgatatctctgaaagtgtgaacttcgatgaggagactgatggaatatcccagtcagcatgtttagaaagacccaattctgcatcaagccagaattcaaccgatacaggcacttccggttctgctactgccgcccaaccagctgataacctcctgggagacatagacgacctggaggactttgtgtatagtcctgcccctcaaggtgtcacagtaagatgtcggataatccgggataaaaggggaatggatcggggtctcttccccacctactatatgtacttggaaaaagaagaaaatcagaagatatttcttcttgcagctagaaagcggaaaaagagcaaaacagccaactaccttatctccattgatccagttgatttatctcgtgaaggagaaagttatgtcggcaagcttagatccaacctcatggggaccaagtttacagtttatgaccgtggcatctgccccatgaagggccggggtttggtaggagcggcccacacccggcaggagctggctgccatctcctatgaaacaaacgtacttggatttaaaggtcctaggaaaatgtctgtgatcattcctggaatgacactgaatcataagcagatcccctatcagccacaaaacaaccatgacagtttgctctcaaggtggcagaacagaactatggaaaatctggttgagctgcacaacaaggcccccgtctggaacagtgacactcagtcctatgtcctcaacttccgtggccgggtcactcaggcgtctgtgaagaacttccagatagtccacaaaaatgaccctgattatatagtcatgcagtttggacgtgtggcagatgacgtgttcacactggattacaactacccactttgtgcagtacaggcctttggcatcggtctttctagctttgacagtaagctggcgtgtgaatgagagaacagtcaggcagggagcccttctccccacagagctttcaggagcagacagtggcctccccttcccctccctgccccaggacttaaagagcaatagtttgccccttttggaatgatctctgaatatataaaacacacacacaaagagcaatagtttgccccttttggaacgacccctgaatatataaaacacacacacaccccgcgcactctcactccttttccaggtttcatagacttggtgagggatcacagcttagcatgggtgagagatgatttaaagcacagggagattcttgtcacattggggtctccaaagctagaatgggatttcatgtgcttggaaacttgcagtagaatcagggactgacatcgcagttcctctcctctcttcattccctcacagcagattggccggcaccaatcttagtcaagagtggctgtgatcacatttgtgatcaattatgtgagaattttatataattgtcttcatttcaattaaggctgaaagcataaactctagaggtgactcagtcaggactgacagtaatgtgataattgccttcattttcaacccaggagtgcctctcacagctatatgactacggatccattagtgaggagcgacacacacacctgtaggcatcctgtgcaaacactttgtcattatcaagagagatggcagtattgaccatttagtttagttaaaaaaaaaaaaaaaaaggtggcaggagaggctttggggaggatcagccagcagacatgagcactgctggcccgtgtggcagagctgtggactttcttctcggctccctcaaccctggctcaggcacagaaggtgttttgctacgtttttttgattattacacccctccacgtattatgtgactcttacaccagttcacccttcccagaatgtatccaaaccttgagaatgcaggagctctgtgagctccaccgtcagcaccattcagctgcatcccttgtgcacagaactgtttgccagcgttgggtgggacacccgtggcggctgctccctcagacctcccttctgtggactgacctctcacctccgcctgttgttcctgcaccacatcagataagcatgtgaaggagggccaactggcagctgcgggacccttggcttgtcccccaccgacaagtcccacctgctgggtgaggacgagactgtttccatctcaggcatgtatcccaccaagtgcctccctcacagccatgcccagaagcctcacacctcgtcaccaccaccaccccccaccccatcctgaggcactgcctggcagataaccctggttggccacagaagctattaatacacgacagcatgtggggaaggacttatggtgggccaggtggacctcatcctgcttcttcctccctctggtttaaagagatatataaactaatttcacataatttgtgtgtgcaggtgattggtttttacataagtcctatttataccttttatatgttacagaaataaaagttaatttatataaaaaaaaaaaaaaa

SEQ ID NO: 2518 - DNA, 1590 bp, Homo sapiens
acacagcttctccactggatcatcggtggcgatgaaggggcggctggggaaggatgtcagagaaaccagaagcttgacggtgaatcctcgggttttaaggagagagcaaagtcctgagagggcgacgtattgtccctgctcacctagcccagaatgaacaaacacgcgccagccagggagcagcgagccgagaattcggacgagcctctgcaaccgccatttgccgttctcgcaaagactaccaagaccacaatgcaacggggcgccgagctaattcccagtgagcagcaggcgaggcgccaccgacgcggaagactataagccccagcgggcgacgaccgaacgcccccgggaacaccgggccccgagctcggtcccgcgcccgaggatcctccacggggctagatggctgcgtcgggggcgggagcggaggtgagcgggcgctagggccgcgagcccccgccggcccttcctccagcgccctgcggaccccgcagaaggcgctcgcctccctagcccgcaaaaacatatcgatttttctcgctgtggcaacggggacgtcctgatagatcctctgctccaataggcaactccggccttccctgccctgacctggaacctctgggagggctgcagagtaagtgccgcctctgcgctccgacggaggcacgaggcctgtggagtaggtccctctgttccgacaggtgcgacacttggcgctccatgcttgcgggtgccgggaggcctggcctcccccagggccgccacctctgctggttgctctgtgctttcaccttaaagctctgccaagcagaggctcccgtgcaggaagagaagctgtcagcaagcacctcaaatttgccatgctggctggtggaagagtttgtggtagcagaagagtgctctccatgctctaatttccgggctaaaactacccctgagtgtggtcccacaggatatgtagagaaaatcacatgcagctcatctaagagaaatgagttcaaaagctgccgctcagctttgatggaacaacgcttattttggaagttcgaaggggctgtcgtgtgtgtggccctgatcttcgcttgtcttgtcatcattcgtcagcgacaattggacagaaaggctctggaaaaggtccggaagcaaatcgagtccatatagctacattccacccttgtatcctgggtcttagagaccctatctcagacagtgaaagtgaaatggactgatttgcactcttggttctttggagccttgtggtggaatccccttttccccatcttcttctttcagatcattaatgagcagaataaaaagagtaaaatggtttccttcccttctgtaacttggagcaggaagtcatgggggcagagagggaaaggaggtggttacttaaggccccaatctaccaagtcttccccaccacttctcccttgttttccccctcttctactacttatttcaaacttctgggatacaatttcagctaaaacgtttatttctcactcaaaacttatttcccctcaaccctatacccaaagaagaaataaaatcacagatacataacagaaaaaaaaaaaaaaaaaa

SEQ ID NO: 2519 - DNA, 3607 bp, Homo sapiens
cgtgagttgagcgctgctgctccgcggtggagtcaccgcaccgctcccgggatcatggtgttctacttcaccagcagcagcgttaattcatctgcctacactatttacatgggaaaagataaatatgaaaatgaagatctgatcaagcatggctggcctgaagatatctggtttcatgtggacaaactctcttcggctcatgtataccttcgattacataagggagagaatatagaagacatcccaaaggaagtgctgatggactgtgcccaccttgtgaaggccaatagcattcaaggctgcaagatgaacaacgttaatgtggtatatacgccgtggtctaacctgaagaaaacagctgacatggatgtggggcagataggctttcacaggcagaaggatgtaaaaattgtgacagtggagaagaaagtaaatgagatcctgaaccgattagaaaagaccaaagtcgagcggttcccagacctagcagcagagaaagaatgcagagatcgtgaagagaggaatgagaaaaaagcccaaattcaggaaatgaaaaagagagaaaaagaagaaatgaagaagaagagggaaatggatgaacttaggagctattcatcactaatgaaagttgaaaatatgtcttcaaatcaggatggcaatgattcagatgaattcatgtaaaaggagaaaaggagaaaaggacctttgaaagatgtgaatgtagagacaattgcagaccttttggtttcatctgtgttctgaagtataaaatacaaccaaaattctaccttcatcctacccagaaattattgattttcaagttttaaaaaaattgtacctttttttgctgacagaaaaggatcagatatgtataaaatagttgaacttgacagcatataacttaaagtgaaaatgtttttgccagaacatgtcttggtaccttgtgaaagcaggctgcccttgttcttgagatagactttaaaatgaaccagctctgaaaagtacttctgctgctctggtctatccctgaaaacagatgtcttgaaacacttttcatattcttaaaataatcttcacttctgttaagaagaacatgttagtgggtaattatgcgaatgtttccctgtccctgatttctcgattaggcgtatgggttttgaaaaagagatttttcagaagattgtcagcttcagtattcacgttccatcgtgtcatctgggtctgttagtgtagtgaccctcagtgcagtctgtcccagcgtttacgtccttgcttcctctgagcagaggcctccatcttagtatcaacatatttaaagaaattgatggtgttcatcaagctggggcctgtggcagttgttgcctgagcaccaagtaacccaagccacctatgtgacaacttctgggcccaggagtaatttctcagcattgagggtaaaataggatggagtgctctgttgatcatttgggagatgtaggttacctgatttgtgccttaggatgcagcgtgaagcagaagtccatattgcaattatgattttagaaggaactaagcattttactcacacccacagcagcaagaatgacctcctgcagcagatattccacctgtaatagcactttggaactgtgggcaaaaccaaaaggctagtgtttccatttattccatgttggtgtatggggttgaactggaaaattccctgaggcaaaactcactggccaaattttgagagggtatagaaaatgactttagagatgagtggttttgtgtatgtgtctgatgatattcagtctgatgttccgcaattttaaaagttataataaaataccatttttttaatctggaaggacattgatatatgaattcttagaatttgctattaaaaagggtagcccccattccacaagctggttttgagggtgatcttgctctaaaaaacctcattcatcataggctcagtctgacaggttctgtacggggctatcatctttctcctcctctgctaaatgcctctttcttccagctgctcactgggtcaaagggatgtcctttctcagatgtattcttgatacatctcagatgtattcgtagctgtgctccttccatacttccaaggagtccggcttctacagaattcctctgtacctcacactgcaacacatgtagatagcgcttttgaaaaatacatatatttttactatagtatgagaggtcctggggctcaaactttaaacatttcctaactcagcttacactggtttaaaatgtccaggtctctgctgaattctcttgttgaattcatagctctccaacctcctctgtgttgattcctatgcccctaaccctgcagcctctttgttttatttttttccccatctctgttggtcccagggaaagcaaggaaattttcttttgaggacttataggttgattgcccacaggtcaaactgttggcattgaactcctctcatttcttgccattggattgtttcctaaacgttggataggagaattcgaaattgttgctatttttatgagctgtgcccttgatcaaatctgtgctgtgggtctgagtcattttgccaatgtcgtcttcagtttcaacactctgatcagcatgcaggcgaggggcatgtttaatttacttcactaactgctatattctatagctttagacttcatatttcttatccacctttgtctaggctcacgatctttgggcaagggagctttgtcaccgtggttgggctagaacaaatattgagaagtttaccaacacagatgttgagaagtttattgaaaggcactgacattagcagaataagtgatggacattagttgaaccccttcagtgtctatgtgttttattgtattgtctttaactcgttcttgaagcacagatttcagcgagcctttcagctattcagtgccagcggttttccccactcaggaaagatggtgtgagccatacacacagcaggattagacggggagagtttcagctgcagcttctagtttaagaccaaagcccttcctcccgctgctgcatctgtctgagaggggaagctcttgttttccaagctggaaccgtttatgaggaaaactgagcagggtggcaaaatggaaaaggaacaattttctagtttttcctacgcgtgatattgacgcgtgctttttctttgatttgaggtacagcatgtaaataacaaatttccatattcaaaatgatcatattagagtgactgagtgaccttttgattttgaagcagactaaaatctgaccagaccacaatgaaaagtataaaattagaaacttaaattccaagctaaatttcagctttgacccacctaactccagtgaataggtggcagctcagaaacaaggacagcactgctgctgccagagcaagctcacatccagctggcacttcgtgagagctccttcctgccgggcacgtgtgagttcagcgtgggcaagagacttttatgcacattctgtcattcaaaagggaaatgatgccaaccccagatgcagcatgtcctgaatgaatgatctgtaaaatacaataataaaagcttatagtttgagtagaaaaaaaaaaaaaaa

SEQ ID NO: 2520 - DNA, 3598 bp, Homo sapiens
aagtgcacggaggagttccgggggccaggcggccgccgcgagtctggtatcctgagcttcgtgagttgagcgctgctgctccgcggtggagtcaccgcaccgctcccgggatcatggtgttctacttcaccagcagcagcgttaattcatctgcctacactatttacatgggaaaagataaatatgaaaatgaagatctgatcaagcatggctggcctgaagatatctgggagagaatatagaagacatcccaaaggaagtgctgatggactgtgcccaccttgtgaaggccaatagcattcaaggctgcaagatgaacaacgttaatgtggtatatacgccgtggtctaacctgaagaaaacagctgacatggatgtggggcagataggctttcacaggcagaaggatgtaaaaattgtgacagtggagaagaaagtaaatgagatcctgaaccgattagaaaagaccaaagtcgagcggttcccagacctagcagcagagaaagaatgcagagatcgtgaagagaggaatgagaaaaaagcccaaattcaggaaatgaaaaagagagaaaaagaagaaatgaagaagaagagggaaatggatgaacttaggagctattcatcactaatgaaagttgaaaatatgtcttcaaatcaggatggcaatgattcagatgaattcatgtaaaaggagaaaaggagaaaaggacctttgaaagatgtgaatgtagagacaattgcagaccttttggtttcatctgtgttctgaagtataaaatacaaccaaaattctaccttcatcctacccagaaattattgattttcaagttttaaaaaaattgtaccttttttgctgacagaaaaggatcagatatgtataaaatagttgaacttgacagcatataacttaaagtgaaaatgtttttgccagaacatgtcttggtaccttgtgaaagcaggctgcccttgttcttgagatagactttaaaatgaaccagctctgaaaagtacttctgctgctctggtctatccctgaaaacagatgtcttgaaacacttttcatattcttaaaataatcttcacttctgttaagaagaacatgttggtgggtaattatgcgaatgtttccctgtccctgatttctcgattaggcgtatgggttttgaaaaagagatttttcagaagattgtcagcttcagtattcacgttccatcgtgtcatctgggtctgttagtgtagtgaccctcagtgcagtctgtcccagcgtttacgtccttgcttcctctgagcggaggcctccatcttagtatcaacatatttaaagaaattgatggtgttcatcaagctggggcctgtggcagttgttgcctgagcaccaagtaacccaagccacctatgtgacaacttctgggcccaggagtaatttctcagcattgagggtaaaataggatggagtgctctgttgatcatttgggagatgtaggttacctgatttgtgccttaggatgcagcgtgaagcagaagtccatattgcaattatgattttagaaggaactaagcattttactcacacccacagcagcaagaatgacctcctgcagcagatattccacctgtaatagcactttggaactgtgggcaaaaccaaaaggctagtgcttccatttattccatgttggtgtatggggttgaactggaaaattccctgaggcaaaactcactggccaaattttgagagggtatagaaaatgactttagaaatgagtggttttgtgtatgtgtctgatgatattcagtctgatgttccgcaattttaaaagttataataaaataccatttttttaatctggaaggacattgatatatgaattcttagaatttgctattaaaaagggtagcccccattccacaagctggttttgagggtgatcttgctctaaaaaacctcattcatcataggctcagtctgacaggttctgtacggggctatcatctttctcctcctctgctaaatgcctctttcttccagctgctcactgggtcaaagggatgtcctttctcagatgtattcttgatacatctcagatgtattcgtagctgtgctccttccatacttccaaggagtccggcttctacagaattcctctgtacctcacactgcaacacatgtagatagcgcttttgaaaaatacatatatttttactatagtatgagaggtcctggggctcaaactttaaacatttcctaactcagcttacactggtttaaaatgtccaggtctctgctgaattctcttgttgaattcatagctctccaacctcctctgtgttgattcctatgcccctaaccctgcggcctctttgttttatttttttccccatctctgttggtcccagggaaagcaaggaaattttcttttgaggacttataggttgattgcccacaggtcaaactgttggcattgaactcctctcatttcttgccattggattgtttcctaaacgttggataggagaattcgaaattgttgctatttttatgagctgtgcccttgatcaaatctgtgctgtgggtctgagtcattttgccaatgtcgtcttcagtttcaacactctgatcagcatgcaggcgaggggcatgtttaatttacttcactaactgctatattctatagctttagacttcatatttcttatccacctttgtctaggctcacgatctttgggcgagggagctttgtcaccgtggttgggctagaacaaatattgagaagtttaccaacacagatgttgagaagtttattgaaaggcactgacattagcagaataagtgatggacattagttgaaccccttcagtgtctatgtgttttattgtattgtctttaactcgttcttgaagcacagatttcagcgagcctttcagctattcagtgccagcggttttccccactcaggaaagatggtgtgagccatacacacagcaggattagacggggagagtttcagctgcagcttctagtttaagaccaaagcccttcctcccgctgctgcatctgtctgagaggggaagctcttgttttccaagctggaaccgtttatgaggaaaactgagcagggtggcaaaatggaaaaggaacaattttctagtttttcctacgcgtgatattgacgcgtgctttttctttgatttgaggtacagcatgtaaataacaaatttccatattcaaaatgatcatattagagtgactgagtgaccttttgattttgaagcagactaaaatctgaccagaccacaatgaaaagtataaaattagaaacttaaattccaagctaaatttcagctttgacccacctaactccagtgaataggtggcagctcagaaacaaggacagcactgctgctgccagagcaagctcacatccagctggcacttcgtgagagctccttcctgccgggcacgtgtgagttcagcgtgggcaagagacttttatgcacattctgtcattcaaaagggaaatgatgccaaccccagatgcagcatgtcctgaatgaatgatctgtaaaatacaataataaaagcttatagtttgagtag

SEQ ID NO: 2521 - DNA, 2279 bp, Homo sapiens
gcattctagtgcgaccttgtttacacctcccctggctcagtcacacagctgtgtggtaggctactagaagtgtttagtagttgtcactgggatcatgctgatgtggccccatccccgcctctccctgccctgtgatatcggaggaaacctgacagagcaaattggccatggccaagaaaaaggaaaagaaagagtgccaccaaaagcagggagccctaagggagcagttacaggtcctctttggattccagcacgacgcatcaaaccataccatgacgtgactaggacccaacctagaaatgaaggaactgaccctacaggactcacaaccctggataatgcagtgtcctcggacggcaacaagctctggacattacctgggggatgctgaaggcggcaactgaggaggctgaatgaatcctgctccagacacagacaccattcactccagataatttgttgcttgctatgctctctgttgtacattgcaactcgcatagggatgcaaagccggaataagagcaatgaccaccatgcctgacagacctgttgctgcgcacacctgtactctccaatgaacaagactgaatgcaaaaaaaacagaaaatggggagatttaggggatcagtcagtgtggttggaaaattgtaagatgaagttacaggatatagacacaaaccttcttggaaggccagaaggtttgcatagcttcagtaaaggatttggctgaaatcctttttacctctaatcccctttaccttgagttgatagcaatagagcaaataacatgggaatgtgggggagtttatctgaatagcttgtttactcatgtggtcctaagaccaacctttgattatccgcaggtgcatgattgctctctacctgggggcagggggagttaattacccacaggtggagctgaagagccaggaggctcagagtctgcagcagcagcaggaccagtacctgggtcatctgcagcagtatgtggccacctatcagcagcaggtggtcacctatcagcagctgacctctgaggaggaggagctgcacaaccagttactgctgcagacccagctcgtggaccggctgcagcagcagaaagctcaaagcaaagctgtggccaagatgggctgccaagagttgcgggagacccaggagcacctggaagctatcagccagcagaaccagcagcctcaggcccagttgagcctcatggctctccctggggaaggagatggacagtgaggaggaggaggaggtgcctcagcccatgccaagcatcccggaggatctagagagccagaaggccatggtggcatttttcaactcagctgtagctagtgccgaggaggagcaggcacggctatgtgggcagctgaaggagtgcactgccagcgcctggctcatctgttggcctcggcccagaaggaacctgaggcagcagccccagccccaagaactgggggtgatcccatgtgtggggagacccaccaggccctgcagggggccatggagaagctgtgggagagtacatcgcactgtaccagagccagagggcagtgcggaaggaggaggagtgcatcagcaggctggcccaggacaagggagaggtgaaggtgaagctgctggagctggcgtggcttgtggacgactgcaacaagtggcatagcagattcctggcagctgcccagaaccctgctgatgagcccactccaggggcccccgccccccagtagcttggggctactgacaagccagggtagtgagtagagtcctcaggcacagtgggcacgcaggagcaggggagggctcccacagcaccctgcctccctctctccaaagatctttgtgaggtgagccttgccagcagtggggagtctgcacaaggagaggcggggaagcattctccctgtgacaaccccactgagcagcagatcatgcaactgcttcatgagatgcagaacctccaggagcacccaggcttgggcagcagcccttgcattccttttttgtaccagactgatgagaacaatgaggtgaagatcaccatcatctaaaagccggccactgtcagcaaaacctggggaagtggggctggaggctctgcccctaccatgtccctaccaccccttcccagtcaaccctttaccctcacagtagcaagcataagacccctgtctaatgtggggagacaggtggagatgaggtgaagatcaccataatctaaaaggccactaaataaaaaaataaaaaattttaaaaaaaaaaaaaaaaaa

SEQ ID NO: 2522 - DNA, 3925 bp, Homo sapiens
acagcacagacagattgacctattggggtgtttcgcgagtgtgagagggaagcgccgcggcctgtatttctagacctgcccttcgcctggttcgtggcgccttgtgaccccgggcccctgccgcctgcaagtcggaaattgcgctgtgctcctgtgctacggcctgtggctggactgcctgctgctgcccaactggctggcaagatgaagctctccctggtggccgcgatgctgctgctgctcagcgcggcgcgggccgaggaggaggacaagaaggaggacgtgggcacggtggtcggcatcgacctggggaccacctactcctgcgtcggcgtgttcaagaacggccgcgtggagatcatcgccaacgatcagggcaaccgcatcacgccgtcctatgtcgccttcactcctgaaggggaacgtctgattggcgatgccgccaagaaccagctcacctccaaccccgagaacacggtctttgacgccaagcggctcatcggccgcacgtggaatgacccgtctgtgcagcaggacatcaagttcttgccgttcaaggtggttgaaaagaaaactaaaccatacattcaagttgatattggaggtgggcaaacaaagacatttgctcctgaagaaatttctgccatggttctcactaaaatgaaagaaaccgctgaggcttatttgggaaagaaggttacccatgcagttgttactgtaccagcctattttaatgatgcccaacgccaagcaaccaaagacgctggaactattgctggcctaaatgttatgaggatcatcaacgagcctacggcagctgctattgcttatggcctggataagagggagggggagaagaacatcctggtgtttgacctgggtggcggaaccttcgatgtgtctcttctcaccattgacaatggtgtcttcgaagttgtggccactaatggagatactcatctgggtggagaagactttgaccagcgtgtcatggaacacttcatcaaactgtacaaaaagaagacgggcaaagatgtcaggaaagacaatagagctgtgcagaaactccggcgcgaggtagaaaaggccaaacgggccctgtcttctcagcatcaagcaagaattgaaattgagtccttctatgaaggagaagacttttctgagaccctgactcgggccaaatttgaagagctcaacatggatctgttccggtctactatgaagcccgtccagaaagtgttggaagattctgatttgaagaagtctgatattgatgaaattgttcttgttggtggctcgactcgaattccaaagattcagcaactggttaaagagttcttcaatggcaaggaaccatcccgtggcataaacccagatgaagctgtagcgtatggtgctgctgtccaggctggtgtgctctctggtgatcaagatacaggtgacctggtactgcttgatgtatgtccccttacacttggtattgaaactgtgggaggtgtcatgaccaaactgattccaaggaacacagtggtgcctaccaagaagtctcagatcttttctacagcttctgataatcaaccaactgttacaatcaaggtctatgaaggtgaaagacccctgacaaaagacaatcatcttctgggtacatttgatctgactggaattcctcctgctcctcgtggggtcccacagattgaagtcacctttgagatagatgtgaatggtattcttcgagtgacagctgaagacaagggtacagggaacaaaaataagatcacaatcaccaatgaccagaatcgcctgacacctgaagaaatcgaaaggatggttaatgatgctgagaagtttgctgaggaagacaaaaagctcaaggagcgcattgatactagaaatgagttggaaagctatgcctattctctaaagaatcagattggagataaagaaaagctgggaggtaaactttcctctgaagataaggagaccatggaaaaagctgtagaagaaaagattgaatggctggaaagccaccaagatgctgacattgaagacttcaaagctaagaagaaggaactggaagaaattgttcaaccaattatcagcaaactctatggaagtgcaggccctcccccaactggtgaagaggatacagcagaaaaagatgagttgtagacactgatctgctagtgctgtaatattgtaaatactggactcaggaacttttgttaggaaaaaattgaaagaacttaagtctcgaatgtaattggaatcttcacctcagagtggagttgaaactgctatagcctaagcggctgtttactgcttttcattagcagttgctcacatgtctttgggtgggggggagaagaagaattggccatcttaaaaagcaggtaaaaaacctgggttagggtgtgtgttcaccttcaaaatgttctatttaacaactgggtcatgtgcatctggtgtaggaagttttttctaccataagtgacaccaataaatgtttgttatttacactggtctaatgtttgtgagaagcttctaattagatcaattacttattttaggaaatttaagactagatactcgtgtgtggggtgaggggagggagtatttggtatgttgggataaggaaacacttctatttaatgcttccagggattttttttttttttttttaaccctcctgggcccaagtgatccttccacctcagtctcccagctaattgagaccacaggcttgttaccaccatgctcggcttttgcattaatctaagaaaaggggagagaagttaatccacatctttactcaggcaaggggcatttcacagtgcccaagagtggggttttcttgaacatacttggtttcctatttccccttatctttctaaaactgcctttctggtggctttttttaaaattattactaatgatgcttttatagctgcttggattctctgagaaatgatggggagtgagtgatcactggtattaactttatacacttggatttcatttgtaactttaggatgtaaaggtatattgtgaaccctagctgtgtcagaatctccatccctgaaatttctcattagtggtactggggtgggatcttggatggtgacattgaaactacactaaatcccctcactatgaatgggttgttaaaggcaatggtttgtgtcaaaactggtttaggattacttagattgtgttcctgaagaaaagagtccaggtaaatggtatgatcaataaaggacaggctggtgctaacataaaatccaatattgtaatcctagcactttgggaggccaaggcgggtggatcacaaggtcaagagatagagaccatctttgccaacatggtgaaactccatctctactgaaaatacaaaaattagctgggcgtggtagtgcaagctgaaggctgaggcaggagaatcactcgaacccgggaggcagaggttgcagtgagccgagatcacaccactgtactccagcccggcactccagcctggcgacaagagtgagactccacctcaaaaaaaaaaaaaagaatccaatactgcccaaggataggtattttatagatgggcaactggctgaaaggttaattctctagggctagtagaactggatcccaacaccaaactcttaattagacctaggcctcagctgcactgcccgaaaagcatttgggcagaccctgagcagaatactggtctcaggccaagcccaatacagccattaaagatgacctacagtgctgtgtaccctggggcaatagggttaaatggtagttagcaactagggctagtcttcccttacctcaaaggctctcactaccgtggaccacctagtctgtaactctttctgaggagctgttactgaatattaaaaagatagacttcaaaaaaaaaaaaaaaaaa

SEQ ID NO: 2523 - DNA, 997 bp, Homo sapiens
aggcgctgcggcaggagggaagatggcggacgaggagaagctgccgcccggctgggagaagcgcatgagccgcagctcaggccgagtgtactacttcaaccacatcactaacgccagccagtgggagcggcccagcggcaacagcagcagtggtggcaaaaacgggcagggggagcctgccagggtccgctgctcgcacctgctggtgaagcacagccagtcacggcggccctcgtcctggcggcaggagaagatcacccggaccaaggaggaggccctggagctgatcaacggctacatccagaagatcaagtcgggagaggaggactttgagtctctggcctcacagttcagcgactgcagctcagccaaggccaggggagacctgggtgccttcagcagaggtcagatgcagaagccatttgaagacgcctcgtttgcgctgcggacgggggagatgagcgggcccgtgttcacggattccggcatccacatcatcctccgcactgagtgagggtggggagcccaggcctggcctcggggcagggcagggcggctaggccggccagctcccccttgcccgccagccagtggccgaaccccccactccctgccaccgtcacacagtatttattgttcccacaatggctgggagggggcccttccagattgggggccctggggtccccactccctgtccatccccagttggggctgcgaccgccagattctcccttaaggaattgacttcagcaggggtgggaggctcccagacccagggcagtgtggtgggaggggtgttccaaagagaaggcctggtcagcagagccgccccgtgtccccccaggtgctggaggcagactcgagggccgaattgtttctagttaggccacgctcctctgttcagtcgcaaaggtgaacactcatgcggcccagccatgggccctctgagcaactgtgcagcaccctttcacccccaattaaacccagaaccact

SEQ ID NO: 2524 - DNA, 2714 bp, Homo sapiens
gcagggcacggtgggggctgagatcgtttcctgttggaacttctggcccaagaagcgcgggtcacaaggagaggggtcagttcggttcagagcgactcagcccctcgactcgggtcttaaaacctccgagccgccagttctgcctcaggccgcgcccccttaaagcgccaccagacgctgcgccccgttaaagcgccaccagacgccgcgccccgtcccggcctcccccgcgcgctggcgcggggctttctgggccagggcggggccggcgaactgcggcccggaacggctgaggaagggcccgtcccgccttccccggcgcgccatggagccccgggcggttgcagaagccgtggagacgggtgaggaggatgtgattatggaagctctgcggtcatacaaccaggagcactcccagagcttcacgtttgatgatgcccaacaggaggaccggaagagactggcggagctgctggtctccgtcctggaacagggcttgccaccctcccaccgtgtcatctggctgcagagtgtccgaatcctgtcccgggaccgcaactgcctggacccgttcaccagccgccagagcctgcaggcactagcctgctatgctgacatctctgtctctgaggggtccgtcccagagtccgcagacatggatgttgtactggagtccctcaagtgcctgtgcaacctcgtgctcagcagccctgtggcacagatgctggcagcagaggcccgcctagtggtgaagctcacagagcgtgtggggctgtaccgtgagaggagcttcccccacgatgtccagttctttgacttgcggctcctcttcctgctaacggcactccgcaccgatgtgcgccagcagctgtttcaggagctgaaaggagtgcgcctgctaactgacacactggagctgacgctgggggtgactcctgaagggaaccccccacccacgctccttccttcccaagagactgagcgggccatggagatcctcaaagtgctcttcaacatcaccctggactccatcaagggggaggtggacgaggaagacgctgccctttaccgacacctggggacccttctccggcactgtgtgatgatcgctactgctggagaccgcacagaggagttccacggccacgcagtgaacctcctggggaacttgcccctcaagtgtctggatgttctcctcaccctggagccacatggagactccacggagttcatgggagtgaatatggatgtgattcgtgccctcctcatcttcctagagaagcgtttgcacaagacacacaggctgaaggagagtgtagctcccgtgctgagcgtgctgactgaatgtgcccggatgcaccgcccagccaggaagttcctgaaggcccagggatggccacctccccaggtgctgccccctctgcgggatgtgaggacacggcctgaggttggggagatgctgcggaacaagcttgtccgcctcatgacacacctggacacagatgtgaagagggtggctgccgagttcttgtttgtcctgtgctctgagagtgtgccccgattcatcaagtacacaggctatgggaatgctgctggccttctggctgccaggggcctcatggcaggaggccggcccgagggccagtactcagaggatgaggacacagacacagatgagtacaaggaagccaaagccagcataaaccctgtgaccgggagggtggaggagaagccgcctaaccctatggagggcatgacagaggagcagaaggagcacgaggccatgaagctggtgaccatgtttgacaagctctccaggaacagagtcatccagccaatggggatgagtccccggggtcatcttacgtccctgcaggatgccatgtgcgagactatggagcagcagctctcctcggaccctgactcggaccctgactgaggatggcagctcttctgctcccccatcaggactggtgctgcttccagagacttccttggggttgcaacctggggaagccacatcccactggatccacacccgcccccacttctccatcttagaaaccccttctcttgactcccgttctgttcatgatttgcctctggtccagtttctcatctctggactgcaacggtcttcttgtgctagaactcaggctcagcctcgaattccacagacgaagtactttcttttgtctgcgccaagaggaatgtgttcagaagctgctgcctgagggcagggcctacctgggcacacagaagagcatatgggagggcaggggtttgggtgtgggtgcacacaaagcaagcaccatctgggattggcacactggcagagccagtgtgttggggtatgtgctgcacttcccagggagaaaacctgtcagaactttccatacgagtatatcagaacacacccttccaaggtatgtatgctctgttgttcctgtcctgtcttcactgagcgcagggctggaggcctcttagacattctccttggtcctcgttcagctgcccactgtagtatccacagtgcccgagttctcgctggttttggcaattaaacctccttcctactggtttagactacacttacaacaaggaaaatgcccctcgtgtgaccatagattgagatttataccacataccacacatagccacagaaacatcatcttgaaataaagaagagttttggacaaaaaaaaaaaaaaaaa

SEQ ID NO: 2525 - DNA, 946 bp, Homo sapiens
tcagtcttagacgactgcgtcgtgctatgaccggactttttcttgaaaggggatgacagcatgggaggcaatggctccacatgtaaacccgacactgaaagacaaggcactctctccacagcagccccaacaactagccctgcaccctgtctctctaaccaccacaacaaaaaacatttaatccttgccttttgtgctggggttctactgacactgctgctgatagcctttatcttcctcatcataaagagctacagaaaatatcgaagggagaggcttcccatttccccaggcccattgctgagatgggtccctcttctttctggcaccatggcagatcactccaagccccaggccccagatcctcactcagatcctccagccaagctttcatccatcccaggggaatcacttacctatgccagcacaactttcaaactctcagaagaaaagagcaatcacttggctgagaaccattctgcagactttgaccccattgtctatgctcaaattaaagtaacaaactaactcagcttttccaatgaggcttgaatccatttcctctcatctcagccctatcttcacacatcactttcacttttttacaaattttggaccaccacctgtgtgaaactgcagtcggagttgtttagatgtgatctggcaatgctatccagcatctttggagaccaatggtcagtcttttcctggccagaggaaagattgatggccctcccacttgaactgacagcctgtgagccccttgggggcatagactgccttccttggacccttccaaagtgtgtggtacggggctcagtgcacagagtattcacccagcatcatgaatcaacttgggaggagtcaaccaaatgaacaatctaccaaaaatttcaaataaagtcaaaccccccacaaaaaaaaaaaaaaaaaaaaaaaaaaaaaa

SEQ ID NO: 2526 - DNA, 7488 bp, Homo sapiens
atgagtgtgaaagaggcaggcagctcgggccgccgggagcaggcggcctaccacctgcacatctacccccagctgtccaccaccgagagccaggcctcgtgccgcgtgactgccaccaaggacagcaccacctcggacgtcatcaaggacgccattgccagcctgcggctggacggcaccaaatgttatgtgctggtggaggtcaaagagtcgggaggcgaggaatgggtgctggacgccaacgactcgcctgtgcaccgggtgctgctatggccccggcgggcacaggacgagcaccctcaggaggatggctactacttcctgctgcaggagcgcaacgcagatggaaccatcaagtacgtgcatatgcagctggtggcgcaggccacagccacccggcgcctagtggagcgtggcctcctgccacggcagcaggcggactttgatgacctgtgtaacctccccgagctaaccgagggcaacctcctgaagaacctcaagcaccgcttcctgcaacaaaagatctacacgtacgcggggagcatcctggtggccatcaacccctttaagttcctgcccatctacaaccccaagtacgtgaagatgtatgagaaccagcagctgggcaagctggagccacacgtcttcgcgctggccgacgtggcctactacaccatgctcaggaagcgcgtgaaccagtgcatcgtgatctcgggtgagagcggctccggcaagacccagagcaccaacttcctcatccactgcctcaccgccctcagccagaagggctacgccagcggcgtcgagaggaccatcctgggtgctggccctgtgctggaggcttttggaaatgccaagacagcccacaacaacaactccagccggtttgggaaattcatccaagtcagctacctagagagtggcatcgtgagaggagctgtcgtcgagaaatatctgcttgaaaagtctcgcctggtgtctcaggagaaggatgagaggaactaccatgtgttttattatttgttacttggggtcagcgaggaagagcgccaagaatttcagctcaagcagcctgaagattatttctacctcaaccagcataacttgaagattgaagatggggaggacctgaagcatgactttgagaggctcaagcaggccatggagatggtgggcttcctccccgccaccaagaagcagatttttgccgtcctctcggccatcctgtacctgggcaacgtcacttataagaagagagctacaggccgagaggaagggttggaggtcgggccacccgaggtgctggacaccctgtcgcagcttctgaaggtgaagcgagaaatcttggtggaggttctgaccaaaagaaaaacggtgaccgtcaacgacaagcttatccttccctacagcctcagcgaggccatcactgcccgcgactccatggccaagtctctgtacagcgccctgttcgactggattgtgctgcggatcaaccacgcactcctcaacaagaaggacgtggaagaggcagtctcgtgcctgtccattggggtcctggacatcttcgggtttgaagacttcgagaggaacagctttgagcagttctgcatcaactacgccaatgagcagctgcagtattacttcaaccagcacatcttcaagctggagcaggaggaatatcagggcgaggggatcacgtggcacaacatcggctacacagacaatgtcggctgcatccatctcatcagcaagaaacccacgggcctcttctacctgctggacgaggagagcaacttcccccacgccacgagccagaccctgctggccaagttcaaacagcaacatgaggacaataagtacttcctgggcaccccggtcatggagccagctttcatcatccagcacttcgcagggaaggtgaaatatcagatcaaggacttccgggagaagaacatggactacatgcggccagacatcgtggccctgctgcggggcagtgacagctcctacgtgcgggagctcatcggcatggaccccgtggccgtgttccgctgggccgtgctccgggctgctatccgggccatggcagtgcttcgggaggccggacgcctgcgggccgagagggccgaaaaggctgcaggtatgagcagccctggtgcccaaagtcacccagaagagctgccaagaggagccagcaccccttcggaaaaactttaccgcgatttgcataaccaaatgatcaagagcatcaaaggattgccctggcagggcgaggacccccgtagccttctccagtccctcagtcggctccagaaaccccgcgccttcatcctgaaaagtaaaggtatcaaacaaaagcagatcattccaaagaacctactggactccaagtccctgaaactcatcatcagcatgactctgcacgaccgcaccaccaagtccctactgcacctgcacaagaagaaaaagccaccaagcatcagcgcccagttccagacatcccttaacaagctcttggaggcactggggaaggcggagcccttctttatccgctgcatccgttccaatgctgaaaagaaagagctgtgctttgacgacgagctggtcctgcagcagctgcgctacaccggcatgctggagaccgtgcgcatccggaggtcagggtacagcgccaagtacacgttccaggatttcaccgagcagttccaggtgctcctgcccaaggatgcccagccctgcagggaggtcatctccaccctcctggagaaaatgaagatagacaagaggaactaccagatcgggaagaccaaggtcttcctgaaggagacggagcggcaagccctgcaggagacgctgcaccgggaggtggtgcggaaaatcctgctgctgcagagctggttccggatggtgctggagcgtcggcacttcctgcagatgaagcgggccgccgtcaccatccaggcctgctggcggtcctaccgggtccggagggcgctggagaggacgcaggctgccgtgtacctccaggcctcatggaggggctactggcagcggaagctctaccggcaccagaaacagagcatcatccgcctgcagagcctgtgtcgggggcacctgcagcgcaagagcttcagccagatgatctcggagaagcagaaggcagaagagaaggagagggaagccctggaagccgcaagagcaggtgctgaggagggcggacagggtcaggcggctggagggcagcaggtagctgagcaggggccggagccagcggaggatggcgggcacctggcatcggagcctgaggtgcagccaagtgacaggtcccccctagagcactcctcacctgagaaggaggccccaagcccagagaagactctcccaccccagaaaaccgtggcggctgaaagtcacgagaaagtccccagcagccgggagaagcgtgagtcgcgtcggcaaagagggctggagcacgtcaagttccagaacaaacacatccagtcctgcaaggaggagagtgccctcagagaaccttccagaagggtcacccaggagcaaggggtgagtctcctggaagacaaaaaggagagcagagaagatgaaacccttctagtcgtagagacggaggctgagaacacatctcaaaagcagcccacagagcaaccccaggccatggcagttggcaaggtctctgaagaaactgagaagacgctgcccagtgggagccccaggcctggccagttggagcggccgaccagcctggccctggacagcagggtcagcccaccggcccctggcagcgcccccgagacccccgaggacaagagcaaaccatgtggcagcccaagggttcaggaaaagcccgacagccccggaggctccacgcagatccagcggtacctggacgccgagcggctggccagcgccgtggaactgtggcggggcaagaagctggtggccgccgccagccctagtgccatgctcagccagtccctggacctcagcgacagacaccgggccacaggggccgccctcacgcccacagaggagaggcgcacctccttctccacgagcgacgtctccaagctcctcccgtccctggccaaggctcagcctgcagcagaaaccacggacggagagcgaagtgcgaaaaagccagctgtccagaagaagaagccaggcgacgcatcctccctcccagacgcagggctgtccccgggctctcaggtcgactctaaatccacgtttaagaggctttttctgcataaaaccaaggataaaaaatacagcctggagggcgcagaggagctggagaatgcagtgtccgggcacgtggtgctggaagccaccaccatgaagaagggcctggaagccccctccggacagcagcatcgccacgctgcaggtgagaagcgcaccaaggaaccaggaggcaaagggaagaagaaccgaaatgtcaagattgggaagatcacagtgtcagagaagtggcgggaatcggtgttccgccagatcaccaacgccaatgagctcaagtacctggacgagttcctgctcaacaagataaatgacctccgttcccagaagacgcccattgagagcttgtttatcgaagccaccgagaagttcaggagcaacatcaaaacgatgtactctgtcccgaacgggaagatccacgtgggctacaaggatctgatggagaactaccagatcgtcgtcagcaacctggccactgagcgtggccagaaggacaccaacctggtcctcaacctcttccagtcactgctagatgagttcacccgtggctacaccaagaacgacttcgagccagtgaagcagagcaaagctcagaagaagaagcggaagcaggagcgtgctgtccaggagcacaacgggcacgtgttcgccagctaccaggttagcatcccgcagtcgtgcgagcagtgcctctcctatatctggctcatggacaaggccctgctctgcagcgtgtgcaagatgacctgccacaagaagtgcgtgcacaagattcagagccactgctcctacacctacgggaggaagggcgagccaggcgttgagcctggccacttcggcgtgtgcgtagacagcctgaccagcgacaaggcctcggtgcccatcgtgctggagaagctcctggaacacgtggagatgcacggcctgtacaccgagggcctctaccgcaagtcgggtgctgccaaccgcactcgggagctccggcaggcgctgcagacagaccccgcagcagtcaagctggagaacttccccatccacgccatcacaggggtgctgaagcagtggctgcgggagctgcccgagcccctcatgaccttcgcacagtacggcgacttcctccgagccgtcgagctgccggagaagcaggagcagctggctgccatctatgccgtcctggagcaccttccagaagccaaccacaactccctggagagactcatcttccaccttgtcaaggtggccctgctcgaggatgtcaaccgcatgtcacctggggcgctggccattatcttcgcaccctgcctcctgcgctgccctgacaactcggacccgctgaccagcatgaaggacgtcctcaagatcaccacgtgcgtggagatgctgatcaaggagcagatgaggaaatacaaagtgaagatggaggagatcagccaactggaggctgcagagagtatcgccttccgcaggctttcgctcctgcgacaaaatgctccatggcctctcaaactggggttttcgtctccctatgagggggtcctgaacaagagccccaagacccgggacatccaggaggaggagctggaggtgctgctggaggaggaggcagccggcggcgatgaggaccgggaaaaggagattctcattgaacggatccagtccatcaaggaggagaaggaggacatcacctaccggctgccggagctggacccaaggggctcggacgaggagaacctggactcggagacgtcggccagcaccgagagcctgctggaggagcgggccgggcggggggcctcggaagggccccctgcgcctgctctcccttgccccggcgcgcccaccccgagccccctccccaccgtggccgcccctccacgacgaaggccgtcgtccttcgtaacggtcagagtgaagaccccccggcggacccccatcatgcccacggccaacatcaagctcccaccaggcctgccctcccacctgcctcgctgggcaccgggtgcccgggaggcggctgccccagtgcggcgccgggagccacctgcccgccgcccggaccagatacattccgtgtacatcacgcccggggcagacctgccagtgcagggcgccctggagcccctagaagaggatggccagccacctggggccaagcggaggtactcggatcccccaacgtactgcctgccccccgcctcgggccagaccaatggctgagagccacagctgacaaagtctgcatgtccgaggacggcccctgcactggagctgggcgccagagctgcagagctagtgttcggccctcagagaaggatccagaatcaaaagctcaagagtgacgtgaggtgggcaccggccccaagtgcagagtcaaggcagggagaggccggctggagccaggccccctcgcacgcagcccccaaatcatggacgcacctgtggggagcaccacatctccacctgcggcctcacatctccccactcccctttttgtacgtttaactgtttctttgtacgtggtttacgtaactttaaactgtaacagccttaatggaagaccaaatggttttttatatgtgtatgtacaaagttttctattaacgctgcccgtctcccttataacctggacgtgagctgtcagagcagaagccactaggccactgcgcgtctgaggctcagaccctgctgtggttggcttggggtggccaatgggctgggaccctccatgagagttttggacacttgggtcacctgacccgtgcctctctgacacatgtctccggggggcagccacctggccaatgtgcatttttgcacatgctggaaccttccatgggggtctgggctattggctggagccaggacatgagtcaggggcaccatggacctcacgtgccagggagacttgaatgtggctgtcactcttccggacgccaagggctgcaggaggctgcttttggcactacccaccccgtgtgacagaataggagccagcgactcaggactgctcacgggtcaggagggcaacgcctgaagtcagacctccctataggtcaacagggacaacctggggatctctggagcagggccctcctctctcaggcttggcccactcccccagacacctggacacgtggccacaaatctgggacaaggggcccccgcacagcatgaaataaaaagtgcctgagaagtgtgtgcaaaaaaaaaaaaaaaaaaaaaaaaaaaaaa

SEQ ID NO: 2527 - DNA, 1978 bp, Homo sapiens
cgggggtgcaaccctttgaagtgtcccctcctacttcttgctgcctcacggttgctgttgcagacccaggagtctctgaaggcttccgcggctttggggccggttgtgagatgccaggcagaggccgctgcccggactgcggctccacggagctggtggaagactcgcactattcgcagagccagctggtgtgctccgactgcggctgcgtggtcaccgagggggtccttaccactaccttcagcgacgagggcaatctccgagaggtaacatattcccgaagcacaggggaaaacgaacaagttagtcgcagccagcaacgaggtctccggcgagtgagagacctttgtcgagttctgcagttgccaccaacatttgaggataccgcggttgcctactaccaacaggcatatcggcactctggcatccgagcggccaggctgcaaaagaaggaggtgttggttgggtgctgcgtcttaatcacctgccgacagcataactggcccctaacaatgggggccatctgcacgctgttgtatgcagatttggatgtgttttctagcacttacatgcagatagtgaagctcctgggactggatgtgccatctctgtgcttggcagaactggtgaagacctattgcagcagcttcaaactgttccaagcttcaccttctgtgccagccaaatacgtggaagacaaagagaagatgctgtctcgaacaatgcagttggtggagctggcaaatgagacgtggctggtgaccgggaggcatcccttgcccgtcatcactgctgcgactttcctggcttggcagtcgctgcagcctgcagatcggctttcatgttcccttgcccgattttgtaaattggcaaatgtggacctgccctacccggcgtcctcccgcctgcaggagctgctggctgtgctgctgcggatggctgagcagctggcctggttacgagttctgagacttgacaaacggtctgtggtgaagcacatcggtgaccttctccagcaccgccagtcactggtccgctctgcctttcgggatgggacagcagaagtggagacccgagagaaggagccaccggggtggggacaggggcaaggagaaggggaggtgggaaataattccttaggtttaccccaggggaagcggccggccagtcctgcccttctcttgccaccctgcatgttgaagtccccgaagcggatctgccctgtaccccctgtctccactgtcactggagatgagaacatttctgatagtgaaatagaacagtatttgcgtacccctcaggaagttagggactttcagagagcccaggctgctagacaggctgccacgagtgtccctaaccctccctgatggatatccactgggagcacttcatcctgttctgacagcttgataacattcctgttataaccaaggatggaagtgtacaccagtccgtaggtattgcttttcttgtttgaaggaaccaagaggggctctgccattagttggaccctgggtcctggagtaaagtcaggagtgcagggatgactataggtaggagagattcccatcccttggtgtgggagagcaagttgcctatgtccatgttctgtgagatggctttcctcatagatggatgggaaaatgtcaggctctttgctgctggtttgaattggacacactgctgcggctcctcctgcaggcctgagggggcttccctctgcttgtggagtggttggcattcccagcagtatcaaccctcagaggagcgggaactggggaattctggccctacgtgcattcacaggcaatgatgggtttgtgtgtatggtgtcatgagatcctctacctcataacaaaaggacagtgggtagactaaggcagtagctcaaagggctttgcaaaattttaatatattaaaacaagaggcatctgctagaaaacattctattgtataaaacccgagttcttaaaaa

SEQ ID NO: 2528 - DNA, 5723 bp, Homo sapiens
gcagccgccacattcaacaggcagcagcgcagcgggcgcgccgctggggagagcaagcggcccgcggcgtccgtccgtccttccgtccgcggccctgtcagctggagcgcggcgcaggctctgccccggcccggcggctctggccggccgtccagtccgtgcggcggaccccgaggagcctcgatgtggatggccccgcgaagttaagttctgggctcgcgcttccactccgccgcgccttcctcccagtttccgtccgctcgccgcaccggcttcgttcccccaaatctcggaccgtcccttcgcgccccctccccgtccgcccccagtgctgcgttctccccctcttggctctcctgcggctgggggaggggcgggggtcaccatggccgaggcgcctcaggtggtggagatcgacccggacttcgagccgctgccccggccgcgctcgtgcacctggccgctgcccaggccggagtttagccagtccaactcggccacctccagcccggcgccgtcgggcagcgcggctgccaaccccgacgccgcggcgggcctgccctcggcctcggctgccgctgtcagcgccgacttcatgagcaacctgagcttgctggaggagagcgaggacttcccgcaggcgcccggctccgtggcggcggcggtggcggcggcggccgccgcggccgccaccggggggctgtgcggggacttccagggcccggaggcgggctgcctgcacccagcgccaccgcagcccccgccgcccgggccgctgtcgcagcacccgccggtgccccccgccgccgctgggccgctcgcggggcagccgcgcaagagcagctcgtcccgccgcaacgcgtggggcaacctgtcctacgccgacctcatcaccaaggccatcgagagctcggcggagaagcggctcacgctgtcgcagatctacgagtggatggtcaagagcgtgccctacttcaaggataagggtgacagcaacagctcggcgggctggaagaattcaattcgtcataatctgtccctacacagcaagttcattcgtgtgcagaatgaaggaactggaaaaagttcttggtggatgctcaatccagagggtggcaagagcgggaaatctcctaggagaagagctgcatccatggacaacaacagtaaatttgctaagagccgaagccgagctgccaagaagaaagcatctctccagtctggccaggagggtgctggggacagccctggatcacagttttccaaatggcctgcaagccctggctctcacagcaatgatgactttgataactggagtacatttcgccctcgaactagctcaaatgctagtactattagtgggagactctcacccattatgaccgaacaggatgatcttggagaaggggatgtgcattctatggtgtacccgccatctgccgcaaagatggcctctactttacccagtctgtctgagataagcaatcccgaaaacatggaaaatcttttggataatctcaaccttctctcatcaccaacatcattaactgtttcgacccagtcctcacctggcaccatgatgcagcagacgccgtgctactcgtttgcgccaccaaacaccagtttgaattcacccagcccaaactaccaaaaatatacatatggccaatccagcatgagccctttgccccagatgcctatacaaacacttcaggacaataagtcgagttatggaggtatgagtcagtataactgtgcgcctggactcttgaaggagttgctgacttctgactctcctccccataatgacattatgacaccagttgatcctggggtagcccagcccaacagccgggttctgggccagaacgtcatgatgggccctaattcggtcatgtcaacctatggcagccaggcatctcataacaaaatgatgaatcccagctcccatacccaccctggacatgctcagcagacatctgcagttaacgggcgtcccctgccccacacggtaagcaccatgccccacacctcgggtatgaaccgcctgacccaagtgaagacacctgtacaagtgcctctgccccaccccatgcagatgagtgccctggggggctactcctccgtgagcagctgcaatggctatggcagaatgggccttctccaccaggagaagctcccaagtgacttggatggcatgttcattgagcgcttagactgtgacatggaatccatcattcggaatgacctcatggatggagatacattggattttaactttgacaatgtgttgcccaaccaaagcttcccacacagtgtcaagacaacgacacatagctgggtgtcaggctgagggttagtgagcaggttacacttaaaagtacttcagattgtctgacagcaggaactgagagaagcagtccaaagatgtctttcaccaactcccttttagttttcttggttaaaaaaaaaaacaaaaaaaaaaaccctcctttttttcctttcgtcagacttggcagcaaagacatttttcctgtacaggatgtttgcccaatgtgtgcaggttatgtgctgctgtagataaggactgtgccattggaaatttcattacaatgaagtgccaaactcactacaccatataattgcagaaaagattttcagatcctggtgtgctttcaagttttgtatataagcagtagatacagattgtatttgtgtgtgtttttggtttttctaaatatccaattggtccaaggaaagtttatactctttttgtaatactgtgatgggcctcatgtcttgataagttaaacttttgtttgtactacctgttttctgcggaactgacggatcacaaagaactgaatctccattctgcatctccattgaacagccttggacctgttcacgttgccacagaattcacatgagaaccaagtagcctgttatcaatctgctaaattaatggacttgttaaacttttggaaaaaaaaagattaaatgccagctttgtacaggtcttttctatttttttttgtttattttgttatttgcaaatttgtacaaacatttaaatggttctaatttccagataaatgatttttgatgttattgttgggacttaagaacatttttggaatagatattgaactgtaataatgttttcttaaaactagagtctactttgttacatagtcagcttgtaaattttgtggaaccacaggtatttggggcagcattcataattttcattttgtattctaactggattagtactaattttatacatgcttaactggtttgtacactttgggatgctacttagtgatgtttctgactaatcttaaatcattgtaattagtacttgcatattcaacgtttcaggccctggttgggcaggaaagtgatgtatagttatggacactttgcgtttcttatttaggataacttaatatgtttttatgtatgtattttaaagaaatttcatctgcttctactgaactatgcgtactgcatagcatcaagtcttctctagagacctctgtagtcctgggaggcctcataatgtttgtagatcagaaaagggagatctgcatctaaagcaatggtcctttgtcaaacgagggattttgatccacttcaccattttgagttgagctttagcaaaagtttcccctcataattctttgctcttgtttcagtccaggtggaggttggttttgtagttctgccttgaggaattatgtcaacactcatacttcatctcattctcccttctgccctgcagattagattacttagcacactgtggaagtttaagtggaaggagggaatttaaaaatgggacttgagtggtttgtagaatttgtgttcataagttcagatgggtagcaaatggaatagaacttacttaaaaattggggagatttatttgaaaaccagctgtaagttgtgcattgagattatgttaaaagccttggcttaagaatttgaaaatttctttagcctgtagcaacctaaactgtaattcctatcattatgttttattactttccaattacctgtaactgacagaccaaattaattggctttgtgtcctatttagtccatcagtattttcaagtcatgtggaaagcccaaagtcatcacaatgaagagaacaggtgcacagcactgttcctcttgtgttcttgagaaggatctaatttttctgtatatagcccacatcacacttgctttgtcttgtatgttaattgcatcttcattggcttggtatttcctaaatgtttaacaagaacacaagtgttcctgataagatttcctacagtaagccagctgtattgtaagcttcccaccgtgatgatcatttttttgaagattcattgaacagccaccactctatcatcctcattttggggcagtccaagacatagctggttttagaaacccaagttcctctaagcacagcctcccgggtatgtaactgaacttggtgccaaagtacttgtgtactaatttctattactacgtactgtcactttcctcccgtgccattactgcatcataatacaaggaacctcagagcccccatttgttcattaaagaggcaactacagccaaaatcactgttaaaatcttactacttcatggagtagctcttaggaaaatatatcttcctcctgagtctgggtaattatacctctcccaagcccccattgtgtgttgaaatcctgtcatgaatccttggtagctctctgagaacagtgaagtccagggaaaggcatctggtctgtctggaaagcaaacattatgtggcctctggtagtttttttcctgtaagaatactgactttctggagtaatgagtatatatcagttattgtacatgattgctttgtgaaatgtgcaaatgatatcacctatgcagccttgtttgatttattttctctggtttgtactgttattaaaagcatattgtattatagagctattcagatattttaaatataaagatgtattgtttccgtaatatagacgtatggaatatatttaggtaatagatgtattacttggaaagttctgctttgacaaactgacaaagtctaaatgagcacatgtatcccagtgagcagtaaatcaatggaacatcccaagaagaggataaggatgcttaaaatggaaatcattctccaacgatatacaaattggacttgttcaactgctggatatatgctaccaataaccccagccccaacttaaaattcttacattcaagctcctaagagttcttaatttataactaattttaaaagagaagtttcttttctggttttagtttgggaataatcattcattaaaaaaaatgtattgtggtttatgcgaacagaccaacctggcattacagttggcctctccttgaggtgggcacagcctggcagtgtggccaggggtggccatgtaagtcccatcaggacgtagtcatgcctcctgcatttcgctacccgagtttagtaacagtgcagattccacgttcttgttccgatactctgagaagtgcctgatgttgatgtacttacagacacaagaacaatctttgctataattgtataaagccataaatgtacataaattatgtttaaatggcttggtgtctttcttttctaattatgcagaataagctctttattaggaattttttgtgaagctattaaatacttgagttaa

SEQ ID NO: 2529 - DNA, 2850 bp, Homo sapiens
gcatgtagcttctgcagttgctcctcctcaccctccgcgacctgatttcctagaagggctctgtcacccgaaaagattttccactggcttagaggagggagggcccgccttcccccgttatccattggctgctcgttccgccgcaagttgggggcggggttagggcgcctttcgattgcatcagctggtccagccgaggccaagtcccgggcgctagcccacctcccacccgcctcttggctcctctcctctaggccgtcgctttcgggttctctcatcgcttcgtcgttcgccaatgtttgaggagaaggccagcagtccttcagggaagatgggaggcgaggagaagccgattggtgctggtgaagagaagcaaaaggaaggaggcaaaaagaagaacaaagaaggatctggagatggaggtcgagctgagttgaatccttggcctgaatatatttacacacgtcttgagatgtataatatactaaaagcagaacatgattccattctggcagaaaaggcagaaaaagatagcaagccaattaaagtcactttgcctgatggtaaacaggttgatgcggaatcttggaaaactacaccatatcaaattgcctgtggaattagtcaaggcctggccgacaacaccgttattgctaaagtaaataatgttgtgtgggacctggaccgccctctggaagaagattgtaccttggagcttctcaagtttgaggatgaggaagctcaggcagtgtattggcactctagtgctcacataatgggtgaagccatggaaagagtctatggtggatgtttatgctacggtccgccaatagaaaatggattctattatgacatgtacctcgaagaagggggtgtgtctagcaatgatttctcttctctggaggctttgtgtaagaaaatcattaaagaaaaacaagcttttgaaagactggaagttaagaaagaaactttactggcaatgtttaagtacaacaagttcaaatgccggatattgaatgaaaaggtgaatactccaactaccacagtctatagatgtggccctttgatagatctctgccggggtcctcatgttagacacacgggcaaaattaaggctttaaaaatacacaaaaattcctccacgtactgggaaggcaaagcagatatggagactctccagagaatttatggcatttcattcccagatcctaaaatgttgaaagagtgggagaagttccaagaggaagctaaaaaccgagatcataggaaaattggcagggaccaagaactatatttctttcatgaactcagccctggaagttgcttttttctgccaaaaggagcctacatttataatgcacttattgaattcattaggagcgaatataggaaaagaggattccaggaggtagtcaccccaaacatcttcaacagccgactctggatgacctcgggccactggcagcactacagcgagaacatgttctcctttgaggtggagaaggagctgtttgccctgaaacccatgaactgcccaggacactgccttatgtttgatcatcggccaaggtcctggcgagaactgcctctgcggctagctgattttggggtacttcataggaacgagctgtctggagcactcacaggactcacccgggtacgaagattccaacaggatgatgctcacatattctgtgccatggagcagattgaagatgaaataaaaggttgtttggattttctacgtacggtatatagcgtatttggattttcttttaaactaaacctttctactcgcccggaaaaattccttggagatatcgaagtatgggatcaagctgagaaacaacttgaaaacagtctgaatgaatttggtgaaaagtgggagttaaactctggagatggagctttctatggcccaaagattgacatacagattaaagatgcgattgggcggtaccaccagtgtgcaaccatccagctggatttccagttgcccatcagatttaatcttacttatgtaagccatgatggtgatgataagaaaaggccagtgattgttcatcgagccatcttgggatcagtggaaagaatgattgctatcctcacagaaaactatgggggcaaatggcccttttggctgtcccctcgccaggtaatggtagttccagtgggaccaacctgtgatgaatatgcccaaaaggtacgacaacaattccacgatgccaaattcatggcagacattgatctggatccaggctgtacattgaataaaaagattcgaaatgcacagttagcacagtataacttcattttagttgttggtgaaaaagagaaaatcagtggcactgttaatatccgcacaagagacaataaggtccacggggaacgcaccatttctgaaactatcgagcggctacagcagctcaaagagttccgcagcaaacaggcagaagaagaattttaatgaaaaaattacccagattggctccatggaaaaggaggaacagcgtttccgtaaaattgactttgtactctgaaaacgtcaatttatattgaacttggaggagtttggcaaagtctgaataggtcaacctgcaggcgtaactatttttgacctagtcagtttttaaacaatgtgcatttgaaggagttaattaaaagagagccaataaaatgattttactcattcagtatctgagtactggaagtgaaacatgaggaatgctttagtgtaatgtgggagaacttttttgtaaatttaatgcaattgaaaaagttttcaaattcaattaagataactagaattggattatggtgtaaaaataaaaaaaaaatttattcacataa

SEQ ID NO: 2530 - DNA, 3967 bp, Homo sapiens
ccacgcgtccgatttttggaaatcaagtgcaatattggaagccatttctactaattttatttcacttttaaatttatgatttgatttgaatactatcatgggaggagctgtgagtgctggggaagataatgatgacttaattgataatttaaaagaagctcagtatattcgtactgaaagagtggagcaagccttcagagcgattgatcgtggagattactatttggaaggctacagagacaatgcttacaaagacttagcctggaagcatggaaacatccacttgtcagcaccttgcatttattctgaagttatggaagcattgaaacttcaaccaggattgtcttttcttaacctgggaagtggaaccggatatttaagtacaatggtgggcttaattttaggtccttttggaataaatcatgggattgagcttcattcagatgtggtggaatatgccaaggaaaaactggagagcttcatcaaaaatagtgatagctttgataaatttgagttctgtgaacctgcatttgttgttggtaattgcctccagatagcttctgacagtcatcagtatgatcgaatttattgtggagctggagtacagaaagaccatgaaaactacatgaaaatattactaaaagttggaggcatattagtcatgcctatagaggatcagttaacacagattatgcgaactggacagaacacttgggaaagtaaaaatatccttgctgtttcatttgctccacttgtgcaaccaagtaagaatgataatggcaaaccagattctgtgggactccctccctgtgctgtcaggaatctacaggacttggctcgtatttacattcgacgcacacttagaaatttcataaatgatgagatgcaggccaaggggattcctcaaagggctccacccaaaaggaaaagaaagagagttaaacagagaattaacacttacgtatttgtgggtaatcagcttattcctcagcctctagacagtgaagaggatgaaaaaatggaagaggatatcaaagaagaggaggaaaaagatcacaatgaagcaatgaagccagaggagccacctcaaaatttactgagagaaaaaatcatgaagctgcccctccctgaatctttaaaagcttacttgacatattttagagacaaataacttagatcaagaagaaaaatgcctactgataattcctttagtcttgaaaatgtagcatttgttaggagttaaaagagagaattatttctttcatcagagcaaattatagtggaaaaaaaaatcacttgtttctgtcagtaacacaaatgatgtattcagtgaataaaagaatcccttttataaaatctatttttctttaaatcttggaaaaatgttgttttagctcagagtgatttcaaagtggaatgcaacagtagtcaagacttgtgtactataaatccttttctgattccttacagatttgtagtgatgaggtttagatttaattttatatatggtttaaataattgttaagcttatataacctgatctgaattgcagttgtttgcatttcctctatgaaaacttcatttatctaataaggaagtcaaatgctttgtagactatttaccttacttttgttgcaatcactgttgttgggttgctgtatatatattccgggcaatatatgagtgcaataacaatacaagatattgaataatttagctttaaaaaatcccacaaattttatgaaattttacagccctgctacttttgcttttgaatctcttgccaaaagacatgggtaaaatatctgcctctctcatagagattttaagagcacagcaagtgaattattaaaacaaagtctatacttaatacaactctttatatggaccctttacattttcagtatttaaaaaaataactctatagaattttaaaagtatatttagaattgttttttctgtagttcactgtataaagtatttggttttttaaaaaaagcaaaaccattgttatgtgtgactcttgataggacacagaacgagtgaatgagcatgagtgaggccactttcttggatggctgtaagtagcagggccagggtagacctggtcagcggatgcactttagcagatggaacttctagtttatctgaatatttatctttgacaaggtagggctgagcctacatttgcttttgatctatctagtataagaaatattcacagaaattgtatgtagataccctttgttttgaaaatgctgttcagaatcatagtgtaatctttgggacctatgccatgttcatttcactccttcccatattttttgtgtttcttttggtaaaactataatggttttcattttttacttaatatcacacagttaaactgtccatatttgagctttattttagcttatcagtgataaaaaacaggtagtaactgccattgtttgtttgttttcctaataaggcctgaaaacagccattccttgttaagaaagtgtacaatgtaacatatttgctagagttacatggattatatatttcttaaagggaaaaatttgagagtatcatggactaccaccagcattattattacagtagttactcagatttggttaaggaagcccaagcaatgtatagtgaaaggattattatctctctgctaagattcagatattgtttcagaaatctcagctccagtaattccacaacatctaaaaacaaatgtttgtgatcatgtgtaagcatgaaattgttccaagtaagtgaggatattttagttatgtgaaagacagtttcatggaaggtatttgttttgtaccagtggctgggatggtggaattggggttatttctacaattattcttagacgattactaaactgttaagaaatgccccatatcatttttgtatctaggaaagaaaaaaatcagtttcatactgttgtcatctgtcagaaatgctcattttattttgaattaaatgtggcttttgaagtacctagttaccttgaattcctggtgaccacatgtttttatctggaaaacctggagaaagttatctgtcccatctcccctgcttgttttttttttttttttttttggttggagctgctgtttagatgatgcttttactatgcaggagagagtttttgttaaggatatatttgaagattggcttttccatattgtccttcattctttgaccgtggcaaagtgtacagtagattttcatgatcattgcatatttcttgtcattgaaatgtatcttttatgtttttaaatgcattcattttacacttgtgagtttatcattgactttaagaggtagaaatgaaaaatgaaaattaaagctaaagcctttttatctattaatgcagatatattagaataagaatattttgggtttgtgtttattttttaatgaatttatgtttacttgatatggaaaattacgctttataggtggaaaagtagcaaataaagattaagtaaaagtaagtgaaaatgatggggaatatagtattggaattttatagctagttaaaacaataagtatcatctaatttgggtgtttattttgcagatgagaaaacagacctagaaccgtggcatgttttgcctgaaacatacagtgagttagagacagggcctaagatagcttctagcatcagatcaatcccaagaatccatcagcaacctcagaccaacccaagaagataatttaaatctatactgcttattggtcaatatatttggttctagtattaataaagaaaaatgttattaaaatagcatacatagtagtaaaataaaatacaaaaagtgtgttgatttatagctgtttgagatgataaaagtgaagcaaagcctgttaaatcattggaagacttggaaaattattttaaataaacaattacatgtaaaaaaaaaaaaaaaaaaaaaaaaaaaaaaaaaaaaaaaaa

SEQ ID NO: 2531 - DNA, 2352 bp, Homo sapiens
aggtgccacttgaagaatggatgatgatgattttggtggttttgaggctgcggagacttttgatggtggaagtggtgaaacccaaacaacatctcctgctattccttgggctgcctttcctgcagtatctggagtccatctttcaccatcttctcctgagattgtactggaccgtgaccactcttcttccattggctgcctctcttctgatgccattatttcatcaccagagaatacacatgcagcaaatagcattgtgagtcaaactattccaaaagcacagattcagcaatcaacacacactcatctggatatctcactttttccattgggtttaactgatgaaaaaagtaatggaacaattgcccttgtggatgattctgaggatcctggagccaatgtatctaacatacagcttcagcaaaaaatttcaagtctggagattaaactcaaagtatctgaagaagaaaaacagagaattaaacaggatgtggaatcattgatggaaaagcataatgtcttagaaaaaggctttctaaaagaaaaagagcaagaggccatttcttttcaagatagatacaaagaacttcaggaaaaacataaacaagaattggaagacatgaggaaagctggtcacgaagccctcagcattattgtggatgaatataaggcactactgcagtcttcagttaagcaacaagtagaagctattgaaaaacagtacatttctgcaattgagaaacaggcacacaagtgtgaggagttgctaaatgctcagcatcagaggctccttgaaatgctagatacagagaaggaactgttaaaagaaaaaataaaggaagctttgattcagcaatctcaagaacagaaggaaatattggaaaagtgtttggaggaagaaaggcaaagaaataaagaggcattagtatccgctgcaaagcttgaaaaagaagcagtgaaggatgcagttttaaaagtcgtagaagaagaaagaaaaaatttagaaaaagcgcatgctgaagaaagggaattatggaagacagaacatgcaaaagatcaagaaaaagtatctcaggaaattcaaaaagctatacaagaacaaagaaaaataagtcaggaaactgttaaggcagcaataatagaagagcagaaacgaagtgaaaaggctgtggaagaggcagtgaaaagaacaagagatgaattgatagagtatataaaagaacagaaaaggctcgatcaagtcatccgccaaagaagcctgtccagtttggaactgttcctctcctgtgcacagaaacagttaagtgctttaatagctacggaaccagttgacattgaataaaaagaacatgacaaacccacactggcattggataaatcatattacaccttcaaaatacacactctgaattataaagatgtgtttgttttctttccaaatcatgtagaattgatttccagttcaaggataaaccaaaacaatatttagaactatcaagtgatctaatttattttcttttggtttcttctttacatttactgttattttattattattagtagtagcagcaacagagtatgatatgacccaaaagccattgtaaagtgccacattaccaaaattaattaagtaaactttatagcctgtgggagtctattatatattattttgcaaaagtagtaaatatattattgtttcatgatgactcttgatgagatgctagaatgtaaccatacatttatcttattttgaggatagaaatagcatggatttcaacatcacttatttatctgtataattggaaataaaacaccgatatgatagagaatcattccggcattacctaacctcttctgcagttggatctatgtattttcattggtctactgaaaacaaacaatacaattaaaagcactaaagattattatattaattcaactttgatctgatatatcacttaaactaaaggggtgtgtgtggtgtatgcttgtttcctatttctgctctttaaagatactttgaatcaataaaaccattagtctacaaatcaaattgtgaacttaatctctagaaagagaatataactcagccatttataggaatttaggttcaagtacaggatatatgaaatcttttcccagtatttcagaatgtacttaattcacaggcaggatgcttcaatgcaaaatcatgaatatttttaattcaaaactaaaatgtcattaatatgtatgtatgcaaatgttttatcttattttctgaaatgcatctactttcatgggctttgtacgtttctgagatttctcagtgtaataaaaagagctcccaaacttaaaaaaaaaaaaaaaaaa

SEQ ID NO: 2532 - DNA, 1829 bp, Homo sapiens
ggggtgggtggggccaggaggaagatggcggcgtccgcagctgccgctgagctccaggcttctgggggtccgcggcacccagtgtgtctgttggtgttgggaatggcgggatccgggaaaaccacttttgtacagaggctcacaggacacctgcatgcccaaggcactccaccgtatgtgatcaacctggatccagcagtacatgaagttccctttcctgccaatattgatattcgtgatactgtaaagtataaagaagtaatgaaacaatatggacttggacccaatggcggcatagtgacctcactcaatctctttgctaccagatttgatcaggtgatgaaatttattgagaaggcccagaacatgtccaaatatgtgttgattgacacacctggacagattgaggtattcacctggtcagcttctgggacaattatcactgaagcccttgcatcctcatttccaacagttgtcatctatgtaatggacacatcgagaagtaccaacccagtgaccttcatgtccaacatgctctatgcctgcagcatcttatacaaaaccaagctgcctttcattgtggtcatgaataaaactgacatcattgaccacagctttgcagtggaatggatgcaggattttgaggctttccaagatgccttgaatcaagagactacatacgtcagtaacctgactcgttcaatgagcctggtgttagatgagttttacagctcactcagggtggtgggtgtctctgctgttctgggtactggattagatgaactctttgtgcaagttaccagtgctgccgaagaatatgaaagggagtatcgtcctgaatatgaacgtctgaaaaaatcactggccaacgcagagagccaacagcagagagaacaactggaacgccttcgaaaagatatgggttctgtagccttggatgcagggactgccaaagacagcttatctcctgtgctgcacccttctgatttgatcctgactcgaggaaccttggatgaagaggatgaggaagcagacagcgatactgatgacattgaccacagagttacagaggaaagccatgaagagccagcattccagaattttatgcaagaatcgatggcacaatactggaagagaaacaataaataggagactttagcacacttcacttgtttctagaagtccagaattttggacctccatgtgaaagaactgttcttacctctgaactgggggctcccataagggataattttcctcagagtagcaaagtttctcttattagagaaatcttgtgactcagatgaagtcagggatagaagacccttggacctggcaggttaatgctgattattccttggcctttcccttgtatttatgcaaggaaggatatactgagctgatactcttccaagcctacaacttcaagttttatcatttgaactcaagtacttttgctgctgaggaatggaatcaaaagaacgtagtctcctggtaaccacctcagatctctattattaggctagatgtatagcctctactcccccagcttcttgctcttgaccctgcactgtaagttgcccttctattagcagccaaggaaaagggaaacatgagcttatccagaacggtggcagagtctccttggcaatcaaccaacgttgctatgaaatatgcctcacactgtatagctcattataggccgtcaggtttgttgaaaaaagtgggcaagacatgattaatgaatcagaatcctgtttcattggtgacttggataaagactttttaattttaaaaaaaacaaaaaaaaaaaaaaaaaaaaaaaaaaa

SEQ ID NO: 2533 - DNA, 2048 bp, Homo sapiens
gcggccgccaagcgatccctgctccgcgcgacactgcgtgcccgcgcacgcagagaggcggtgacgcactttacggcggcagcgtaagtgcgtgacgctcgtcagtggcttcagttcacacgtggcgccagcggaggcaggttgatgtgtttgtgcttccttctacagccaatatgaaaaggcctaagttaaagaaagcaagtaaacgcatgacctgccataagcggtataaaatccaaaaaaaggttcgagaacatcatcgaaaattaagaaaggaggctaaaaagcggggtcacaagaagcctaggaaagacccaggagttccaaacagtgctccctttaaggaggctcttcttagggaagctgagctaaggaaacagaggcttgaagaactaaaacagcagcagaaacttgacaggcagaaggaactagaaaagaaaagaaaacttgaaactaatcctgatattaagccatcaaatgtggaacctatggaaaaggagtttgggctttgcaaaactgagaacaaagccaagtcgggcaaacagaattcaaagaagctgtactgccaagaacttaaaaaggtgattgaagcctccgatgttgtcctagaggtgttggatgccagagatcctcttggttgcagatgtcctcaggtagaagaggccattgtccagagtggacagaaaaagctggtacttatattaaataaatcagatctggtaccaaaggagaatttggagagctggctaaattatttgaagaaagaattgccaacagtggtgttcagagcctcaacaaaaccaaaggataaagggaagataaccaagcgtgtgaaggcaaagaagaatgctgctccattcagaagtgaagtctgctttgggaaagagggcctttggaaacttcttggaggttttcaggaaacttgcagcaaagccattcgggttggagtaattggtttcccaaatgtggggaaaagcagcattatcaatagcttaaaacaagaacagatgtgtaatgttggtgtatccatggggcttacaaggagcatgcaagttgtccccttggacaaacagatcacaatcatagatagtccgagcttcatcgtatctccacttaattcctcctctgcgcttgctctgcgaagtccagcaagtattgaagtagtaaaaccgatggaggctgccagtgccatcctttcccaggctgatgctcgacaggtagtactgaaatatactgtcccaggctacaggaattctctggaattttttactgtgcttgctcagagaagaggtatgcaccaaaaaggtggaatcccaaatgttgaaggtgctgccaaactgctgtggtctgagtggacaggtgcctcattagcttactattgccatccccctacatcttggactcctcctccatattttaatgagagtattgtggtagacatgaaaagcggcttcaatctggaagaactggaaaagaacaatgcacagagcataagagccatcaagggccctcatttggccaatagcatccttttccagtcttccggtctgacaaatggaataatagaagaaaaggacatacatgaagaattgccaaaacggaaagaaaggaagcaggaggagagggaggatgacaaagacagtgaccaggaaactgttgatgaagaagttgatgaaaacagctcaggcatgtttgctgcagaagagacaggggaggcactgtctgaggagactacagcaggtgaacagtctacaaggtcttttatcttggataaaatcattgaagaggatgatgcttatgacttcagtacagattatgtgtaacagaacaatggctttttatgattttttttttaacattttaagcagactgctaaactgttctctgtataagttatggtatgcatgagctgtgtaaattttgtgaatatgtattatattaaaaccaggcaacttggaatccctaaattctgtaaaaagacaattcatctcattgtgagtggaagtagttatctggaataaaaaaagaagatacctattgaaaaaaaa

SEQ ID NO: 2534 - DNA, 2159 bp, Homo sapiens
gcggccgccaagcgatccctgctccgcgcgacactgcgtgcccgcgcacgcagagaggcggtgacgcactttacggcggcagcgtaagtgcgtgacgctcgtcagtggcttcagttcacacgtggcgccagcggaggcaggttgatgtgtttgtgcttccttctacagccaatatgaaaaggcctagtaagtggggtcgggaggcgggcgtggagggacccacgtctggaagttgctgcagccaccacgacgctcttctacggctacggctttgtctctgctgagttaaagaaagcaagtaaacgcatgacctgccataagcggtataaaatccaaaaaaaggttcgagaacatcatcgaaaattaagaaaggaggctaaaaagcggggtcacaagaagcctaggaaagacccaggagttccaaacagtgctccctttaaggaggctcttcttagggaagctgagctaaggaaacagaggcttgaagaactaaaacagcagcagaaacttgacaggcagaaggaactagaaaagaaaagaaaacttgaaactaatcctgatattaagccatcaaatgtggaacctatggaaaaggagtttgggctttgcaaaactgagaacaaagccaagtcgggcaaacagaattcaaagaagctgtactgccaagaacttaaaaaggtgattgaagcctccgatgttgtcctagaggtgttggatgccagagatcctcttggttgcagatgtcctcaggtagaagaggccattgtccagagtggacagaaaaagctggtacttatattaaataaatcagatctggtaccaaaggagaatttggagagctggctaaattatttgaagaaagaattgccaacagtggtgttcagagcctcaacaaaaccaaaggataaagggaagataaccaagcgtgtgaaggcaaagaagaatgctgctccattcagaagtgaagtctgctttgggaaagagggcctttggaaacttcttggaggttttcaggaaacttgcagcaaagccattcgggttggagtaattggtttcccaaatgtggggaaaagcagcattatcaatagcttaaaacaagaacagatgtgtaatgttggtgtatccatggggcttacaaggagcatgcaagttgtccccttggacaaacagatcacaatcatagatagtccgagcttcatcgtatctccacttaattcctcctctgcgcttgctctgcgaagtccagcaagtattgaagtagtaaaaccgatggaggctgccagtgccatcctttcccaggctgatgctcgacaggtagtactgaaatatactgtcccaggctacaggaattctctggaattttttactgtgcttgctcagagaagaggtatgcaccaaaaaggtggaatcccaaatgttgaaggtgctgccaaactgctgtggtctgagtggacaggtgcctcattagcttactattgccatccccctacatcttggactcctcctccatattttaatgagagtattgtggtagacatgaaaagcggcttcaatctggaagaactggaaaagaacaatgcacagagcataagagccatcaagggccctcatttggccaatagcatccttttccagtcttccggtctgacaaatggaataatagaagaaaaggacatacatgaagaattgccaaaacggaaagaaaggaagcaggaggagagggaggatgacaaagacagtgaccaggaaactgttgatgaagaagttgatgaaaacagctcaggcatgtttgctgcagaagagacaggggaggcactgtctgaggagactacagcaggtgaacagtctacaaggtcttttatcttggataaaatcattgaagaggatgatgcttatgacttcagtacagattatgtgtaacagaacaatggctttttatgattttttttttaacattttaagcagactgctaaactgttctctgtataagttatggtatgcatgagctgtgtaaattttgtgaatatgtattatattaaaaccaggcaacttggaatccctaaattctgtaaaaagacaattcatctcattgtgagtggaagtagttatctggaataaaaaaagaagatacctattgaaaaaaaaaaaaaaaaaaaaaa

SEQ ID NO: 2535 - DNA, 2012 bp, Homo sapiens
gcggccgccaagcgatccctgctccgcgcgacactgcgtgcccgcgcacgcagagaggcggtgacgcactttacggcggcagcgtaagtgcgtgacgctcgtcagtggcttcagttcacacgtggcgccagcggagagttaaagaaagcaagtaaacgcatgacctgccataagcggtataaaatccaaaaaaaggttcgagaacatcatcgaaaattaagaaaggaggctaaaaagcggggtcacaagaagcctaggaaagacccaggagttccaaacagtgctccctttaaggaggctcttcttagggaagctgagctaaggaaacagaggcttgaagaactaaaacagcagcagaaacttgacaggcagaaggaactagaaaagaaaagaaaacttgaaactaatcctgatattaagccatcaaatgtggaacctatggaaaaggagtttgggctttgcaaaactgagaacaaagccaagtcgggcaaacagaattcaaagaagctgtactgccaagaacttaaaaaggtgattgaagcctccgatgttgtcctagaggtgttggatgccagagatcctcttggttgcagatgtcctcaggtagaagaggccattgtccagagtggacagaaaaagctggtacttatattaaataaatcagatctggtaccaaaggagaatttggagagctggctaaattatttgaagaaagaattgccaacagtggtgttcagagcctcaacaaaaccaaaggataaagggaagataaccaagcgtgtgaaggcaaagaagaatgctgctccattcagaagtgaagtctgctttgggaaagagggcctttggaaacttcttggaggttttcaggaaacttgcagcaaagccattcgggttggagtaattggtttcccaaatgtggggaaaagcagcattatcaatagcttaaaacaagaacagatgtgtaatgttggtgtatccatggggcttacaaggagcatgcaagttgtccccttggacaaacagatcacaatcatagatagtccgagcttcatcgtatctccacttaattcctcctctgcgcttgctctgcgaagtccagcaagtattgaagtagtaaaaccgatggaggctgccagtgccatcctttcccaggctgatgctcgacaggtagtactgaaatatactgtcccaggctacaggaattctctggaattttttactgtgcttgctcagagaagaggtatgcaccaaaaaggtggaatcccaaatgttgaaggtgctgccaaactgctgtggtctgagtggacaggtgcctcattagcttactattgccatccccctacatcttggactcctcctccatattttaatgagagtattgtggtagacatgaaaagcggcttcaatctggaagaactggaaaagaacaatgcacagagcataagagccatcaagggccctcatttggccaatagcatccttttccagtcttccggtctgacaaatggaataatagaagaaaaggacatacatgaagaattgccaaaacggaaagaaaggaagcaggaggagagggaggatgacaaagacagtgaccaggaaactgttgatgaagaagttgatgaaaacagctcaggcatgtttgctgcagaagagacaggggaggcactgtctgaggagactacagcaggtgaacagtctacaaggtcttttatcttggataaaatcattgaagaggatgatgcttatgacttcagtacagattatgtgtaacagaacaatggctttttatgattttttttttaacattttaagcagactgctaaactgttctctgtataagttatggtatgcatgagctgtgtaaattttgtgaatatgtattatattaaaaccaggcaacttggaatccctaaattctgtaaaaagacaattcatctcattgtgagtggaagtagttatctggaataaaaaaagaagatacctattgaaaaaaaaaaaaaaaaaaaaaa

SEQ ID NO: 2536 - DNA, 2858 bp, Homo sapiens
atggagaagtacgagcggatccgagtggtggggagaggtgccttcgggattgtgcacctgtgcctgcgaaaggctgaccagaagctggtgatcatcaagcagattccagtggaacagatgaccaaggaagagcggcaggcagcccagaatgagtgccaggtcctcaagctgctcaaccaccccaatgtcattgagtactacgagaacttcctggaagacaaagcccttatgatcgccatggaatatgcaccaggcggcactctggctgagttcatccaaaagcgctgtaattccctgctggaggaggagaccatcctgcacttcttcgtgcagatcctgcttgcactgcatcatgtgcacacccacctcatcctgcaccgagacctcaagacccagaacatcctgcttgacaaacaccgcatggtcgtcaagatcggtgatttcggcatctccaagatccttagcagcaagagcaaggcctacacggtggtgggtaccccatgctatatctcccctgagctgtgtgagggcaagccctacaaccagaagagtgacatctgggccctgggctgtgtcctctacgagctggccagcctcaagagggctttcgaggctgcgaacttgccagcactggtgctgaagatcatgagtggcacctttgcacctatctctgaccggtacagccctgagcttcgccagctggtcctgagtctactcagcctggagcctgcccagcggccaccactcagccacatcatggcacagcccctctgcatccgtgccctcctcaacctccacaccgacgtgggcagtgtccgcatgcggagggcagagaagtccgtggcccccagcaacacagggagcaggaccaccagtgtccgctgcagaggtatcccccggggacctgtgaggccagccatcccaccaccactgtcgtcagtgtatgcctggggtggtgggctgggcacccccctgcggctgccaatgctcaacacagaggtggtccaggtggcagctgggcgcacgcagaaagccggcgtcacgcgctctgggcgtctcatcctgtgggaggccccacccctaggtgcaggcggaggcagtctccttcctggggcagtggagcagccacagccccagttcatctcgcgtttcctggagggccagtcgggtgtgaccatcaagcacgtggcctgtggggacttcttcactgcctgcctgactgacagaggcatcatcatgacattcggcagcggcagcaatgggtgcctaggccatggcagcctcactgacatcagccagcccaccattgtggaggctttgctgggctatgaaatggtgcaggtggcctgtggggcctctcacgtgctggccctgtccactgagcgagaactatttgcctggggccgtggagacagcggcagactggggctaggcaccagggagtcccacagctgcccccagcaggtgcccatgcccccaggacaggaagctcagcgagttgtatgtggtatcgattcctccatgatcctcactgtgcctggccaagccctagcctgtgggagcaacaggttcaacaagctgggcctggaccacctctccctgggggaggagcctgtcccccaccagcaagtggaggaggccctgagcttcacactactaggctctgcacccctggaccaggagcctctgctgagtatagacctgggcactgctcactcagctgctgtgactgcctcgggtgattgctacacttttggcagcaatcagcacggacagttgggcaccaatactcgccgaggcagtcgggcaccctgtaaggtccaaggccttgagggcatcaagatggcaatggtagcctgtggggatgccttcactgtagctattggggcagagagcgaagtgtactcttggggcaaaggggcgcgaggtcgattgggaaggagggatgaggatgccggactccctcggccagtgcagttggatgagacacacccttacacggtgacttccgtgtcctgttgccatggaaacaccctcctggctgttcgatcggtcacagatgagccggtccccccctgaggcacccggattcacctctggaccaccctgatattgcttctcctctgaatgctctgaaaagtgcaggtgcccaaggcatgacttgcagctgtctcctggattgtgtcatcatggggtatcagggctggcaaaacccctgctctgcttttggccttggatatggaaacctcaaccactttgttctcctaccacctctttgcccttcctaccccttcctcccttcagtcagtgtccccagggtccagcctggctagagttagaaggcagacctagcctttggaagcagggtggcctccagagccttgccataaaaaggctgaaggcagccgggcgcagtggctcacgcctgtaatcccagcactttgggaggctgaggcgggcggatcacgaggtcaggagatcgagaccatcctggctaacgtggtgaaaccccatctctactaaaaatacaaaaaaattagctgggcgtggtggcacgcgcctgtagtcccagctgctcaggaggctgaggcaggagaatggcgtaaacccctccagcctgggcgacagaaccagactccgtctcaaaaaaaaaaaaaaaacaaaaaaggctgaaggcagctgtagctccacacagaccctaccctttcccctagcccagttagaaaataagtctgggccggcggcggtggctcacacctgcataggcagtgctttggccaggaggatcccttgatcccttgtggccaggagttgggagaccagcctggggaccatagcgagaccgctgtctccaccaa

SEQ ID NO: 2537 - DNA, 1675 bp, Homo sapiens
gttgcagcctgctgcgcgcccaggggtcccgcgggttttcgggcgcagggtggcgcccgcggcaggcggcggccatgaacttctccgaggtattcaagctctccagcttactctgcaagttctccccggacggcaagtacctggcttcctgtgtccagtaccggttagtggtccgggatgtgaacacccttcagatccttcagctgtacacgtgcctagaccagatccagcacatcgagtggtcggcagactcgctcttcatcctgtgcgccatgtacaagcgagggctggtgcaggtctggtctttagagcagcccgaatggcactgcaaaatagacgagggctcagccgggctggtggcctcgtgctggagcccggacgggcgccacattctcaacaccacggaattccatctgcggataaccgtctggtccttgtgcacaaaatccgtgtcttacatcaaatacccgaaagcttgtctgcagggaatcaccttcaccagggacggccgctacatggcgctggcagaacggcgcgactgcaaagattacgtgagcatcttcgtctgcagtgattggcagctcctgcggcattttgatacggacacccaggatctcacagggattgagtgggccccaaacggctgtgtgctggcagtgtgggacacctgcttggagtacaagattctgctgtactcattggatggccggttgttgtccacgtacagcgcttacgagtggtccctgggcatcaagtctgtggcctggagccccagcagtcagttcctggcagttgggagctatgatggaaaggtgcgcatccttaatcacgtgacttggaaaatgatcacggagtttgggcatcctgcagccattaatgatcccaagatagtggtgtataaggaggccgagaagagcccacagctgggactgggctgcctctccttcccgccgccccgggccggggccggccctctcccgagctcagagagtaaatatgagatcgcctctgtcccagtctccttacagacactgaaacctgttaccgacagagcaaacccgaaaatgggcataggaatgctggcatttagtcctgacagctacttcctggcgacaaggaacgacaacattcccaatgccgtctgggtctgggacattcagaagctgaggctgttcgcggtgctcgagcagctgtccccagtgcgcgcgtttcagtgggacccgcagcagccgcggctggccatctgcacgggaggcagcaggctctacctgtggtccccagcgggctgcatgtcggtgcaggtgcctggggaaggcgactttgcagtgctctctctgtgctggcatttaagcggagactcgatggccctcctcagcaaggatcacttctgcctctgcttcctggagacagaggcagtggtcggcacagcctgcagacagctgggcggccacacgtagcagcggtgcactaacgtgtgcagaaacagggctactctgtgtttccagtgtgggaaaaaacacagcttcaccaggaggttctccactgtggtggtctggattcagtgattgattctatttttctatagcaaagcatttttgtaaatatgtatggtataaaactgtagttttattatttaaaataaatacttgctgatttaaaaaaaaaaaaaaaaaaa

SEQ ID NO: 2538 - DNA, 6401 bp, Homo sapiens
aatacaccccgggcaggtggagcgctcgcggctgctcgcggcgagcccgggagtgatggcgaggcccctgcgggcggccagcgcctgaggcgccccgccccgccccgccccgcgcggccctccccgcccggccctgccctgccctgctccctgccggcggctgcgggcgcttcctagtccgctcgggcggccgcccaggcgaggtgcggcctccgcacaggccggggggcgtaggcgcgcggggcccgccatggctgcgtcggagctctacacaaagtttgccagggtttggatacctgatccagaggaagtctggaagtcagcagagctgctcaaagattataagccaggagataaagtcctcctgcttcacctcgaggaaggaaaggatttggaataccatctagatccaaagaccaaggagctgcctcacttacgaaatcctgacatacttgttggtgaaaatgacctcacagccctcagctatcttcatgagcctgctgtgctccataatctcagagtccgctttattgattccaaacttatttatacgtattgtggtatagtcctagtagctataaatccctatgaacagctgcctatttatggagaagatattattaatgcatacagtggtcagaacatgggtgatatggatccacatatctttgcagtagctgaagaagcttacaagcaaatggccagagatgaacgaaatcagtccatcatcgtaagtggagagtctggggcaggaaaaacagtctcagctaagtatgccatgcgatactttgcaactgtgagtggttctgccagtgaggccaatgtggaggaaaaggtcttgacctccaaccccatcatggagtccattggaaatgctaaaacaaccaggaatgataatagcagccgttttgggaagtatattgagattggttttgataagagatatcgaatcattggtgccaatatgagaacttatcttttagagaaatccagagtggtattccaggcagaagaggagagaaactatcatatcttctatcagctttgtgcctcagcaaagttacctgaatttaaaatgctacgattaggaaatgcagataactttaattacacaaaacaaggaggcagtcctgtgattgaaggagtggatgatgcaaaggagatggcacatactaggcaggcctgcactttgctaggaattagtgaatctcatcaaatgggaattttccgaatacttgctggcatccttcacttaggcaatgttggatttacatcccgagatgcagacagctgcacaatacctcccaagcatgaacctctctgcatcttctgtgacctcatgggtgtggactatgaggagatgtgtcactggctctgccatcggaaactggctactgccacagagacatacatcaagcccatctccaagctgcaggccacgaatgcccgcgatgctttggccaaacacatctatgccaagctctttaactggattgtagataatgtcaatcaggctctccattctgctgtcaaacagcactcttttattggtgtgctagacatttacggatttgaaacatttgagataaatagttttgaacagttttgcataaattatgcaaatgaaaaactacagcaacaattcaatatgcatgtcttcaaattggagcaagaagaatatatgaaggaacaaattccatggacactcatagatttttatgataatcagccttgtattaatcttatagaatcaaaactaggcattctagatttactggatgaggaatgcaagatgcctaaaggcacagatgacacctgggcccaaaaattgtacaacacacatttgaacaaatgtgcactctttgaaaagcctcgtctatcaaacaaagctttcatcatccaacattttgctgacaaagtggaataccagtgtgaaggatttctcgaaaagaataaagacaccgtttttgaagaacaaattaaagttcttaaatcaagcaagtttaagatgctaccagaactatttcaagatgatgagaaggccatcagtccaacttcagccacctcctcagggcgcacacccctcacacgaactcctgcaaagcccaccaaaggcagaccaggccaaatggccaaagagcacaagaaaacagtggggcatcagttcagaaactccctgcacctgcttatggagacactcaatgccactacccctcactatgtgcgctgtatcaagcctaatgacttcaagctcccattcacgtttgatgagaagagggcagtgcagcagctgagagcatgtggtgtcctggaaaccatccgaatcagtgcggccggtttcccctcacggtggacttaccaagaatttttcagccgctaccgtgtcctaatgaagcagaaagatgtgctgagtgacagaaagcaaacatgcaagaatgtgttagagaaactgatactggacaaggacaaataccagtttggtaagacaaagatctttttccgtgccggtcaagtggcctatctagaaaaattgagagctgacaaactgagagctgcctgcatccggatccagaagaccatccgagggtggctgctgagaaagaagtacctacgcatgcggaaggcagccatcaccatgcagagatacgtgcggggctaccaggcccgatgctatgctaagtttctgcgcagaaccaaggcagcaaccatcattcaaaagtactggcgcatgtatgtggtccgcaggaggtacaagattagacgagctgccactattgttcttcagtcttacttgcgaggcttcttggccagaaataggtatcgcaagatactccgtgggcacaaagcagtcatcattcagaagcgagtccggggctggctggcccgcacacactacaagaggagcatgcatgccatcatctaccttcagtgctgcttcaggcggatgatggccaagcgtgagctaaagaagctcaaaatcgaggctcgctcagtggagcgctataagaagctgcgcatcggcatggagaacaagatcatgcagctgcagcgcaaagttgatgagcagaacaaagactacaaatgccttgtggagaaactaaccaatctggaaggaatatacaactctgagactgagaaactacgaagtgacttagaacgtcttcaactaagtgaagaggaagcgaaagttgccactgggcgggtccttagtctgcaggaggaaattgccaagctccggaaagacctggagcaaactcgttcagagaaaaaatgcattgaggaacatgcagatcgatacaaacaagaaacagagcagctggtatcaaatctgaaggaagaaaatactttgctgaagcaagaaaaagaagccctcaatcaccgcatcgtgcagcaggctaaggagatgacagaaactatggagaagaagttagtagaagaaacgaaacaactggaactcgaccttaatgatgaaaggctgagatatcagaaccttctgaatgagttcagtcgcctggaagaaagatatgatgacctcaaggaagagatgacccttatggtgcatgtgcctaagcctggacacaagagaacagactccacccacagcagcaacgagtctgaatatatctttagctctgaaattgcagaaatggaagacattccatcaaggacagaggaaccaagtgagaagaaggtacctctggacatgtcattgttccttaagctccagaagcgggtcacagagctggagcaggagaagcaggtgatgcaggatgagctggaccgcaaggaggagcaggtgctccgcagcaaggccaaggaagaagaaagaccacaaattagaggtgcagaactggaatatgagtcactcaagcgtcaagaactagaatcagaaaacaaaaaactgaagaatgagctaaatgagttgcgcaaggccctcagtgagaaaagtgccccagaggtgaccgccccaggtgcacctgcctaccgtgtcctcatggagcagctgacctctgtgagcgaggagcttgatgtccgcaaggaggaagtcctcatcttaaggtctcaactggtgagccagaaagaggccatccaacccaaggatgacaagaatacaatgacagattccacaatacttttggaagatgtacaaaaaatgaaagataaaggtgaaatagcacaagcatacattggtttgaaagaaacaaatagatcatctgctctggattaccatgagttgaatgaggatggagagctgtggctggtttatgaagggttaaaacaagccaataggctcctggaatcccagctgcagtcacagaagaggagccatgagaatgaggccgaggccctccgtggggagatccagagcctgaaggaggagaacaaccgacagcagcagctgctggcccagaacctgcagctgcccccagaggcccgcattgaggccagcctgcagcacgagatcacccggctgaccaacgaaaacttggatttgatggaacaacttgaaaaacaggataagacggtccgtaaactgaaaaaacaactgaaagtatttgccaaaaaaattggcgaactagaagtgggccagatggagaacatatccccaggacagatcattgatgaacccatccgaccagtcaacattcccaggaaagaaaaggatttccaagggatgctggaatacaagaaggaggatgagcaaaaacttgttaagaacctgattctggaactgaagccacgtggtgtagcagtcaatttgattccaggattaccggcatatatcctgttcatgtgtgttcgacatgctgactacctgaatgatgatcagaaagtaaggtcgttgctaacatcaacaattaacagcatcaaaaaagtattgaagaaaagaggtgatgattttgaaaccgtctccttctggctctctaacacatgccgatttttgcactgcttgaaacagtacagtggagaagagggctttatgaagcacaacacatctcgccagaatgaacactgcctcaccaattttgacctggctgagtatcggcaggtgctgagtgacttggccattcagatctaccagcagctcgtgcgggtgttagagaacatccttcagccaatgattgtctcaggcatgctggaacatgaaacgattcagggcgtgtctggggtgaagcccacagggttgagaaagcgaacctccagtatcgccgatgagggcacctacacactggactccatcctccggcagctcaactccttccactcggtcatgtgtcagcatggcatggaccctgaactgatcaagcaggtggtcaagcagatgttctacatcataggggccatcaccctgaacaaccttctcctgcggaaggacatgtgctcctggagtaaaggcatgcagatcaggtacaatgtcagtcaactggaagaatggctgcgtgacaagaatctgatgaatagtggggctaaagaaaccctggaacctctcattcaggctgctcaacttttgcaagtgaaaaagaaaacagatgatgatgcagaagccatttgttctatgtgcaatgctttaactactgcccagattgtgaaagtgttgaatttgtatactccagttaatgagtttgaagaaagagtctctgtgtcgttcattcgtactatacagatgcgtttacgagacaggaaagactctccccagctgctcatggatgctaaacacatctttcctgtcacctttcctttcaacccatcttccctcgcactagaaaccatccagattccagccagcctcggcctgggctttatttcacgggtctgaaagtgatgtccaggcaaaaattgacaatacatttcttgcccgaaataagaacccattatttccagtgagttactgaaaatacatttttaaagagaaagtactgattatctcccaaatgagaagtcattaactggaaatctccctagaatactttcatcactttggaaacaaagataggctctttcgtgctgtgttatctttatagcaacactcatccttaaccaactaggtaccgtgagtttacatacaggagaatgatggaaggaagggaggaaggaaaggaggagaaaaatgtgtcttcagctggcagcatttattttaaatccttagcactgagtttgaatggtataaaaagtataacttccatagatgagctgttgttaggaaggcaccaaagaacctcctctgcactaaacaggagaatggaaagaaaagtctccattgagtacatatcatgtcagtttagtaatcaattatgttgatattgttaaactggttcaaagaaataaactggcaatatgtaaagtaattcctcatttgtgtcactatgatatagagatattaaaggaatgttggtttgcta

SEQ ID NO: 2539 - DNA, 600 bp, Homo sapiens
gagggtccgcggttggtcagaccggggcacttggcctgaagacctggaattggcgacttcgatattaacaaggatggcggcggccgcagcaagtcgaggagtcggggcaaagctgggcctgcgtgagattcgcatccacttatgtcagcgctcgcccggcagccagggcgtcagggacttcattgagaaacgctacgtggagctgaagaaggcgaatcccgacctacccatcctaatccgcgaatgctccgatgtgcagcccaagctctgggcccgctacgcatttggccaagagacgaatgtccctttgaacaacttcagtgctgatcaggtaaccagagccctggagaacgttctaagtggtaaagcctgaagcctccactgaggattaagagcaacagccccagagcctgggctctgctggacttagtataatgtgaaaaaaatgtgttctcctattcctcataaagcttgtgctgtaaaatactttctcagggtgttcttgtcctcatctaccctctaccccttactgtgcaaccactgaggcaaagtagcttaatataaaaataaaactttattctgtctcaaaaaaaaaaaaaa

SEQ ID NO: 2540 - DNA, 1794 bp, Homo sapiens
tacagctttgattttataacatcctgctaatttttgttcttacagaaatacactttcgggaaatggcctctaaatcctggctgaattttttaaccttcctctgtggatcagcaataggatttcttttatgttctcagctatttagtattttgttgggagaaaaggttgacacccagcctaatgttcttcataatgatcctcatgcaaggcattcagatgataatggacagaatcatctagaaggacaaatgaacttcaatgcagattctagccaacataaagatgagaacacagacattgctgaaaacctctatcagaaagttagaattctttgctgggttatgaccggccctcaaaacctagagaaaaaggccaaacacgtcaaagctacttgggcccagcgttgtaacaaagtgttgtttatgagttcagaagaaaataaagacttccctgctgtgggactgaaaaccaaagaaggcagagatcaactatactggaaaacaattaaagcttttcagtatgttcatgaacattatttagaagatgctgattggtttttgaaagcagatgatgacacgtatgtcatactagacaatttgaggtggcttctttcaaaatacgaccctgaagaacccatttactttgggagaagatttaagccttatgtaaagcagggctacatgagtggaggagcaggatatgtactaagcaaagaagccttgaaaagatttgttgatgcatttaaaacagacaagtgtacacatagttcctccattgaagacttagcactggggagatgcatggaaattatgaatgtagaagcaggagattccagagataccattggaaaagaaacttttcatccctttgtgccagaacaccatttaattaaaggttatctacctagaacgttttggtactggaattacaactattatcctcctgtagagggtcctggttgctgctctgatcttgcagtttcttttcactatgttgattctacaaccatgtatgagttagaatacctcgtttatcatcttcgtccatatggttatttatacagatatcaacctaccttacctgaacgtatactaaaggaaattagtcaagcaaacaaaaatgaagatacaaaagtgaagttaggaaatccttgaaagaaaatcatgaatgaacaaaggtaatatgtctagcactgcactgaaaaaggacttctgcatttctgacatagaacactggaatcccagtgaggaattctaagtgaacattccttatagaaacctttcacatgaatgactataaactgaagctttaaatgagctgtgaagtgtgttaaaatgtgttttgatacagtaatatataaatatgtctatatatatgaggaacttgtgttttttaaatggtggccaggtagaggaactagaaaagagattttgttgcctgttttctgaccatctgtgttattgtcactgagaaactaaaatagtaaatttactaaaactacactgcaccatgttagtaataaacagatctgccttaaagaaaagaaaattttagaaagaaatattgttgctcagtgttgttaatatagctcaagaattgagtttatatttgcagtatgctataaatgatacccccctaccacacccacacacacagtttttgtctaatgaaaatgttgctgtgattatttataattggtagtatttcttccagaagaagctaaaataagactggcacttaccctgaagtgcattaataaaaccacactttaaaattaaaaaaaaaaaaaaaaaa

SEQ ID NO: 2541 - DNA, 512 bp, Homo sapiens
attcttcccctctctacaaccctctctcctcagcgcttcttctttcttggtttgatcctgactgctgtcatggcgtgccctctggagaaggccctggatgtgatggtgtccaccttccacaagtactcgggcaaagagggtgacaagttcaagctcaacaagtcagaactaaaggagctgctgacccgggagctgcccagcttcttggggaaaaggacagatgaagctgctttccagaagctgatgagcaacttggacagcaacagggacaacgaggtggacttccaagagtactgtgtcttcctgtcctgcatcgccatgatgtgtaacgaattctttgaaggcttcccagataagcagcccaggaagaaatgaaaactcctctgatgtggttggggggtctgccagctggggccctccctgtcgccagtgggcacttttttttttccaccctggctccttcagacacgtgcttgatgctgagcaagttcaataaagattcttggaagttt

SEQ ID NO: 2542 - DNA, 507 bp, Homo sapiens
ggtgcttctgagatgtgggcttgcacacgctgttgctatagtacgtgtgatcctgactgctgtcatggcgtgccctctggagaaggccctggatgtgatggtgtccaccttccacaagtactcgggcaaagagggtgacaagttcaagctcaacaagtcagaactaaaggagctgctgacccgggagctgcccagcttcttggggaaaaggacagatgaagctgctttccagaagctgatgagcaacttggacagcaacagggacaacgaggtggacttccaagagtactgtgtcttcctgtcctgcatcgccatgatgtgtaacgaattctttgaaggcttcccagataagcagcccaggaagaaatgaaaactcctctgatgtggttggggggtctgccagctggggccctccctgtcgccagtgggcacttttttttttccaccctggctccttcagacacgtgcttgatgctgagcaagttcaataaagattcttggaagttt

SEQ ID NO: 2543 - DNA, 2130 bp, Homo sapiens
agcgggacgtgagctcgcgaccagcgcgggggaggcgcccacacgcccgtcccgtcttggtgtctggccccaggcggccgcgcctcccctccgaggtggtcgcatagcccctgcaccaggcggcccgcgcccgcgacctcaaggcggctgccccgcgccatggcggcccggctgggtgcgctggccgcgtcggggctgtaccggcggcgccagcaccggcagagcccgccgccagccacgggcaatatgtcggacgccttggccaacgccgtgtgccagcgctgccaggcccgcttctcccccgccgagcgcattgtcaacagcaatggggagctgtaccatgagcactgcttcgtgtgtgcccagtgcttccggcccttccccgaggggctcttctatgagtttgaaggccggaagtactgcgaacacgacttccaaatgctgtttgctccgtgctgtggatcctgcggtgagttcatcattggccgcgtcatcaaggccatgaacaacaactggcacccgggctgcttccgctgcgagctgtgtgatgtggagctggctgacctgggctttgtgaagaatgccggcaggcatctctgccggccttgccacaaccgtgagaaggccaaaggcctgggcaagtacatctgccagcggtgccacctggtcatcgacgagcagcccctcatgttcaggagcgacgcctaccaccctgaccacttcaactgcacccactgtgggaaggagctgacagccgaggcccgcgagctgaagggtgagctctactgcctgccctgccatgacaagatgggcgtccccatctgcggggcctgccgccggcccatcgagggccgagtggtcaacgcgctgggcaagcagtggcacgtggagcactttgtctgtgccaagtgtgagaagccattcctggggcaccggcactatgagaagaagggcctggcctactgcgagactcactacaaccagctcttcggggacgtctgctacaactgcagccatgtgattgaaggcgatgtggtgtcggccctcaacaaggcctggtgtgtgagctgcttctcctgctccacctgcaacagcaagctcaccctgaagaacaagtttgtggagttcgacatgaagcccgtgtgtaagaggtgctacgagaagttcccgctggagctgaagaagcggctgaagaagctgtcggagctgacctcccgcaaggcccagcccaaggccacagacctcaactctgcctgaaggccctcttgcgcagctgcctctcggcccctccgccttctcccctcctgctgtccatgcttggccccctcgtccccatccacctgtgccctccgcatcttaccctccctttctctttcctcattgccttctcccttcctgttccctcatctctgccttccccatgtctctcctctccttggccgtggcttctgtctgtgaggaggcaggagctggggagtgggagcctatgaccccacgtctgacagccatgtccacctgtgcccacagcttccgcccacagacctccagggacaggagcaaattgcaccacagctccccgcctggcctggccctccccaggcggctcagtggctcatgctgtcctgtgagagcccctgccccagagcggccccactaagcgcatgtggctcctgggctacccacagccagggcagcctgctggagccacagggccagggccatgcagatggaggcctctgggagccacctccaatccctcaccactcactcaaccagtggcacagtgtccttgtgcccacactgagccagcaagtcctgctgtccacacccacaagctacctggagggacaggacccacctccatccttcggaaggccttcctggaatcccaccttggcctccgccctcggttccgccccgcccctctccccccgaccttggggcttgtgtcgagcccttgggtggggccaggaggaggtgatggcgtcagaggaggtgtggtcagaggtgacttgttcccacctccagggaggacgcttcgtcttcggccagcgcagacctggtgtttgtttgttgggctcacgcttgcacaatgaaggcttgttcacacaaaaaaaaaaaaaaaaaaaa

SEQ ID NO: 2544 - DNA, 5386 bp, Homo sapiens
tgaattcctgtcggagagcgaggacggtgctggcaagaacgagaagagtgacaagagtaccagtgtgaagcgcaggctgagctgcctccgcagtcgagtgaccaggcagaaggagaaggggaagagcccagcacatctgaaggacaagggccaggatgcacgagagaggcgggagtgtgtcaatgggcaccagctgttgcaagggaccttctccggcccctccagctgccccctgtgtggcaaacctttcttgagctcagcctcgctcaaggagcacccccggggcaccctcctgtccgatggcagcccggccctgtccaggaatgtcggtatgacggtctctcagaaagggggtccccagccaacaccgagcccggctggccctgggacgcaactcggaccaatcacaggagagatggatgaagccgattctgcgtttttaaaatttaagcagacagctgatgactctctgtcccttacatctccaaacaccgagtccatttttgtagaagatccctacaccgcctcgctgaggagtgagattgagtcagacggccacgagtttgaagctgagtcctggagcctcgccgtggatgcagcctacgccaagaagcaaaagagggaggtggtgaaaagacaagatgtcctttatgagctgatgcagacagaggtgcaccacgtgcggacgctcaagatcatgctgaaggtgtactccagggccctgcaggaggagctgcagttcagcagcaaggccattggccgcctcttcccatgcgctgacgacctgctggagacgcacagccacttcctcgctcggctcaaggagcgccgccaggagtccctggaggagggcagtgaccggaattatgtcatccagaaaatcggcgacctcctggttcagcagttttcaggtgaaaatggggagagaatgaaagaaaagtacggtgtgttttgtagtggccacaatgaagctgttagtcattacaagttgctgcttcagcaaaacaagaaatttcaaaacttgatcaagaaaattggcaacttctccatcgtgcggcggcttggcgtgcaggagtgcattctcctggttacacaacgcataaccaaatacccagtgctggtggagcgcatcatccagaacacggaagctggcactgaggactatgaagacctgacccaggccttgaacctcatcaaagatatcatctcacaagtggacgccaaggtcagtgagtgtgagaagggccagcgcctcagggagatcgcagggaagatggacctgaagtcttccagcaaactcaagaacgggctcaccttccgcaaggaagacatgcttcagcggcagctccacctggagggcatgctatgctggaagaccacatcagggcgcttgaaagatatcctggctatcctgctgaccgacgtacttttgctgctacaagaaaaagatcagaaatacgtctttgcttctgtggactcaaagccacccgtcatctcgttacaaaagctcatcgtgagggaagtggccaacgaggagaaagcgatgtttctgatcagcgcctccttgcaagggccggagatgtatgaaatctacacgagctccaaagaggacaggaacgcctggatggcccacatccaaagggctgtggagagctgccctgacgaggaggaggggcccttcagcctgcccgaagaggaaaggaaggtggtcgaggcccgcgccacgagactccgggactttcaagagcggttgagcatgaaagaccagctgatcgcacagagcctcctagagaaacagcagatctacctggagatggccgagatgggcggcctcgaagacctgccccagccccgaggcctattccgtggaggggacccatccgagaccctgcagggggagctaattctcaagtcggccatgagcgagatcgagggcatccagagcctgatctgcaggcagctgggcagcgccaacggccaggcggaagacggaggcagctccacaggcccgcccaggagggctgagaccttcgcgggctacgactgcacaaacagccccaccaagaatggcagtttcaagaagaaagtcagcagcactgaccccaggccccgagactggcgaggccccccaaacagcccggacttgaagctcagtgacagtgacattcctgggagctctgaggaatcgccgcaggtggtggaggcgccaggcacggaatccgatccccgtctgcccaccgtcctggagtcggagcttgtccagcggatccagacactgtcccagctgctcctgaaccttcaggcggtaatcgcccaccaggacagctatgtggagacgcagcgggctgccatccaggagcgggagaagcagttccggctgcagtcgacgcgtgggaacctgctgctggagcaggagcggcaacgcaacttcgagaagcagcgggaggagcgcgcggccctggagaagctgcagagccagctgcggcacgagcagcagcgctgggagcgcgagcgccagtggcagcaccaggagctggagcgtgcgggcgcgcggctgcaggagcgcgagggcgaggcgcggcagctacgcgagcggctggagcaggagcgggccgagctggagcgccagcgccaggcctaccagcacgacctggagcggctgcgcgaggcccagcgtgccgtggagcgcgagcgggagcgcctggagctgctgcgccgcctcaagaagcagaacaccgcgccaggcgcgctgccgcccgacacactggccgaggcccagcccccaagccaccctcccagcttcaacggggaagggctggagggccctcgtgtgagcatgctgccatccggcgtggggccagagtacgcagagcgccccgaggtggctcgccgggacagcgcccccaccgagaaccggctggccaagagcgatgtgcccatccagctgctcagcgccaccaaccagttccagaggcaggcggccgtgcagcagcagatccccaccaagctggcggcctccaccaagggtggcaaggacaagggcggcaagagcaggggctctcagcgctgggagagctcagcgtccttcgacctgaagcagcagctgctgctcaacaagctcatggggaaagatgagagcacctcacggaaccgccgctcgctgagccctatcctgcccggcagacacagtcctgcgcccccaccagaccctggcttccccgccccgagcccaccgccagctgacagcccctccgagggcttctctctcaaggccgggggcacagccctcctgcccgggcccccagctccctcgccactgccggccacaccactcagcgccaaggaggacgccagcaaagaagacgtcatcttcttctaaaagggccgtgactcaaggaaagtttttaatggaaagttgagccagaactaaaccagggagctgtctgaaatcatagcaccccatccgggtggcggggagatcaactccgagctgtttttccgaggcagtgaggaacggtgccggctctgcacggagctgaggacaggacagaccttgctttgagaaggagctgccggccggggccacgctccacagccgccgcgcgacagtggagccaagggttagggcaccaggaggggccaggtggcgtcggcagcatctgtccccagaatcaggcagaatccacttcccaaacagagccccacgcaggttcaccatgaacctcagggtcagggaatgagccaggcacgggggcatgggcagagagggccacggggcagggcccactgagggaacatcagtggccctccagtcaggttctgtgggtttggaagcccatcgtgaaaggggctgacctttgcccctttttacttggcattggttttgaaaccagctgtttcccaaactctgcttcccaagggcaaccgttgctgttcacacgctcagcctgtctgggggagcgggcctctagcttcagccagggcgggtacacaccctgggcacagggtcctcagcccccgggaaatgagctcccagggctggcgtcccaccttccaggtgggggctggcacatcacagactgtcgagagcgccatgtcccagggcatgcagaggatgcacctagagacgttgcagcaagtggacaagtggccgctgtgcgggcccctcgcttgtagtgagctgttgcagcttacggtccgttccctggaggggtggaggaaggaggtgttgggcagcatcaaaggtgctgggacatcccagggtggtgagatccatccacgatccagctccggtggagaaagggcccatgtcaagccttgttctgcaccccaagcattggtggtaggactgggtcctggctgatcgtccttgttcccagtggggtacatgtgagcccctgccagggccaagtccttctcccgaacccagggtcctgggaactgcagatcccggggggattcagcccttctcccactgtgctggcagaggcactcctgtgacgctgaatacagtgaacagggacattcccgccactcggggacagatgggcacaagggaggggaaactccatcaggaagtgctcccctgggcagaggcgcccactgggtgctgtgggctcaggagggggcggggcaggagctggtgccaaccgggaaccagagccccacagccatacagcccattggtgacaaggtcctgagaacacagtggccaggtgtccccaggctcctggcccctccgacgacctcaactctgcccagcccggtccctggccatcagcgacgctgtccgccccccgtcagatcccatgtgtgccatgtttatcatcagtgttttgtatttttgtactgagtatcggagcactttacagaagctgactgtacattcctgttctgttgtgaagagaacattcccagaccctggcaccctcctgagccggcgtgtgccggtccagccctccgagatgccacaattccttggatgggggagaagttcaaggaatttctgctcggccacgcggtgggaaccccgcgtccccgccatgtggcagaggggtctcagtcgtgctaggcatcgggcggcagcgccgacagcccttccctcgccagtgcccctcggccactcctgggttggagcccgattttatttgtaaagttgacagtcgagcaaatgttcctattttcgtgggatctgcacacgtctttgtcagttgtggtcatgatcttagtcacctgctaattatttttacaatgattacaacatttcctcactgcgggatatttctgacccgctttagaacttaagacctgattctagcaataaacgtgtccgagatgagcggtgaaaaaaaaaaaaaaaaaaaaaaaaaaaaaaaaaaaaaaaaaa

SEQ ID NO: 2545 - DNA, 3760 bp, Homo sapiens
ccggcgcttcccggccggtgtcgctccgcggcgggccatggccaacgtctctaagaaggtgtcctggtccggccgggaccgggacgacgaggaggcggcgccgctgctgcggaggacggcgcggcccggcggggggacgccgctgctgaacggggctgggcctggggctgcgcgccagtcaccacgttctgcgcttttccgagtcggacatatgagcagcgtggagctggatgatgaacttttggacccggatatggaccctccacatcccttccccaaggagatcccacacaacgagaagctcctgtccctcaagtatgagagcttggactatgacaacagtgagaaccagctgttcctggaggaggagcggcggatcaatcacacggccttccggacggtggagatcaagcgctgggtcatctgcgccctcattgggatcctcacgggcctcgtggcctgcttcattgacatcgtggtggaaaacctggctggcctcaagtacagggtcatcaagggcaatatcgacaagttcacagagaagggcggactgtccttctccctgttgctgtgggccacgctgaacgccgccttcgtgctcgtgggctctgtgattgtggctttcatagagccggtggctgctggcagcggaatcccccagatcaagtgcttcctcaacggggtgaagatcccccacgtggtgcggctcaagacgttggtgatcaaagtgtccggtgtgatcctgtccgtggtcgggggcctggccgtgggaaaggaagggccgatgatccactcaggttcagtgattgccgccgggatctctcagggaaggtcaacgtcactgaaacgagatttcaagatcttcgagtacttccgcagagacacagagaagcgggacttcgtctccgcaggggctgcggccggagtgtcagcggcgtttggagcccccgtgggtggggtcctgttcagcttggaggagggtgcgtccttctggaaccagttcctgacctggaggatcttctttgcttccatgatctccacgttcaccctgaattttgttctgagcatttaccacgggaacatgtgggacctgtccagcccaggcctcatcaacttcggaaggtttgactcggagaaaatggcctacacgatccacgagatcccggtcttcatcgccatgggcgtggtgggcggtgtgcttggagcagtgttcaatgccttgaactactggctgaccatgtttcgaatcaggtacatccaccggccctgcctgcaggtgattgaggccgtgctggtggccgccgtcacggccacagttgccttcgtgctgatctactcgtcgcgggattgccagcccctgcaggggggctccatgtcctacccgctgcagctcttttgtgcagatggcgagtacaactccatggctgcggccttcttcaacaccccggagaagagcgtggtgagcctcttccacgacccgccaggctcctacaaccccctgaccctcggcctgttcacgctggtctacttcttcctggcctgctggacctacgggctcacggtgtctgccggggtcttcatcccgtccctgctcatcggggctgcctggggccggctctttgggatctccctgtcctacctcacgggggcggcgatctgggcggaccccggcaaatacgccctgatgggagctgctgcccagctgggcgggattgtgcggatgacactgagcctgaccgtcatcatgatggaggccaccagcaacgtgacctacggcttccccatcatgctggtgctcatgaccgccaagatcgtgggcgacgtcttcattgagggcctgtacgacatgcacattcagctgcagagtgtgcccttcctgcactgggaggccccggtcacctcacactcactcactgccagggaggtgatgagcacaccagtgacctgcctgaggcggcgtgagaaggtcggcgtcattgtggacgtgctgagcgacacggcgtccaatcacaacggcttccccgtggtggagcatgccgatgacacccagcctgcccggctccagggcctgatcctgcgctcccagctcatcgttctcctaaagcacaaggtgtttgtggagcggtccaacctgggcctggtacagcggcgcctgaggctgaaggacttccgagacgcctacccgcgcttcccacccatccagtccatccacgtgtcccaggacgagcgggagtgcaccatggacctctccgagttcatgaacccctccccctacacggtgccccaggaggcgtcgctcccacgggtgttcaagctgttccgggccctgggcctgcggcacctggtggtggtggacaaccgcaatcaggttgtcgggttggtgaccaggaaggacctcgccaggtaccgcctgggaaagagaggcttggaggagctctcgctggcccagacgtgaggcccagccctgcccataatgggcactggcgctggcaccccggcccttctgcatttcctcccggagtcactggtttctcggcccaaaccatgctccccagcagtggcaatggcgagcaccctgcagctgggcgggcaggcggcaggcgcggaactgaccctctcgcgggactgaccctgttgtgggcagtggtctccccccttggcgcctccttgcgcaggcccagcctccactctcctcgtctaggtttctttacctccagggatcagctgtgtgtgtgtgacctccctaccgggctatcggcctcttgggagccagcggcagggccggcacctgcgtgcctgtgcccgtgtgcgtgagacagagcccttgcccctgctgctgccccgagggctgccctgccctggaagggcccctctgcctccacaccagtggagtcttcgagacttgggagctgcttggcctcattttcagccatgagcagacggcctgtggtccctgggcctgaggcacggactcgtagcaccagggtttggaggctgcgaccgccccggagagcagcttcacactggcgccacagaggagccccacgtgcactccccggcctgcatccggcttgggtacacgggcccagaggactggggtgactcacgggccctgtgctgtgatgttgagagctgagaaaaacctccaaggccctgagccccatgcccagccctgccttggtcccccaacccccagagcttggagtctgggccccacacccagccctgccttggtccctgagcctcagagcgtggaattgctgccctgtggacactggctgggaaggcaggtcttcccctagcacatggggaccccggcctcgagggtgacctccctaccttgcccctgccagccaccaagcgcaggtgcagcgggggccagactcctgccggcctcagaggacacctggcccagcacaggcagctagaagggccggtgggcaccggggccgggaagcccccacctcaccacctgagggcccctgggaggctcctctggcctggctgggctgggtctggggccgccacaggcccctcacggggcggcagaggcaacttcagtgtccctgttagagcaacacgggtccctccgtggggggctgggtgcggccccctgccgtgtatttcctccccagggagtggggcctccccgggagctgacgccaccaccctgcttagccctcacagggccccaaggtgtccgagtgtgttgggtctgaacgcgaaataaagaaatcctctcaaaaaaaaaaaaaaaaaa

SEQ ID NO: 2546 - DNA, 7473 bp, Homo sapiens
ctcgcggccggcgaggggctgagctgacagggccgcatcggcttaccccaccttactttatcggaacgtgcctaagctgctgcagctggcacccggttgcgctcggcgaagagggctgggggcgggagatgacggtggtcttctccctgcttggcaccctgcgagcaccagctcccttctcctcgccactccaaggttgcagacgaagcaggtactgtcctagatgttaaggacacaacattgagcaaaaacatgcatagtccctgcttccgtgacacttgagtgaactgaatgtgcaaagtccctgtggcacaaagtccctggggccagtgtgtgtggcgggtgtagaaggagctaaagagatctggttggagttggagggtgagagaaaatgaattctaatttacctgcagagaacttaaccattgcagtcaatatgaccaagactttgcctacagcagtaacgcatggatttaattccactaatgacccaccttcaatgtcaattacaaggctttttccagccttactggaatgctttggcattgtcctttgtggctacatagcaggaagggccaatgtcataacatcaacccaggccaaaggactaggaaattttgtctccagatttgcacttccagctttattattcaaaaacatggttgtacttaatttttccaatgtggactggtccttcctatatagtatcttaattgccaaagcttctgtatttttcattgtatgtgtattaaccttattggttgccagtcctgatagtcgatttagcaaagctggactattccctatttttgctacacaaagtaatgactttgcattgggataccctatagttgaagctttatatcaaactacatacccagaatatctccagtacatttatttggtggcaccaatatctcttatgatgttaaaccctatagggtttattttctgtgaaatccaaaagtggaaagacactcaaaatgcttctcaaaataaaataaaaattgtgggactcggactcctgcgtgtattacagaacccaatagtatttatggtcttcattggcatcgccttcaattttattcttgatcgaaaggtacctgtatatgtcgaaaattttcttgatggacttggaaattctttttctggatcagccctattttatcttggtctcacgatggtgggaaaaataaagagactgaagaagtcggcatttgtagtactaattcttctcatcacagctaaacttctggtgctgccacttctgtgcagagaaatggtggaactcttggacaagggcgacagtgtggtgaaccatacaagtttatcaaattatgcatttctgtatggtgtatttcctgtagcaccaggagtggctatctttgcaacacaattcaacatggaagtagaaattataacctcagggatggtgataagcacatttgtgtctgctcccatcatgtacgtttctgcctggttactgacctttcccactatggaccctaagccattggcatatgccatccagaatgttagttttgatataagtattgtcagcctgatctccttgatctggtctctggctattcttcttttgagtaagaaatataaacagcttcctcatatgcttacaactaatttactcattgctcagtctattgtctgtgctggaatgatgatatggaattttgttaaagaaaaaaattttgttggacaaattttggtgtttgttctattgtacagctccctctatagcacctacctgtggacaggccttctagcaatttctttgtttcttttgaaaaagcgagagagggtacaaattcctgttggaataatcataatatctggctggggaattcctgctctccttgttggtgttcttttgataactggaaaacacaatggagatagcattgactcagccttcttttatggaaaagaacagatgatcaccacagcagtcaccctgttctgcagcatcctgatagctggcatatccctcatgtgcatgaaccagactgcccaagcaggaagctatgaaggtttcgatcagtctcagagccacaaagtggtggagcctggaaatactgcttttgaggagagtccagcaccagtaaatgaaccagaactttttacaagctctattccagaaacaagttgctgctcctgctccatgggaaatggtgaattacactgcccatcaatagagccaatagcaaacacaagcaccagtgagcctgtgattccttcgtttgagaaaaacaatcattgtgtgagtcgctgtaactcccagagctgcatattagcccaggaagaagaacagtatctacagagtggagaccagcaactgacccgacatgtgttgctgtgtttacttctcatcattggcctgttcgctaatctttccagttgtttatggtggctattcaaccaagagcctggaagactttatgttgagttacagtttttctgtgccgtgtttaactttggtcagggatttatttcctttggaatctttggattagataaacatttaatcatcctgcctttcaaaagaagacttgaattcctatggaacaataaagacacagcagaaaacagggattctcctgtttcagaggaaataaaaatgacctgtcaacaatttatccattatcaccgtgacctctgtatccgaaacattgtcaaagaaagaaggtgtggtgcaaagacttctgctggaactttctgtggctgtgacctggtgagctggctaattgaagtcggccttgcctccgaccgtggtgaagctgtgatatacggagacaggctggtacaagggggagtcatccaacatattaccaacgagtatgaattccgggatgagtacttgttttacagatttcttcaaaagagtcctgaacagagtcctcctgctattaatgcaaacactctccaacaggaaagatataaagaaattgagcattcatccccaccctcacattcccctaagacctaaattatgcaggggagaaccctacatggaatcatattctagccgcgtattcattagtttttagctgggtgaccttgggcaagttaacagaggcaacctctctgagcctcagttgtctcttctgtaaaatgtgaaaagatgtgctcccaccacatgcgcagggtctgtgattttacatgtatgtaaaacacataggaagctgacttaggaaaaagagaaaaccaaattaaagttctgataatgaatataatatagtcatcctttagtatccaaggggattggttccaggactcctgaagatcccaaaatctgaggatactcaagtcccttatataaaatggtgtaggccgggcatggtggctcacgcctgtaatcccagtactttgggaggccgagtcaggtggatcacctgaggtcaggagttcaagaccagcctggccaacatggcgaaaccccgtctctactataaaatacaaaaaattagttgggtgtggtggcgggtgcctgtaatcccagctactcaggaggctgaggcaggagaatcgcttgaatctgggaggcagaggttgctgtgagccgagatcgtgccactgcactccagcctgagcaacagagcaagactctatctcaaaaataaaataaaataaaataaaataattaataaaatggtgtagtatttgcatataacctatgcacattctcccatatagtttaatcatctttagatacttataatgcctaatacaatgtaaatgctatgtaaatagttgttgttatactgtattgtttagggaataacaataagaaaaacagtctgtacatgttcactacagatgcaaccattgttaagcctgactacatctttttatctgcggttgattgaatctatggatgtggaacctgtgcatatggagggtcaactgtactataaataatacgaatatgccaacattatataatcattgctttctgcaactgtttactataatttcaaaattaatatcctattaactgttcctataaattatcaaatttggcaagtgtattactagcaggagatggaccttaaattatgacaactttatattttttgatagcatctcttgaaaaagaattttaatgattctaataagaggttctttttcttttttccatttccttgacaaatagtactcatttaaaaactagagggctaggcttagtggctcacgcctgtaatctcagcactttgggaggctgaggcgggcagatcgcttgaggtcaggagttcaagaccagcccgggcaacgtggtgaaacccggtctgtactaaaaaaaaaaaaaaagaaaaagaaaaagaaaaaagaatacccaggtgtggtagtgcatgcctgtagtcccagctactttggagactgaggtgggagtaccccttgagcctgggaggcgcaggttgcagtgaaccaagatcacatcactgcacttcaacctgggtgacagagcaagaccctgtctcaaaaacaaaaaacaagcaaaaaaaacctagaggcactatttttttttaaagtttgtcttttcttttctacccaaattactaatctatgccattaaggaaaggaataagaacctccatatgtattattatctccacagtcctgcagaagtacaatctgatctttaactttcatgctacaaataataatttgagtagattaatttgaattttatcaacaaaattattgccatatgatgtatcatttctgtgtttgaacaaagcatcgtaatgcaggataacttctactttattccctgtagttaaaaaaaaaaaaactatatagttcaagccaatatttaaaaattctaaacctaggctgggcatggtgactcatacctgtaatcccagcactttgggaggccgaggcaggtgaattgcttcagcccaggagttcgagaccagcctggccaatgtggtgaaaccccatctctactaaaaaaaaaaaaaaaaaaaaaaattagccaggtgtggtggtgtgcacctgtaatcccagctacccaggaggctgaggcaggaaaattgcttgaaaccaggaggcagaggttgcagtgagctgagatcgtgccactgcactccagcctgagtgtcagagtgagactctgtctcagaaaaaaaaaaaaaaattctaaagattacatttagaatttagtctttttaaagtgtccatgtataaaaatatataatttttaaaattactaaatgttgccttttctcttagtctaatattttagctactaaaacaaaatataaactggatagcttataaacaacataaacttatttctcacagttttggaggctgtgaagtccaagattaaggcactaacagatctagtgtctggtaaggcaaatttctggctcatagatggtaccttcttgctgtgtccccacatggtagatgggaagaactggtctcattggccccttataaggacattaattccactcaataggctccaccctcatgatctaataacctctcaaaggccctacctcctaatactaacacattgaggatgtgacttcaactttacatttctacaggcagagaagtggggctgtgtaaattcttcccatcagtacttgaatgttcatttaacaaataacttatcgagcatctagcatgttccagacacaatctgaacactgagcacacaacagttggaacaaatatgattcctatcctcatggagcttctattctcctgtgaaaaacagatgttaaacatgattgaggattaggtttcaacataagaattctaggaggacacagacatttagaccatagcatcttcaggtaaactttatcttcagtaaattaaagagatctatttagatgacctttgagcatcttaattattagatgtcagtgctagtttaacttattttaaacgtttcagatatttatttaattatactttaagtgtctcatgtaaaaaagttatttataaaataatttatagggttagagtcattgcccttttaatgcaacaaataaacagttttttaaaaacctgcatgggggccaggcgcggtggttcatacctgcaatcccagcactttgggaggtcgaggctggcggatcacgaggtcaggagatcgagaccaccctgattaatgcggtgaaatcccgtctctactaaaaatacaaaaaattagccagacgtggtggtgggcacctatagtcccagctactcgggaggctgaggcaggagaatggcatgaacccggaaggcggagcttgcagtgaaccaagatcgcgccactgcactccagcctgggcgacagagtgagactccatcgcaaaaaaaaaaaaaaaaaaacctgcatggaagcctagtatatttattaataacaaataaattatactttagtgtactattaacctataccaattttaagttgtgattagggaatggggatgtttttaagctgaattgtcttgctgcggaactttccttttttaataagaccatattatgactctgaatgctcaagggtaagtctaaggcctcattgctgttaccaggagatttttctagttacagtaataaagatgttaattcacatgcatgcagacaactgaaactcaagtggagaatttgtttgtgaacaagtcatactacttctgttatttgcatgaatggaatctgcaatatctttttccatgggagaccctaaaagaaaaccctggatcagaatgatctgcagtttcagataataaaggcttttaagagacatttttagaattaaaaatatgctaattttattaaatgaaaatatttgtaactgttaactttctcactgacaaagcaagtttctcaataaaatacctattttaacttgcattactgacatcttttctttgagtaatctgaataatgcagaagccatcatagaggtcttttctatacattctcaatgttttcttaaatgggtttcctgagttctgttcttcatgactctgggctctgcaaacagggtttcccaattacgcattctataaacacttttatgaatgagtcaatatgacattgagtccttttcatacatttcatcatttccaatatgtagagtgacagctagaaaaatgataaaattttgattaaaacctatctctttttcttcagcatagtcaattgttttcttaactctcaatgagtaactccatgcctagcttgtgcttagctttcaatatttttagactaagacaaagtgtatttggcattttgagaacaacaattaatggtcagtaaatttctaaagcaagaaaaatgtgaaactagtgttttatatgtttgttacgcagcagaatgcggctcttagtgtttgccccttcatatctcatcatgtaaaatattaaattactttaggccactgcacataggtagtcctgtcatgagtgatggctggagaaaagttcaggatcataaatgtta

SEQ ID NO: 2547 - DNA, 7324 bp, Homo sapiens
ctcgcggccggcgaggggctgagctgacagggccgcatcggcttaccccaccttactttatcggaacgtgcctaagctgctgcagctggcacccggttgcgctcggcgaagagggctgggggcgggagatgacggtggtcttctccctgcttggcaccctgcgagcaccagctcccttctcctcgccactccaaggttgcagacgaagcagagatctggttggagttggagggtgagagaaaatgaattctaatttacctgcagagaacttaaccattgcagtcaatatgaccaagactttgcctacagcagtaacgcatggatttaattccactaatgacccaccttcaatgtcaattacaaggctttttccagccttactggaatgctttggcattgtcctttgtggctacatagcaggaagggccaatgtcataacatcaacccaggccaaaggactaggaaattttgtctccagatttgcacttccagctttattattcaaaaacatggttgtacttaatttttccaatgtggactggtccttcctatatagtatcttaattgccaaagcttctgtatttttcattgtatgtgtattaaccttattggttgccagtcctgatagtcgatttagcaaagctggactattccctatttttgctacacaaagtaatgactttgcattgggataccctatagttgaagctttatatcaaactacatacccagaatatctccagtacatttatttggtggcaccaatatctcttatgatgttaaaccctatagggtttattttctgtgaaatccaaaagtggaaagacactcaaaatgcttctcaaaataaaataaaaattgtgggactcggactcctgcgtgtattacagaacccaatagtatttatggtcttcattggcatcgccttcaattttattcttgatcgaaaggtacctgtatatgtcgaaaattttcttgatggacttggaaattctttttctggatcagccctattttatcttggtctcacgatggtgggaaaaataaagagactgaagaagtcggcatttgtagtactaattcttctcatcacagctaaacttctggtgctgccacttctgtgcagagaaatggtggaactcttggacaagggcgacagtgtggtgaaccatacaagtttatcaaattatgcatttctgtatggtgtatttcctgtagcaccaggagtggctatctttgcaacacaattcaacatggaagtagaaattataacctcagggatggtgataagcacatttgtgtctgctcccatcatgtacgtttctgcctggttactgacctttcccactatggaccctaagccattggcatatgccatccagaatgttagttttgatataagtattgtcagcctgatctccttgatctggtctctggctattcttcttttgagtaagaaatataaacagcttcctcatatgcttacaactaatttactcattgctcagtctattgtctgtgctggaatgatgatatggaattttgttaaagaaaaaaattttgttggacaaattttggtgtttgttctattgtacagctccctctatagcacctacctgtggacaggccttctagcaatttctttgtttcttttgaaaaagcgagagagggtacaaattcctgttggaataatcataatatctggctggggaattcctgctctccttgttggtgttcttttgataactggaaaacacaatggagatagcattgactcagccttcttttatggaaaagaacagatgatcaccacagcagtcaccctgttctgcagcatcctgatagctggcatatccctcatgtgcatgaaccagactgcccaagcaggaagctatgaaggtttcgatcagtctcagagccacaaagtggtggagcctggaaatactgcttttgaggagagtccagcaccagtaaatgaaccagaactttttacaagctctattccagaaacaagttgctgctcctgctccatgggaaatggtgaattacactgcccatcaatagagccaatagcaaacacaagcaccagtgagcctgtgattccttcgtttgagaaaaacaatcattgtgtgagtcgctgtaactcccagagctgcatattagcccaggaagaagaacagtatctacagagtggagaccagcaactgacccgacatgtgttgctgtgtttacttctcatcattggcctgttcgctaatctttccagttgtttatggtggctattcaaccaagagcctggaagactttatgttgagttacagtttttctgtgccgtgtttaactttggtcagggatttatttcctttggaatctttggattagataaacatttaatcatcctgcctttcaaaagaagacttgaattcctatggaacaataaagacacagcagaaaacagggattctcctgtttcagaggaaataaaaatgacctgtcaacaatttatccattatcaccgtgacctctgtatccgaaacattgtcaaagaaagaaggtgtggtgcaaagacttctgctggaactttctgtggctgtgacctggtgagctggctaattgaagtcggccttgcctccgaccgtggtgaagctgtgatatacggagacaggctggtacaagggggagtcatccaacatattaccaacgagtatgaattccgggatgagtacttgttttacagatttcttcaaaagagtcctgaacagagtcctcctgctattaatgcaaacactctccaacaggaaagatataaagaaattgagcattcatccccaccctcacattcccctaagacctaaattatgcaggggagaaccctacatggaatcatattctagccgcgtattcattagtttttagctgggtgaccttgggcaagttaacagaggcaacctctctgagcctcagttgtctcttctgtaaaatgtgaaaagatgtgctcccaccacatgcgcagggtctgtgattttacatgtatgtaaaacacataggaagctgacttaggaaaaagagaaaaccaaattaaagttctgataatgaatataatatagtcatcctttagtatccaaggggattggttccaggactcctgaagatcccaaaatctgaggatactcaagtcccttatataaaatggtgtaggccgggcatggtggctcacgcctgtaatcccagtactttgggaggccgagtcaggtggatcacctgaggtcaggagttcaagaccagcctggccaacatggcgaaaccccgtctctactataaaatacaaaaaattagttgggtgtggtggcgggtgcctgtaatcccagctactcaggaggctgaggcaggagaatcgcttgaatctgggaggcagaggttgctgtgagccgagatcgtgccactgcactccagcctgagcaacagagcaagactctatctcaaaaataaaataaaataaaataaaataattaataaaatggtgtagtatttgcatataacctatgcacattctcccatatagtttaatcatctttagatacttataatgcctaatacaatgtaaatgctatgtaaatagttgttgttatactgtattgtttagggaataacaataagaaaaacagtctgtacatgttcactacagatgcaaccattgttaagcctgactacatctttttatctgcggttgattgaatctatggatgtggaacctgtgcatatggagggtcaactgtactataaataatacgaatatgccaacattatataatcattgctttctgcaactgtttactataatttcaaaattaatatcctattaactgttcctataaattatcaaatttggcaagtgtattactagcaggagatggaccttaaattatgacaactttatattttttgatagcatctcttgaaaaagaattttaatgattctaataagaggttctttttcttttttccatttccttgacaaatagtactcatttaaaaactagagggctaggcttagtggctcacgcctgtaatctcagcactttgggaggctgaggcgggcagatcgcttgaggtcaggagttcaagaccagcccgggcaacgtggtgaaacccggtctgtactaaaaaaaaaaaaaaagaaaaagaaaaagaaaaaagaatacccaggtgtggtagtgcatgcctgtagtcccagctactttggagactgaggtgggagtaccccttgagcctgggaggcgcaggttgcagtgaaccaagatcacatcactgcacttcaacctgggtgacagagcaagaccctgtctcaaaaacaaaaaacaagcaaaaaaaacctagaggcactatttttttttaaagtttgtcttttcttttctacccaaattactaatctatgccattaaggaaaggaataagaacctccatatgtattattatctccacagtcctgcagaagtacaatctgatctttaactttcatgctacaaataataatttgagtagattaatttgaattttatcaacaaaattattgccatatgatgtatcatttctgtgtttgaacaaagcatcgtaatgcaggataacttctactttattccctgtagttaaaaaaaaaaaaactatatagttcaagccaatatttaaaaattctaaacctaggctgggcatggtgactcatacctgtaatcccagcactttgggaggccgaggcaggtgaattgcttcagcccaggagttcgagaccagcctggccaatgtggtgaaaccccatctctactaaaaaaaaaaaaaaaaaaaaaaattagccaggtgtggtggtgtgcacctgtaatcccagctacccaggaggctgaggcaggaaaattgcttgaaaccaggaggcagaggttgcagtgagctgagatcgtgccactgcactccagcctgagtgtcagagtgagactctgtctcagaaaaaaaaaaaaaaattctaaagattacatttagaatttagtctttttaaagtgtccatgtataaaaatatataatttttaaaattactaaatgttgccttttctcttagtctaatattttagctactaaaacaaaatataaactggatagcttataaacaacataaacttatttctcacagttttggaggctgtgaagtccaagattaaggcactaacagatctagtgtctggtaaggcaaatttctggctcatagatggtaccttcttgctgtgtccccacatggtagatgggaagaactggtctcattggccccttataaggacattaattccactcaataggctccaccctcatgatctaataacctctcaaaggccctacctcctaatactaacacattgaggatgtgacttcaactttacatttctacaggcagagaagtggggctgtgtaaattcttcccatcagtacttgaatgttcatttaacaaataacttatcgagcatctagcatgttccagacacaatctgaacactgagcacacaacagttggaacaaatatgattcctatcctcatggagcttctattctcctgtgaaaaacagatgttaaacatgattgaggattaggtttcaacataagaattctaggaggacacagacatttagaccatagcatcttcaggtaaactttatcttcagtaaattaaagagatctatttagatgacctttgagcatcttaattattagatgtcagtgctagtttaacttattttaaacgtttcagatatttatttaattatactttaagtgtctcatgtaaaaaagttatttataaaataatttatagggttagagtcattgcccttttaatgcaacaaataaacagttttttaaaaacctgcatgggggccaggcgcggtggttcatacctgcaatcccagcactttgggaggtcgaggctggcggatcacgaggtcaggagatcgagaccaccctgattaatgcggtgaaatcccgtctctactaaaaatacaaaaaattagccagacgtggtggtgggcacctatagtcccagctactcgggaggctgaggcaggagaatggcatgaacccggaaggcggagcttgcagtgaaccaagatcgcgccactgcactccagcctgggcgacagagtgagactccatcgcaaaaaaaaaaaaaaaaaaacctgcatggaagcctagtatatttattaataacaaataaattatactttagtgtactattaacctataccaattttaagttgtgattagggaatggggatgtttttaagctgaattgtcttgctgcggaactttccttttttaataagaccatattatgactctgaatgctcaagggtaagtctaaggcctcattgctgttaccaggagatttttctagttacagtaataaagatgttaattcacatgcatgcagacaactgaaactcaagtggagaatttgtttgtgaacaagtcatactacttctgttatttgcatgaatggaatctgcaatatctttttccatgggagaccctaaaagaaaaccctggatcagaatgatctgcagtttcagataataaaggcttttaagagacatttttagaattaaaaatatgctaattttattaaatgaaaatatttgtaactgttaactttctcactgacaaagcaagtttctcaataaaatacctattttaacttgcattactgacatcttttctttgagtaatctgaataatgcagaagccatcatagaggtcttttctatacattctcaatgttttcttaaatgggtttcctgagttctgttcttcatgactctgggctctgcaaacagggtttcccaattacgcattctataaacacttttatgaatgagtcaatatgacattgagtccttttcatacatttcatcatttccaatatgtagagtgacagctagaaaaatgataaaattttgattaaaacctatctctttttcttcagcatagtcaattgttttcttaactctcaatgagtaactccatgcctagcttgtgcttagctttcaatatttttagactaagacaaagtgtatttggcattttgagaacaacaattaatggtcagtaaatttctaaagcaagaaaaatgtgaaactagtgttttatatgtttgttacgcagcagaatgcggctcttagtgtttgccccttcatatctcatcatgtaaaatattaaattactttaggccactgcacataggtagtcctgtcatgagtgatggctggagaaaagttcaggatcataaatgtta

SEQ ID NO: 2548 - DNA, 832 bp, Homo sapiens
cgcccgtcgggggcgcgtctctttcagcagccaatgggctctgcccaccttcgtcctcgtcagcattttgtctaatcgcggcctgtgacgctcgaagggcggggagcagagggagatacagaaaccgacaggggccaggcgcccggtggctccgaagcggggaagtgggacaagatggtttacatctcgaacggacaagtgttggacagccggagtcagtctccatggagattatctttgataacagatttcttctggggaatagctgagtttgtggttttgtttttcaaaactctgcttcagcaagatgtgaaaaaaagaagaagctatggaaactcatctgattccagatatgatgatggaagagggccaccaggaaaccctccccgaagaatgggtagaatcaatcatctgcgtggccctagtccccctccaatggctggtggatgaggaaggtaaatgtctgctctaagaagcagacaaccggacatgcgcattcatagcagaaggaaaccatcaagaagtggaaggctgaccatgatgagcagtagatgaatgtgtatgtctaaacaaggactgctctgtgtcctcacagatgaatgaggtcatgctgggaattccctctgcagggaactggcctgactgacatgcagttccataaatgcagatgtttgtctcattacctttttgtatagtttattaaagtattaatatagttttaataagtaaatatttttaggttgcagaatggactcctcatctttatattcacgaaaaagcaatctgaagaaaacaaataaaagcctgtgtatttagcaaaaaaaaaaaaaaa

SEQ ID NO: 2549 - DNA, 1643 bp, Homo sapiens
gccctctggcggctccggaccacaggccgagttactctgattaccgccatgctccaagacccgcactgacagtccccacgtgagggaccgcggtgggagtcctaaatgggggaggaggggacgggcggcactgtgcatctgctgtgcctcgcggcctccagcggggtccccctattctgcaggagcagtcgcggcggcgcccccgcccgtcagcagctcccgttctctgtcatcggttccctcaatggagtccacatgtttgggcagaatctggaggtgcagctgagctctgcgaggaccgagaacacgactgtggtgtggaaaagcttccatgacagcatcaccctcattgttctgtcatctgaggtgggcatctctgagctgaggctggagagactactccaaatggtgtttggagccatggtccttcttgtgggacttgaagaactgaccaatatccgcaacgtggagagactgaagaaggacttgagggccagttattgcctcatcgacagcttcctgggggactcggagctcatcggggacctgacccagtgtgtggactgcgtgattcctccagaggggtccctcttgcaggaagccctctccgggttcgctgaggccgcgggcacgaccttcgtcagtctggtggtgtccggccgggtggtggcagcaacagagggttggtggcggctggggacgcccgaggccgtgctgctcccctggctggtggggtccctgccgccgcagaccgctcgcgactacccggtgtacctgccgcacgggagccccacggtcccacaccggctcctgaccctgactctgctgccgagcctggagctgtgtctactctgcgggccgagcccacccctcagccagttgtatccacagcttctggagcgctggtggcagccactgctggacccgttgcgggcctgtctgccgttgggaccccgggcgctgcccagtggcttcccccttcacacagacatcctcgggctgctgctcctccacctggaactgaagcgctgcctcttcaccgtggagcccttgggggataaagagccttcaccagaacagcgccggcgcctcctccgaaacttctataccctggtcacctccacgcacttcccaccagagccagggccaccagagaagacagaagatgaggtctaccaggcccagctgcccagagcttgctacctggtgttggggactgaggaaccaggcacaggagtgcgtctggtggccttgcagctggggcttcggcggctgctgctgctgctgtctccccagagtcccacccatgggctgcgaagcctggccacccacactctgcatgccctcaccccacttctttgactacctagcagtgggtgatggacacagacatggggctgttagcgtctctctgtttattcgctcacaataatacacagcccctggatggggagggggtaggaggggctacaacagggtggggtgggaggggaggagacatccacttccctggcccctctcccctctgtgcttgggggggaaagggagggagggggactccccctaaccccccagaatgtaaacagcagcagatgaacaaaaataaaaatacaaaaggccgaaaaaaaaaaaaaaaaaaaaaa

SEQ ID NO: 2550 - DNA, 1509 bp, Homo sapiens
cgatcgcgtcgggcagcgggcgcggcggccccgcgcagccatggactggctcatggggaagtccaaagccaagcccaatggcaagaagcccgctgcggaggagaggaaggcctacctggagcctgagcacaccaaggccaggatcaccgacttccagttcaaggagctggtggtgctgccccgcgagattgaccttaacgagtggctggccagcaacaccacgacgtttttccaccacatcaacctgcagtatagcaccatctcggagttctgcacaggagagacgtgtcagacgatggccgtgtgcaacacacagtactactggtatgacgagcgggggaagaaggtcaagtgcacggccccacagtacgttgacttcgtcatgagctccgtgcagaagctggtgacggatgaggacgtgttccccacaaaatacggcagagaattccccagctcctttgagtccctggtgaggaagatctgcagacacctgttccacgtgctggcacacatctactgggcccacttcaaggagacgctggccctggagctgcacggacacttgaacacgctctacgtccacttcatcctctttgctcgggagttcaacctgctggaccccaaagagaccgccatcatggacgacctcaccgaggtgctatgcagcggggccggcggggtccacagtgggggcagtggggatggggccggcagcgggggcccgggagcacagaaccacgtgaaggagagatgagccccccgggccggacaggggcacacgtgtgcaaagagacggtggtgtgtgttctctcctgcatctgcgtgtgcacacatgtgctgggcacgcgtgtggtgaggtctgagagggccccgggctgcactggtgtgggctgcacaggcacagacgcagacggccccggccgtgtcctgtggccccctgtcggatggatgcgtgccgtttgtagagaagagcctttgggcccattcactcgttcagcagacacgcatgggactgatgctttgagttttcttctgtggggttttcctttctctggtctccgtgcagcccctgccctccctcgggtgctgctggcctcaaaggaggaactcgtggggggagggtgtgatttgcagacctgggtctctgctctgctctgggggtggggcttgctttcacagagaccctccttccctctcacccctcctctcccggcctcgccaggagtcttggctgttggcagctcagaggtgggggaggcctgtggtgtgaggtgccctgcacctgctcctgctcctgtcaccccttcctgctgcctcctccatgcccaaggaacacccatggtgcagtcctcaggcaaggccaggacggggctgaggccctgcgtggagatgctgcaccagcggaaggctgagacccgcttaccttagttcatctgttcactcgtaataaaaagaattctctctaaaaaaaaaaaaaaaaaaaaaaaaaaaaaaaaaaaaaaaaaaaaa

SEQ ID NO: 2551 - DNA, 8025 bp, Homo sapiens
cggcgctgctggaagatggcgagcggccgggacgagcggccgccttggcggctagggcggctcctgttgctcatgtgcctgctgctgctggggagctcggcccgggcggctcacatcaagaaggcggaggcgactaccacaactacgagcgcgggcgccgaggcggccgagggccagttcgaccgctactaccacgaagaggagttggagtcggcgctgagggaggcggcggccgcgggcctccccggcctggcccgcctctttagcatcggccgctcggtggaaggccggccgctgtgggtgcttcgcctcaccgccggcctggggtcgctaatccctgagggcgacgcggggcctgacgctgccgggcccgacgctgcggggccgctgctgcccggccggccccaggtgaagctggtgggcaacatgcatggcgacgagaccgtgtcgcgccaggtgttgatctacttggcccgcgagctggcggccggctaccgccgcggggacccgcgcctggtccgcctgctcaacaccaccgacgtgtacctgctgcccagcctcaaccccgatggcttcgagcgtgcccgcgagggcgactgtggcttcggcgacggcggcccgtccggggccagcggccgcgacaatagtcgcggccgcgacctcaaccgaagctttcccgaccagtttagcaccggcgaaccccccgccctggacgaggtgcccgaggtgcgcgccctcatcgagtggatccgcaggaacaagtttgtgctttctggaaatctgcatggtggctcagtggtagcaagctatccttttgatgattctccagaacataaggccactggaatctatagcaaaacctcagatgatgaagtatttaaatacttggcaaaagcttatgcttcaaaccaccccataatgaaaactggtgagcctcattgtccaggagatgaagacgagactttcaaagatggaatcacaaacggcgcacattggtatgatgtggaaggtggtatgcaagattacaattatgtgtgggccaactgttttgagatcacattagaactgtcttgttgcaagtacccacctgcttcacagcttcgacaggaatgggagaacaatcgtgagtctttgatcacattgattgaaaaggttcacattggagtgaaaggatttgttaaagattccataacaggatctgggttagagaatgcaaccatctcagtggctggtattaatcataatatcacaacaggcagatttggtgatttctaccgattacttgttcctggaacttacaaccttacagtagttttaactgggtatatgccattgactgttactaatgtagtggtgaaagaaggaccagccacagaggtggatttttctcttaggccaactgtaacttcagtaatccctgacacgacagaggctgtatcaactgctagcacagttgctatacctaatattctttctggaacatcatcctcctaccagccaattcagccaaaggactttcaccaccaccatttccctgatatggaaatcttcttgagaaggtttgccaatgaatatcctaacattacccggctttattccttgggaaaatcagtagagtcaagagaactttatgtgatggagatatctgataatccgggtgtccatgaaccaggtgaaccagaatttaagtacattggaaatatgcatggaaatgaagtggttggaagagaactgctgttgaacctcatagaatacctttgtaagaactttggaacagaccctgaagtcacagatttggttcataacactagaattcaccttatgccatccatgaatcctgatgggtatgaaaagtcccaggaaggagattcaataagtgtaattggcagaaacaacagcaacaactttgacctgaaccgaaatttcccagaccagtttgttcagatcacagatcctacgcaaccagaaactattgctgtaatgagctggatgaagtcctatccatttgtactttcagcaaacctgcatggaggttctttggtggttaactacccttttgatgatgatgaacaaggacttgccacatatagtaaatcaccagatgatgctgtgttccaacaaatagcactttcttattccaaggaaaattcccagatgtttcaaggtagaccttgcaagaatatgtatcctaatgaatattttcctcatggaataacaaatggagctagttggtataatgtgccaggaggaatgcaggactggaactatttacaaacaaattgctttgaagtgactattgaactaggttgtgtgaaatatccacttgagaaagagctgccaaacttttgggaacagaatcgaagatcactaatccagtttatgaaacaggttcatcagggcgtcagaggatttgttctagatgccacagatggcaggggtatattaaatgccaccattagtgttgctgagattaatcacccagtgactacttacaaaactggagattactggcgtctcttggttccaggaacttataaaatcacagcatctgctcgagggtataatccagttaccaagaatgtgactgtcaagagtgaaggcgctattcaggtcaacttcacacttgttcgatcctcaacagattcaaacaatgaatcaaagaaaggaaaaggggctagcagcagcaccaatgatgccagtgatccaactactaaagagtttgaaactttaattaaagacctttcagcggagaatggtttggaaagcctcatgttacgctcctcctcaaatctggctctggctctttatcgataccattcctacaaagacttatcagagtttctgagaggacttgtaatgaactatccacatattacaaatcttaccaatttgggacagagcactgaatatcgtcacatttggtcccttgaaatctccaataagcccaatgtatctgagcctgaagaaccaaagattcgttttgttgctggtatccatggaaatgcgccagttggaactgaactgcttttggctctggcagaatttctctgcctgaactacaaaaagaacccagctgttacccaattggttgacaggactaggattgtgattgtcccttctctaaatccagatgggcgagagagagctcaagagaaagactgtacttcaaaaataggacaaacaaatgctcgtggcaaagatttggatacagacttcacaaataatgcctcccaacctgagaccaaagccatcattgaaaatttgattcaaaaacaggactttagtctttctgttgccttagatggtggttccatgctggtcacatatccttatgacaagccagtacagacagtggaaaataaagagactctgaagcatttggcatctctttatgcaaataatcatccatccatgcacatgggtcagcccagttgcccaaataaatcagatgagaatattccaggaggagtaatgcgtggagcagaatggcatagtcacctgggcagcatgaaggattatagtgtcacctatggccattgtccggaaatcacagtatacacaagctgctgttactttcctagtgctgcacgactcccttccttgtgggcagacaataagagatctcttcttagtatgttagtggaggttcacaagggagttcatggatttgttaaagataagactggaaagccaatctctaaagcagtcattgtacttaatgaaggaataaaggtacaaacaaaagagggaggttatttccatgtactcttagcgccaggtgtccataacattattgccatcgctgatgggtaccagcaacaacattcacaggtctttgtgcatcatgatgcagctagttctgtggtgatagtctttgacacagataaccggatatttggtttgccaagggagcttgtggtaactgtatcaggtgctactatgtcggcattgatcctaacagcttgcattatttggtgcatctgctcaatcaagtctaatagacacaaggatggctttcatcggctcaggcagcatcatgatgagtatgaagatgaaattcgcatgatgtctaccggctccaagaagtccctcctaagccatgagttccaggatgaaacagacactgaagaggaaacattatattctagcaaacattgaaaaacacattttgcatatctcccagcataagtaccaagcaaaattacagttcctcttgggagaacactgcattaagaagagagactctcttgcttcttcaaagagctttgggaaattaaattgctaaatttgtattctctgtgaatttcactggcagttttgaacttcccttccttaaagtactctaaacctttaaaaaaaaatctgatttatgcagcagagatgggacagccactttttctttttaatttaagatgagctatttggagcttatgtaataatggcataaagccaactagaggatgttgtattttgcacatcagatgtttactagtggctttagtatttttctttgttttaaatggccaaaagaatccagaaacattaaggcagggacagcagtcagaatcgacataaagctttaaaaactcaaggttttttcaacctactgaggagtacttttctctagttgttaaatagctggagtttttcttattcaggtttaatggaggttgaattgatttttaaacacatataacagtaggaaatgaataaatgggcttctgcatttggctttctacctgttccaaggctagatcggaactggtagactacgctgtaagcaggatttcactacctctcttaaggtttagcaaacttctaaatagcccattttaagggagaacttactaactttattgtgaaaggtctaaatgcccacttgaatgaagctgagagagagatctagcaaaagctaaaactcatgttgtctatctttgaacttggtaaaaacccacaggtgctgctgcttatatctgtgaagcactagcttattctaggaatgcctgattctttaatattgcctaaatcggaacctttttctatgttgcacacatggttttcagatgacccagccatctacaagatctgaattctactgaaaatatctagaaatgtggaagagacctacttgcacattcttaacctgtatttgaacacaaaatatctatacttcatgctccagcccaagcctataccctgtaatagcatactattattgaaatcgcttgaccggtcttgttcacataggcctctgggagtgatttggttctttgccctaatgtttcatttgacggtctctttttgatcaaccaatttttctaaaagttcagtcgaaagcttttaagtatagcttcctcccttgaaaaaaaatgtaaactatgactgctgagtgataaaacactgtggtgtgaaagtgtcatcttcactgccaatcaggcaaagaccggaaagatttgcattttattatgtctgtcttatcatgcaatggaaatgatgctttttgtaagtatgcatcttaccaatgatgtaacggtttaatacctttgaatgttttaataaccaagttgctgctgaacttatactaaatcaggggaccaaaaaacttgctcttatcttctcaaattgtattctatatccattaatgtatcagttatcccaaagccttcaggtggaggggtttaccaccttcctaggtcgttcaaccaggttttgtgaggaatgcattcaaagtggctttataaaagaagattttctttagcaagaataatgaggtcatgtcatttgttaataagtatctgtgataaatccgtggttcaaggttaagccattctggtattctggtattagcaactgtaaattctgccacctcatacatggaacagagcttgtgggatgctaatagttagtgaagtatacatgatttaatttctaataatctttatgttttctttaaggatggtggtgtattgctctttttcagctttatttttaagagtacagtcaggaaaccaacaaggggcctaagagtggctgcccctgcttgggacattacagcaagtgaaacaaagttaatgtgacaagctttgctttgttatcattggtcttcactagaggataccttttacatgtacttctctcttggatcaaatatgtctttaactgtacatctcagtggctggaggccatgccttttaagcatgtgtaaaatttttaaagaaatgaacatacacatagttattttagtaatatttcctgaaagaaaaaccaaattctgctataagtcttgatcttcaatgaacttttaaataatgcatttagctggaaaacaagactttcccagcttgtattacctagaagcgtgaatgtataggatacctgactactaagactatattctcagccctgccctgtcttttatttgcgggtctaatctaatattagaatatattaaccgcttaaggcattgaagccatatgggatggggaatgcatttcttcagtgtttctccgagagactttccatttccttggagttatggcggcaagtaagtatcatagtattaagaaatttgcctaaatctgagttgtgcctttctttactcacaaggcatgggctttgtcctggtgatcagtttgtaagccttcttccttcccagctccttaataaaagcaaagtgattgagtaggtaatgttcaaagtgtctgcctgtgtacatgtacttgtattgattatgtagttcagtaagatgtgcccaagtcatttcagaaagaaagacccttcagttttgatgcattttgctgaacacttgggtagtgagtgggatcctatccagttgaggaatgcttgcaatgctcattgaagggatttgctttgggactttgtcatcttccagaaaggaaacatattgtatatttggcccagtgtgattgattgctttatctttggtaacttttacttgaatgggatttgctgaattaatgactattgaatttaaaactaattatgagttgacaaataaataaaaggtagtgtttatgtctgagcttattgtgtttgagctaacaccaggttactcagtaaccatgacctgctcctccatttccatttattctcaacattaaatagttttatcttgttgttgccagaaatgcacttgtgccaggtattgtccctgctgtatgaaaagcttcttggcaatgaattctgtaatagtgccctacattatggttttctggtggaattgttttaacagtgacaacccaggatttccaatatatttttgttttattgttattaccaaaaattccactatgattgatgttcagtgattttctatagcaacttttttggtaactctttgggtttctgatttgttttagctaaaattttggggatatgatttgggtctttgattaatgtcagctgaacttggatttctagttcatgaagaaatctctcccaatacccatttatcctatttttagcaataattcgttaatgattccacttgattttcagaatattgtcctggttgattttgatttgacagcatacattatgaaatttgaaagtaggttaccattttgaggcagttggatataaattatgtaaatatgtatgattatgatttttataaatggcataacatgagtgtactaactaccttctatgctggccatgctacagattttctggaggtatgacaatagtatttttttatgctcagattaaaaatcagcttttcacctctccagtttttccaagtgatactcccagttctagagcaatctacagctgtttatgtgaggtgcccaacacccattcatctcaagtgcttcagtctttggtttatttcatgcactgtgccttcaaaatgaaatttttaaaagggactttaaatgaagttgaatagtagtttttaaaagtcaatttgtaatttatgtgaaatctaactgtaatgaggtcctttctgttttttatatgtaaacagatctactaatcctgtataaaagttattttacgatg

SEQ ID NO: 2552 - DNA, 3402 bp, Homo sapiens
gacggcgacgcggcgcaggcggcgggagtgcgagctgggcccgtgtttcggccgccgccatggccgcggtggacctggagaagctgcgggcgtcgggcgcgggcaaggccatcggcgtcctgaccagcggcggcgacgcgcaaggtcccctgacaagcccaccaggccccctgctgagatggctgtgaccctgggctgacccgcccagtggcacattgactccgcctggagctggggagaccagagaggccctgtggttggacggtggcctgggtgcgctgctcctgccctctccttgccctgcctcagctgctgcctgccagaggcgtggcacctcacctcacacctgctccctgctgctgagccccacgccaagctggagagcggatgagaagcatgtgtaaccagggtagaggtcgagagtcctctcgtgggggtctccatgttcaagggagctgccgaggcttgagcaggagcccccagcaggaaactggctttgccaaggcccccgctgggacagactgtttctttcactgcagtcctgggagccgagggcaaggggacaggaaagaggaagtgacctcagagcctggtggcaccagcatcatgtccaggctggggggcatgaacgctgctgtccgggctgtgacgcgcatgggcatttatgtgggtgccaaagtcttcctcatctacgagggctatgagggcctcgtggagggaggtgagaacatcaagcaggccaactggctgagcgtctccaacatcatccagctgggcggcactatcattggcagcgctcgctgcaaggcctttaccaccagggaggggcgccgggcagcggcctacaacctggtccagcacggcatcaccaacctgtgcgtcatcggcggggatggcagcctcacaggtgccaacatcttccgcagcgagtggggcagcctgctggaggagctggtggcggaaggtaagatctcagagactacagcccggacctactcgcacctgaacatcgcgggcctagtgggctccatcgataacgacttctgcggcaccgacatgaccatcggcacggactcggccctccaccgcatcatggaggtcatcgatgccatcaccaccactgcccagagccaccagaggaccttcgtgctggaagtgatgggccggcactgcgggtacctggcgctggtatctgcactggcctcaggggccgactggctgttcatccccgaggctccacccgaggacggctgggagaacttcatgtgtgagaggctgggtgagactcggagccgtgggtcccgactgaacatcatcatcatcgctgagggtgccattgaccgcaacgggaagcccatctcgtccagctacgtgaaggacctggtggttcagaggctgggcttcgacacccgtgtaactgtgctgggccacgtgcagcggggagggacgccctctgccttcgaccggatcctgagcagcaagatgggcatggaggcggtgatggcgctgctggaagccacgcctgacacgccggcctgcgtggtcaccctctcggggaaccagtcagtgcggctgcccctcatggagtgcgtgcagatgaccaaggaagtgcagaaagccatggatgacaagaggtttgacgaggccacccagctccgtggtgggagcttcgagaacaactggaacatttacaagctcctcgcccaccagaagccccccaaggagaagtctaacttctccctggccatcctgaatgtgggggccccggcggctggcatgaatgcggccgtgcgctcggcggtgcggaccggcatctcccatggacacacagtatacgtggtgcacgatggcttcgaaggcctagccaagggtcaggtgcaagaagtaggctggcacgacgtggccggctggttggggcgtggtggctccatgctggggaccaagaggaccctgcccaagggccagctggagtccattgtggagaacatccgcatctatggtattcacgccctgctggtggtcggtgggtttgaggcctatgaaggggtgctgcagctggtggaggctcgcgggcgctacgaggagctctgcatcgtcatgtgtgtcatcccagccaccatcagcaacaacgtccctggcaccgacttcagcctgggctccgacactgctgtaaatgccgccatggagagctgtgaccgcatcaaacagtctgcctcggggaccaagcgccgtgtgttcatcgtggagaccatggggggttactgtggctacctggccaccgtgactggcattgctgtgggggccgacgccgcctacgtcttcgaggaccctttcaacatccacgacttaaaggtcaacgtggagcacatgacggagaagatgaagacagacattcagaggggcctggtgctgcggaacgagaagtgccatgactactacaccacggagttcctgtacaacctgtactcatcagagggcaagggcgtcttcgactgcaggaccaatgtcctgggccacctgcagcagggtggcgctccaaccccctttgaccggaactatgggaccaagctgggggtgaaggccatgctgtggttgtcggagaagctgcgcgaggtttaccgcaagggacgggtgttcgccaatgccccagactcggcctgcgtgatcggcctgaagaagaaggcggtggccttcagccccgtcactgagctcaagaaagacactgatttcgagcaccgcatgccacgggagcagtggtggctgagcctgcggctcatgctgaagatgctggcacaataccgcatcagtatggccgcctacgtgtcaggggagctggagcacgtgacccgccgcaccctgagcatggacaagggcttctgaggccagccatgcccacgcccctccccagcccccacccatgccagcgcagcgccagggctcagatggggcctgggctgttgtgtctggagcctgcaggcaggtgggggctgcgtccctgctcagcccatcccctgcctctatccctggccacctgccaggcctccctcgggctggtgtcttgagaccagcctgccaggccctccagcaggaggacagagtgccctggggcatccaccttcctgcccaggggacgtggcgctgtcggtgtttggaggctgctgccccctggctttggcgccccatgggccctcagcgtctccccatgctgggctcactacatgggccagcccttgctctacctggccggtaggctgctggcgcctaggttgtgttgagagggggatgcccctggccctgcctcactgtgacctgctcctgcccacgtgcagcacctgtcaccttttctagaaataaaatcaccctgactgtggggtgcatcggtctccggagaaaacaaaaaaa

SEQ ID NO: 2553 - DNA, 2924 bp, Homo sapiens
gacggcgacgcggcgcaggcggcgggagtgcgagctgggcccgtgtttcggccgccgccatggccgcggtggacctggagaagctgcgggcgtcgggcgcgggcaaggccatcggcgtcctgaccagcggcggcgacgcgcaaggcatgaacgctgctgtccgggctgtgacgcgcatgggcatttatgtgggtgccaaagtcttcctcatctacgagggctatgagggcctcgtggagggaggtgagaacatcaagcaggccaactggctgagcgtctccaacatcatccagctgggcggcactatcattggcagcgctcgctgcaaggcctttaccaccagggaggggcgccgggcagcggcctacaacctggtccagcacggcatcaccaacctgtgcgtcatcggcggggatggcagcctcacaggtgccaacatcttccgcagcgagtggggcagcctgctggaggagctggtggcggaaggtaagatctcagagactacagcccggacctactcgcacctgaacatcgcgggcctagtgggctccatcgataacgacttctgcggcaccgacatgaccatcggcacggactcggccctccaccgcatcatggaggtcatcgatgccatcaccaccactgcccagagccaccagaggaccttcgtgctggaagtgatgggccggcactgcgggtacctggcgctggtatctgcactggcctcaggggccgactggctgttcatccccgaggctccacccgaggacggctgggagaacttcatgtgtgagaggctgggtgagactcggagccgtgggtcccgactgaacatcatcatcatcgctgagggtgccattgaccgcaacgggaagcccatctcgtccagctacgtgaaggacctggtggttcagaggctgggcttcgacacccgtgtaactgtgctgggccacgtgcagcggggagggacgccctctgccttcgaccggatcctgagcagcaagatgggcatggaggcggtgatggcgctgctggaagccacgcctgacacgccggcctgcgtggtcaccctctcggggaaccagtcagtgcggctgcccctcatggagtgcgtgcagatgaccaaggaagtgcagaaagccatggatgacaagaggtttgacgaggccacccagctccgtggtgggagcttcgagaacaactggaacatttacaagctcctcgcccaccagaagccccccaaggagaagtctaacttctccctggccatcctgaatgtgggggccccggcggctggcatgaatgcggccgtgcgctcggcggtgcggaccggcatctcccatggacacacagtatacgtggtgcacgatggcttcgaaggcctagccaagggtcaggtgcaagaagtaggctggcacgacgtggccggctggttggggcgtggtggctccatgctggggaccaagaggaccctgcccaagggccagctggagtccattgtggagaacatccgcatctatggtattcacgccctgctggtggtcggtgggtttgaggcctatgaaggggtgctgcagctggtggaggctcgcgggcgctacgaggagctctgcatcgtcatgtgtgtcatcccagccaccatcagcaacaacgtccctggcaccgacttcagcctgggctccgacactgctgtaaatgccgccatggagagctgtgaccgcatcaaacagtctgcctcggggaccaagcgccgtgtgttcatcgtggagaccatggggggttactgtggctacctggccaccgtgactggcattgctgtgggggccgacgccgcctacgtcttcgaggaccctttcaacatccacgacttaaaggtcaacgtggagcacatgacggagaagatgaagacagacattcagaggggcctggtgctgcggaacgagaagtgccatgactactacaccacggagttcctgtacaacctgtactcatcagagggcaagggcgtcttcgactgcaggaccaatgtcctgggccacctgcagcagggtggcgctccaaccccctttgaccggaactatgggaccaagctgggggtgaaggccatgctgtggttgtcggagaagctgcgcgaggtttaccgcaagggacgggtgttcgccaatgccccagactcggcctgcgtgatcggcctgaagaagaaggcggtggccttcagccccgtcactgagctcaagaaagacactgatttcgagcaccgcatgccacgggagcagtggtggctgagcctgcggctcatgctgaagatgctggcacaataccgcatcagtatggccgcctacgtgtcaggggagctggagcacgtgacccgccgcaccctgagcatggacaagggcttctgaggccagccatgcccacgcccctccccagcccccacccatgccagcgcagcgccagggctcagatggggcctgggctgttgtgtctggagcctgcaggcaggtgggggctgcgtccctgctcagcccatcccctgcctctatccctggccacctgccaggcctccctcgggctggtgtcttgagaccagcctgccaggccctccagcaggaggacagagtgccctggggcatccaccttcctgcccaggggacgtggcgctgtcggtgtttggaggctgctgccccctggctttggcgccccatgggccctcagcgtctccccatgctgggctcactacatgggccagcccttgctctacctggccggtaggctgctggcgcctaggttgtgttgagagggggatgcccctggccctgcctcactgtgacctgctcctgcccacgtgcagcacctgtcaccttttctagaaataaaatcaccctgactgtggggtgcatcggtctccggagaaaacaaaaaaa

SEQ ID NO: 2554 - DNA, 2386 bp, Homo sapiens
accaagtgaggaaactgggggacgctgtggggaggggcgtggggctggatcgcgcagcggctgcttcctttaccttcctcccatggtctccttccggttctcgatgcttctctgagcctaagggtttccgccactcgttcaccctccccccagctcatgatcttcctccctcccccgccctcctggtccaatctccgatctgtttagtaagaaggtgctgttccgagaaggagaaggaaaagggcttgacacgtattcactcggccccggacgtgggaagcaagccgtctggcttcggcctcacatcggtcctgtgctcgggacggcggcgttggcggactgatccgcggcggtgaagaggcgcctgtgtctggcagagctggtgtgagacgagacaatcctgccccgccgccgggataatcaagagttttggccggacctttgagcatacaccgagagagtgaggagccagacgacaagcacacactatggcgctgaaacggattaataaggaacttagtgatttggcccgtgaccctccagcacaatgttctgcaggtccagttggggatgatatgtttcattggcaagccacaattatgggacctaatgacagcccatatcaaggcggtgtattctttttgacaattcattttcctacagactaccccttcaaaccacctaaggttgcatttacaacaagaatttatcatccaaatattaacagtaatggcagcatttgtctcgatattctaagatcacagtggtcgcctgctttaacaatttctaaagttcttttatccatttgttcactgctatgtgatccaaacccagatgaccccctagtgccagagattgcacggatctataaaacagacagagataagtacaacagaatatctcgggaatggactcagaagtatgccatgtgatgctaccttaaagtcagaataacctgcattatagctggaataaactttaaattactgttccttttttgattttcttatccggctgctcccctatcagacctcatcttttttaattttattttttgtttacctccctccattcattcacatgctcatctgagaagacttaagttcttccagctttggacaataactgcttttagaaactgtaaagtagttacaagagaacagttgcccaagactcagaatttttaaaaaaaaaaatggagcatgtgtattatgtggccaatgtcttcactctaacttggttatgagactaaaaccattcctcactgctctaacatgctgaagaaatcatctgagggggagggagatggatgctcagttgtcacatcaaaggatacagcattattctagcagcatccattcttgtttaagccttccactgttagagatttgaggttacatgatatgctttatgctcataactgatgtggctggagaattggtattgaatttatagcatcagcagaacagaaaatgtgatgtattttatgcatgtcaataaaggaatgacctgttcttgttctacagagaatggaaattggaagtcaaacaccctttgtattccaaaatagggtctcaaacattttgtaattttcatttaaattgttaggaggcttggagctattagttaatctatcttccaatacactgtttaatatagcactgaataaatgatgcaagttgtcaatggatgagtgatcaactaatagctctgctagtaattgatttatttttcttcaataaagttgcataaaccaatgagttagctgcctggattaatcagtatgggaaacaatcttttgtaaatgcaaagctgttttttgtatatactgttgggatttgcttcattgtttgacatcaaatgatgatgtaaagttcgaaagagtgaatattttgccatgttcagttaaagtgcacagtctgttacaggttgacacattgcttgacctgatttatgcagaattaataagctatttggatagtgtagctttaatgtgctgcacatgatactggcagccctagagttcatagatggacttttgggacccagcagttttgaaatgtgtttatggagtttaagaaatttattttccaggtgcagcccctgtctaactgaaatttctcttcaccttgtacacttgacagctgaaaaaaaacaacatgggagtaataatgggtcaaaatttgcaaaataaagtactgttttggtgtgggagttgtcatgaggctgtgttgaagtgacttatctatgtgggatattgagtatccattgaaatggatttgttcagccatttacattaatgagcatttaaatgcaacagatatcatttcaggtgacttaacatgaatgaataaaagtcaatgctattggaaaaaaaaaaaaaaaa

SEQ ID NO: 2555 - DNA, 2594 bp, Homo sapiens
accaagtgaggaaactgggggacgctgtggggaggggcgtggggctggatcgcgcagcggctgcttcctttaccttcctcccatggtctccttccggttctcgatgcttctctgagcctaagggtttccgccactcgttcaccctccccccagctcatgatcttcctccctcccccgccctcctggtccaatctccgatctgtttagtaagaaggtgctgttccgagaaggagaaggaaaagggcttgacacgtattcactcggccccggacgtgggaagcaagccgtctggcttcggcctcacatcggtcctgtgctcgggacggcggcgttggcggactgatccgcggcggtgaagagaggccgggaagttaaacttgtagccaccacctccgctcttcccgtcaccctcgcccccacttcgggccgaaagcacggtacagaggctgttggtggctttgccacgccaccccacccaccccggatcgcggctgtcttaagggacctggattcatcaggggctcttcggggcctgtgcgagtgctgatctgctccgtttttgcaaaaggcgcctgtgtctggcagagctggtgtgagacgagacaatcctgccccgccgccgggataatcaagagttttggccggacctttgagcatacaccgagagagtgaggagccagacgacaagcacacactatggcgctgaaacggattaataaggaacttagtgatttggcccgtgaccctccagcacaatgttctgcaggtccagttggggatgatatgtttcattggcaagccacaattatgggacctaatgacagcccatatcaaggcggtgtattctttttgacaattcattttcctacagactaccccttcaaaccacctaaggttgcatttacaacaagaatttatcatccaaatattaacagtaatggcagcatttgtctcgatattctaagatcacagtggtcgcctgctttaacaatttctaaagttcttttatccatttgttcactgctatgtgatccaaacccagatgaccccctagtgccagagattgcacggatctataaaacagacagagataagtacaacagaatatctcgggaatggactcagaagtatgccatgtgatgctaccttaaagtcagaataacctgcattatagctggaataaactttaaattactgttccttttttgattttcttatccggctgctcccctatcagacctcatcttttttaattttattttttgtttacctccctccattcattcacatgctcatctgagaagacttaagttcttccagctttggacaataactgcttttagaaactgtaaagtagttacaagagaacagttgcccaagactcagaatttttaaaaaaaaaaatggagcatgtgtattatgtggccaatgtcttcactctaacttggttatgagactaaaaccattcctcactgctctaacatgctgaagaaatcatctgagggggagggagatggatgctcagttgtcacatcaaaggatacagcattattctagcagcatccattcttgtttaagccttccactgttagagatttgaggttacatgatatgctttatgctcataactgatgtggctggagaattggtattgaatttatagcatcagcagaacagaaaatgtgatgtattttatgcatgtcaataaaggaatgacctgttcttgttctacagagaatggaaattggaagtcaaacaccctttgtattccaaaatagggtctcaaacattttgtaattttcatttaaattgttaggaggcttggagctattagttaatctatcttccaatacactgtttaatatagcactgaataaatgatgcaagttgtcaatggatgagtgatcaactaatagctctgctagtaattgatttatttttcttcaataaagttgcataaaccaatgagttagctgcctggattaatcagtatgggaaacaatcttttgtaaatgcaaagctgttttttgtatatactgttgggatttgcttcattgtttgacatcaaatgatgatgtaaagttcgaaagagtgaatattttgccatgttcagttaaagtgcacagtctgttacaggttgacacattgcttgacctgatttatgcagaattaataagctatttggatagtgtagctttaatgtgctgcacatgatactggcagccctagagttcatagatggacttttgggacccagcagttttgaaatgtgtttatggagtttaagaaatttattttccaggtgcagcccctgtctaactgaaatttctcttcaccttgtacacttgacagctgaaaaaaaacaacatgggagtaataatgggtcaaaatttgcaaaataaagtactgttttggtgtgggagttgtcatgaggctgtgttgaagtgacttatctatgtgggatattgagtatccattgaaatggatttgttcagccatttacattaatgagcatttaaatgcaacagatatcatttcaggtgacttaacatgaatgaataaaagtcaatgctattggaaaaaaaaaaaaaaaa

SEQ ID NO: 2556 - DNA, 2359 bp, Homo sapiens
agttccgtcagagcggacatcttgtggctgtgtcgtgcgcgtgagccccgtagggccggggaggcaccagctgccgcgcggggaggaggccgaggccgcagcttgagggaggccccggcccctctaggccgggaagttaaacttgtagccaccacctccgctcttcccgtcaccctcgcccccacttcgggccgaaagcacggtacagaggctgttggtggctttgccacgccaccccacccaccccggatcgcggctgtcttaagggacctggattcatcaggggctcttcggggcctgtgcgagtgctgatctgctccgtttttgcaaaaggcgcctgtgtctggcagagctggtgtgagacgagacaatcctgccccgccgccgggataatcaagagttttggccggacctttgagcatacaccgagagagtgaggagccagacgacaagcacacactatggcgctgaaacggattaataaggaacttagtgatttggcccgtgaccctccagcacaatgttctgcaggtccagttggggatgatatgtttcattggcaagccacaattatgggacctaatgacagcccatatcaaggcggtgtattctttttgacaattcattttcctacagactaccccttcaaaccacctaaggttgcatttacaacaagaatttatcatccaaatattaacagtaatggcagcatttgtctcgatattctaagatcacagtggtcgcctgctttaacaatttctaaagttcttttatccatttgttcactgctatgtgatccaaacccagatgaccccctagtgccagagattgcacggatctataaaacagacagagataagtacaacagaatatctcgggaatggactcagaagtatgccatgtgatgctaccttaaagtcagaataacctgcattatagctggaataaactttaaattactgttccttttttgattttcttatccggctgctcccctatcagacctcatcttttttaattttattttttgtttacctccctccattcattcacatgctcatctgagaagacttaagttcttccagctttggacaataactgcttttagaaactgtaaagtagttacaagagaacagttgcccaagactcagaatttttaaaaaaaaaaatggagcatgtgtattatgtggccaatgtcttcactctaacttggttatgagactaaaaccattcctcactgctctaacatgctgaagaaatcatctgagggggagggagatggatgctcagttgtcacatcaaaggatacagcattattctagcagcatccattcttgtttaagccttccactgttagagatttgaggttacatgatatgctttatgctcataactgatgtggctggagaattggtattgaatttatagcatcagcagaacagaaaatgtgatgtattttatgcatgtcaataaaggaatgacctgttcttgttctacagagaatggaaattggaagtcaaacaccctttgtattccaaaatagggtctcaaacattttgtaattttcatttaaattgttaggaggcttggagctattagttaatctatcttccaatacactgtttaatatagcactgaataaatgatgcaagttgtcaatggatgagtgatcaactaatagctctgctagtaattgatttatttttcttcaataaagttgcataaaccaatgagttagctgcctggattaatcagtatgggaaacaatcttttgtaaatgcaaagctgttttttgtatatactgttgggatttgcttcattgtttgacatcaaatgatgatgtaaagttcgaaagagtgaatattttgccatgttcagttaaagtgcacagtctgttacaggttgacacattgcttgacctgatttatgcagaattaataagctatttggatagtgtagctttaatgtgctgcacatgatactggcagccctagagttcatagatggacttttgggacccagcagttttgaaatgtgtttatggagtttaagaaatttattttccaggtgcagcccctgtctaactgaaatttctcttcaccttgtacacttgacagctgaaaaaaaacaacatgggagtaataatgggtcaaaatttgcaaaataaagtactgttttggtgtgggagttgtcatgaggctgtgttgaagtgacttatctatgtgggatattgagtatccattgaaatggatttgttcagccatttacattaatgagcatttaaatgcaacagatatcatttcaggtgacttaacatgaatgaataaaagtcaatgctattggaaaaaaaaaaaaaaaa

SEQ ID NO: 2557 - DNA, 2240 bp, Homo sapiens
accaagtgaggaaactgggggacgctgtggggaggggcgtggggctggatcgcgcagcggctgcttcctttaccttcctcccatggtctccttccggttctcgatgcttctctgagcctaagggtttccgccactcgttcaccctccccccagctcatgatcttcctccctcccccgccctcctggtccaatctccgatctgtttagtaagaaggcgcctgtgtctggcagagctggtgtgagacgagacaatcctgccccgccgccgggataatcaagagttttggccggacctttgagcatacaccgagagagtgaggagccagacgacaagcacacactatggcgctgaaacggattaataaggaacttagtgatttggcccgtgaccctccagcacaatgttctgcaggtccagttggggatgatatgtttcattggcaagccacaattatgggacctaatgacagcccatatcaaggcggtgtattctttttgacaattcattttcctacagactaccccttcaaaccacctaaggttgcatttacaacaagaatttatcatccaaatattaacagtaatggcagcatttgtctcgatattctaagatcacagtggtcgcctgctttaacaatttctaaagttcttttatccatttgttcactgctatgtgatccaaacccagatgaccccctagtgccagagattgcacggatctataaaacagacagagataagtacaacagaatatctcgggaatggactcagaagtatgccatgtgatgctaccttaaagtcagaataacctgcattatagctggaataaactttaaattactgttccttttttgattttcttatccggctgctcccctatcagacctcatcttttttaattttattttttgtttacctccctccattcattcacatgctcatctgagaagacttaagttcttccagctttggacaataactgcttttagaaactgtaaagtagttacaagagaacagttgcccaagactcagaatttttaaaaaaaaaaatggagcatgtgtattatgtggccaatgtcttcactctaacttggttatgagactaaaaccattcctcactgctctaacatgctgaagaaatcatctgagggggagggagatggatgctcagttgtcacatcaaaggatacagcattattctagcagcatccattcttgtttaagccttccactgttagagatttgaggttacatgatatgctttatgctcataactgatgtggctggagaattggtattgaatttatagcatcagcagaacagaaaatgtgatgtattttatgcatgtcaataaaggaatgacctgttcttgttctacagagaatggaaattggaagtcaaacaccctttgtattccaaaatagggtctcaaacattttgtaattttcatttaaattgttaggaggcttggagctattagttaatctatcttccaatacactgtttaatatagcactgaataaatgatgcaagttgtcaatggatgagtgatcaactaatagctctgctagtaattgatttatttttcttcaataaagttgcataaaccaatgagttagctgcctggattaatcagtatgggaaacaatcttttgtaaatgcaaagctgttttttgtatatactgttgggatttgcttcattgtttgacatcaaatgatgatgtaaagttcgaaagagtgaatattttgccatgttcagttaaagtgcacagtctgttacaggttgacacattgcttgacctgatttatgcagaattaataagctatttggatagtgtagctttaatgtgctgcacatgatactggcagccctagagttcatagatggacttttgggacccagcagttttgaaatgtgtttatggagtttaagaaatttattttccaggtgcagcccctgtctaactgaaatttctcttcaccttgtacacttgacagctgaaaaaaaacaacatgggagtaataatgggtcaaaatttgcaaaataaagtactgttttggtgtgggagttgtcatgaggctgtgttgaagtgacttatctatgtgggatattgagtatccattgaaatggatttgttcagccatttacattaatgagcatttaaatgcaacagatatcatttcaggtgacttaacatgaatgaataaaagtcaatgctattggaaaaaaaaaaaaaaaa

SEQ ID NO: 2558 - DNA, 2233 bp, Homo sapiens
ggcataagcattcaggggcgttgctttcctggcagtggcccgccccagttcgagccggtgccttactgcgtctcgcgagaacttatgcattttggaggcggaaccccgtcaggaaaagcgcacaaaactgctcttaagtcattgcagagctaccgcttcggttagccagccacgaagttctcgcgagagtcgtctcctcgataccaagcgcctgtgtctggcagagctggtgtgagacgagacaatcctgccccgccgccgggataatcaagagttttggccggacctttgagcatacaccgagagagtgaggagccagacgacaagcacacactatggcgctgaaacggattaataaggaacttagtgatttggcccgtgaccctccagcacaatgttctgcaggtccagttggggatgatatgtttcattggcaagccacaattatgggacctaatgacagcccatatcaaggcggtgtattctttttgacaattcattttcctacagactaccccttcaaaccacctaaggttgcatttacaacaagaatttatcatccaaatattaacagtaatggcagcatttgtctcgatattctaagatcacagtggtcgcctgctttaacaatttctaaagttcttttatccatttgttcactgctatgtgatccaaacccagatgaccccctagtgccagagattgcacggatctataaaacagacagagataagtacaacagaatatctcgggaatggactcagaagtatgccatgtgatgctaccttaaagtcagaataacctgcattatagctggaataaactttaaattactgttccttttttgattttcttatccggctgctcccctatcagacctcatcttttttaattttattttttgtttacctccctccattcattcacatgctcatctgagaagacttaagttcttccagctttggacaataactgcttttagaaactgtaaagtagttacaagagaacagttgcccaagactcagaatttttaaaaaaaaaaatggagcatgtgtattatgtggccaatgtcttcactctaacttggttatgagactaaaaccattcctcactgctctaacatgctgaagaaatcatctgagggggagggagatggatgctcagttgtcacatcaaaggatacagcattattctagcagcatccattcttgtttaagccttccactgttagagatttgaggttacatgatatgctttatgctcataactgatgtggctggagaattggtattgaatttatagcatcagcagaacagaaaatgtgatgtattttatgcatgtcaataaaggaatgacctgttcttgttctacagagaatggaaattggaagtcaaacaccctttgtattccaaaatagggtctcaaacattttgtaattttcatttaaattgttaggaggcttggagctattagttaatctatcttccaatacactgtttaatatagcactgaataaatgatgcaagttgtcaatggatgagtgatcaactaatagctctgctagtaattgatttatttttcttcaataaagttgcataaaccaatgagttagctgcctggattaatcagtatgggaaacaatcttttgtaaatgcaaagctgttttttgtatatactgttgggatttgcttcattgtttgacatcaaatgatgatgtaaagttcgaaagagtgaatattttgccatgttcagttaaagtgcacagtctgttacaggttgacacattgcttgacctgatttatgcagaattaataagctatttggatagtgtagctttaatgtgctgcacatgatactggcagccctagagttcatagatggacttttgggacccagcagttttgaaatgtgtttatggagtttaagaaatttattttccaggtgcagcccctgtctaactgaaatttctcttcaccttgtacacttgacagctgaaaaaaaacaacatgggagtaataatgggtcaaaatttgcaaaataaagtactgttttggtgtgggagttgtcatgaggctgtgttgaagtgacttatctatgtgggatattgagtatccattgaaatggatttgttcagccatttacattaatgagcatttaaatgcaacagatatcatttcaggtgacttaacatgaatgaataaaagtcaatgctattggaaaaaaaaaaaaaaaa

SEQ ID NO: 2559 - DNA, 2187 bp, Homo sapiens
gggaactggcgggtagcgaggccctcctcggaatctcgtgtgaaggtggccctcctcttgggcctttaacgtctgtagatgctggagaccagcagaaaggatactgtgtgcgatgagataagcatgtgagaatgctttctaaccgaaagtgcctttcaaaagcgcctgtgtctggcagagctggtgtgagacgagacaatcctgccccgccgccgggataatcaagagttttggccggacctttgagcatacaccgagagagtgaggagccagacgacaagcacacactatggcgctgaaacggattaataaggaacttagtgatttggcccgtgaccctccagcacaatgttctgcaggtccagttggggatgatatgtttcattggcaagccacaattatgggacctaatgacagcccatatcaaggcggtgtattctttttgacaattcattttcctacagactaccccttcaaaccacctaaggttgcatttacaacaagaatttatcatccaaatattaacagtaatggcagcatttgtctcgatattctaagatcacagtggtcgcctgctttaacaatttctaaagttcttttatccatttgttcactgctatgtgatccaaacccagatgaccccctagtgccagagattgcacggatctataaaacagacagagataagtacaacagaatatctcgggaatggactcagaagtatgccatgtgatgctaccttaaagtcagaataacctgcattatagctggaataaactttaaattactgttccttttttgattttcttatccggctgctcccctatcagacctcatcttttttaattttattttttgtttacctccctccattcattcacatgctcatctgagaagacttaagttcttccagctttggacaataactgcttttagaaactgtaaagtagttacaagagaacagttgcccaagactcagaatttttaaaaaaaaaaatggagcatgtgtattatgtggccaatgtcttcactctaacttggttatgagactaaaaccattcctcactgctctaacatgctgaagaaatcatctgagggggagggagatggatgctcagttgtcacatcaaaggatacagcattattctagcagcatccattcttgtttaagccttccactgttagagatttgaggttacatgatatgctttatgctcataactgatgtggctggagaattggtattgaatttatagcatcagcagaacagaaaatgtgatgtattttatgcatgtcaataaaggaatgacctgttcttgttctacagagaatggaaattggaagtcaaacaccctttgtattccaaaatagggtctcaaacattttgtaattttcatttaaattgttaggaggcttggagctattagttaatctatcttccaatacactgtttaatatagcactgaataaatgatgcaagttgtcaatggatgagtgatcaactaatagctctgctagtaattgatttatttttcttcaataaagttgcataaaccaatgagttagctgcctggattaatcagtatgggaaacaatcttttgtaaatgcaaagctgttttttgtatatactgttgggatttgcttcattgtttgacatcaaatgatgatgtaaagttcgaaagagtgaatattttgccatgttcagttaaagtgcacagtctgttacaggttgacacattgcttgacctgatttatgcagaattaataagctatttggatagtgtagctttaatgtgctgcacatgatactggcagccctagagttcatagatggacttttgggacccagcagttttgaaatgtgtttatggagtttaagaaatttattttccaggtgcagcccctgtctaactgaaatttctcttcaccttgtacacttgacagctgaaaaaaaacaacatgggagtaataatgggtcaaaatttgcaaaataaagtactgttttggtgtgggagttgtcatgaggctgtgttgaagtgacttatctatgtgggatattgagtatccattgaaatggatttgttcagccatttacattaatgagcatttaaatgcaacagatatcatttcaggtgacttaacatgaatgaataaaagtcaatgctattggaaaaaaaaaaaaaaaa

SEQ ID NO: 2560 - DNA, 2151 bp, Homo sapiens
agttccgtcagagcggacatcttgtggctgtgtcgtgcgcgtgagccccgtagggccggggaggcaccagctgccgcgcggggaggaggccgaggccgcagcttgagggaggccccggcccctctgcgcctgtgtctggcagagctggtgtgagacgagacaatcctgccccgccgccgggataatcaagagttttggccggacctttgagcatacaccgagagagtgaggagccagacgacaagcacacactatggcgctgaaacggattaataaggaacttagtgatttggcccgtgaccctccagcacaatgttctgcaggtccagttggggatgatatgtttcattggcaagccacaattatgggacctaatgacagcccatatcaaggcggtgtattctttttgacaattcattttcctacagactaccccttcaaaccacctaaggttgcatttacaacaagaatttatcatccaaatattaacagtaatggcagcatttgtctcgatattctaagatcacagtggtcgcctgctttaacaatttctaaagttcttttatccatttgttcactgctatgtgatccaaacccagatgaccccctagtgccagagattgcacggatctataaaacagacagagataagtacaacagaatatctcgggaatggactcagaagtatgccatgtgatgctaccttaaagtcagaataacctgcattatagctggaataaactttaaattactgttccttttttgattttcttatccggctgctcccctatcagacctcatcttttttaattttattttttgtttacctccctccattcattcacatgctcatctgagaagacttaagttcttccagctttggacaataactgcttttagaaactgtaaagtagttacaagagaacagttgcccaagactcagaatttttaaaaaaaaaaatggagcatgtgtattatgtggccaatgtcttcactctaacttggttatgagactaaaaccattcctcactgctctaacatgctgaagaaatcatctgagggggagggagatggatgctcagttgtcacatcaaaggatacagcattattctagcagcatccattcttgtttaagccttccactgttagagatttgaggttacatgatatgctttatgctcataactgatgtggctggagaattggtattgaatttatagcatcagcagaacagaaaatgtgatgtattttatgcatgtcaataaaggaatgacctgttcttgttctacagagaatggaaattggaagtcaaacaccctttgtattccaaaatagggtctcaaacattttgtaattttcatttaaattgttaggaggcttggagctattagttaatctatcttccaatacactgtttaatatagcactgaataaatgatgcaagttgtcaatggatgagtgatcaactaatagctctgctagtaattgatttatttttcttcaataaagttgcataaaccaatgagttagctgcctggattaatcagtatgggaaacaatcttttgtaaatgcaaagctgttttttgtatatactgttgggatttgcttcattgtttgacatcaaatgatgatgtaaagttcgaaagagtgaatattttgccatgttcagttaaagtgcacagtctgttacaggttgacacattgcttgacctgatttatgcagaattaataagctatttggatagtgtagctttaatgtgctgcacatgatactggcagccctagagttcatagatggacttttgggacccagcagttttgaaatgtgtttatggagtttaagaaatttattttccaggtgcagcccctgtctaactgaaatttctcttcaccttgtacacttgacagctgaaaaaaaacaacatgggagtaataatgggtcaaaatttgcaaaataaagtactgttttggtgtgggagttgtcatgaggctgtgttgaagtgacttatctatgtgggatattgagtatccattgaaatggatttgttcagccatttacattaatgagcatttaaatgcaacagatatcatttcaggtgacttaacatgaatgaataaaagtcaatgctattggaaaaaaaaaaaaaaaa

SEQ ID NO: 2561 - DNA, 2576 bp, Homo sapiens
gtcaggggtgacacagaatagctcgctgcgaggatagcaatacacatcaagtctcccttcctttatttctttccttttcccggccgcacctttggacagaaaccgaaagcagcccggcgtccgtccggagtcttatgcttccccctccccccttgcctttctttgccctagtgacgccggtatagcgccgactaggccccggctcctcctctgctgggctccggaccctgccccgcacccacccctttctcctacgcctcttcctctcccacccgggtctcttcctttctagaggccgggaagttaaacttgtagccaccacctccgctcttcccgtcaccctcgcccccacttcgggccgaaagcacggtacagaggctgttggtggctttgccacgccaccccacccaccccggatcgcggctgtcttaagggacctggattcatcaggggctcttcggggcctgtgcgagtgctgatctgctccgtttttgcaaaaggcgcctgtgtctggcagagctggtgtgagacgagacaatcctgccccgccgccgggataatcaagagttttggccggacctttgagcatacaccgagagagtgaggagccagacgacaagcacacactatggcgctgaaacggattaataaggaacttagtgatttggcccgtgaccctccagcacaatgttctgcaggtccagttggggatgatatgtttcattggcaagccacaattatgggacctaatgacagcccatatcaaggcggtgtattctttttgacaattcattttcctacagactaccccttcaaaccacctaaggttgcatttacaacaagaatttatcatccaaatattaacagtaatggcagcatttgtctcgatattctaagatcacagtggtcgcctgctttaacaatttctaaagttcttttatccatttgttcactgctatgtgatccaaacccagatgaccccctagtgccagagattgcacggatctataaaacagacagagataagtacaataggttagcaagagagtggacagagaaatacgctatgttgtagggtacaacagaatatctcgggaatggactcagaagtatgccatgtgatgctaccttaaagtcagaataacctgcattatagctggaataaactttaaattactgttccttttttgattttcttatccggctgctcccctatcagacctcatcttttttaattttattttttgtttacctccctccattcattcacatgctcatctgagaagacttaagttcttccagctttggacaataactgcttttagaaactgtaaagtagttacaagagaacagttgcccaagactcagaatttttaaaaaaaaaaatggagcatgtgtattatgtggccaatgtcttcactctaacttggttatgagactaaaaccattcctcactgctctaacatgctgaagaaatcatctgagggggagggagatggatgctcagttgtcacatcaaaggatacagcattattctagcagcatccattcttgtttaagccttccactgttagagatttgaggttacatgatatgctttatgctcataactgatgtggctggagaattggtattgaatttatagcatcagcagaacagaaaatgtgatgtattttatgcatgtcaataaaggaatgacctgttcttgttctacagagaatggaaattggaagtcaaacaccctttgtattccaaaatagggtctcaaacattttgtaattttcatttaaattgttaggaggcttggagctattagttaatctatcttccaatacactgtttaatatagcactgaataaatgatgcaagttgtcaatggatgagtgatcaactaatagctctgctagtaattgatttatttttcttcaataaagttgcataaaccaatgagttagctgcctggattaatcagtatgggaaacaatcttttgtaaatgcaaagctgttttttgtatatactgttgggatttgcttcattgtttgacatcaaatgatgatgtaaagttcgaaagagtgaatattttgccatgttcagttaaagtgcacagtctgttacaggttgacacattgcttgacctgatttatgcagaattaataagctatttggatagtgtagctttaatgtgctgcacatgatactggcagccctagagttcatagatggacttttgggacccagcagttttgaaatgtgtttatggagtttaagaaatttattttccaggtgcagcccctgtctaactgaaatttctcttcaccttgtacacttgacagctgaaaaaaaacaacatgggagtaataatgggtcaaaatttgcaaaataaagtactgttttggtgtgggagttgtcatgaggctgtgttgaagtgacttatctatgtgggatattgagtatccattgaaatggatttgttcagccatttacattaatgagcatttaaatgcaacagatatcatttcaggtgacttaacatgaatgaataaaagtcaatgctattggaaaaaaaaaaaaaaaa

SEQ ID NO: 2562 - DNA, 2006 bp, Homo sapiens
ggaatctcgtgtgaaggtggccctcctcttgggcctttaacgtctgtagatgctggagaccagcagaaaggatactgtgtgcgatgagataagcatgtgagaatgctttctaaccgaaagtgcctttcaaaagaacttagtgatttggcccgtgaccctccagcacaatgttctgcaggtccagttggggatgatatgtttcattggcaagccacaattatgggacctaatgacagcccatatcaaggcggtgtattctttttgacaattcattttcctacagactaccccttcaaaccacctaaggttgcatttacaacaagaatttatcatccaaatattaacagtaatggcagcatttgtctcgatattctaagatcacagtggtcgcctgctttaacaatttctaaagttcttttatccatttgttcactgctatgtgatccaaacccagatgaccccctagtgccagagattgcacggatctataaaacagacagagataagtacaacagaatatctcgggaatggactcagaagtatgccatgtgatgctaccttaaagtcagaataacctgcattatagctggaataaactttaaattactgttccttttttgattttcttatccggctgctcccctatcagacctcatcttttttaattttattttttgtttacctccctccattcattcacatgctcatctgagaagacttaagttcttccagctttggacaataactgcttttagaaactgtaaagtagttacaagagaacagttgcccaagactcagaatttttaaaaaaaaaaatggagcatgtgtattatgtggccaatgtcttcactctaacttggttatgagactaaaaccattcctcactgctctaacatgctgaagaaatcatctgagggggagggagatggatgctcagttgtcacatcaaaggatacagcattattctagcagcatccattcttgtttaagccttccactgttagagatttgaggttacatgatatgctttatgctcataactgatgtggctggagaattggtattgaatttatagcatcagcagaacagaaaatgtgatgtattttatgcatgtcaataaaggaatgacctgttcttgttctacagagaatggaaattggaagtcaaacaccctttgtattccaaaatagggtctcaaacattttgtaattttcatttaaattgttaggaggcttggagctattagttaatctatcttccaatacactgtttaatatagcactgaataaatgatgcaagttgtcaatggatgagtgatcaactaatagctctgctagtaattgatttatttttcttcaataaagttgcataaaccaatgagttagctgcctggattaatcagtatgggaaacaatcttttgtaaatgcaaagctgttttttgtatatactgttgggatttgcttcattgtttgacatcaaatgatgatgtaaagttcgaaagagtgaatattttgccatgttcagttaaagtgcacagtctgttacaggttgacacattgcttgacctgatttatgcagaattaataagctatttggatagtgtagctttaatgtgctgcacatgatactggcagccctagagttcatagatggacttttgggacccagcagttttgaaatgtgtttatggagtttaagaaatttattttccaggtgcagcccctgtctaactgaaatttctcttcaccttgtacacttgacagctgaaaaaaaacaacatgggagtaataatgggtcaaaatttgcaaaataaagtactgttttggtgtgggagttgtcatgaggctgtgttgaagtgacttatctatgtgggatattgagtatccattgaaatggatttgttcagccatttacattaatgagcatttaaatgcaacagatatcatttcaggtgacttaacatgaatgaataaaagtcaatgctattggaaaaaaaaaaaaaaaa

SEQ ID NO: 2563 - DNA, 2183 bp, Homo sapiens
ccaatgaggaagcctggcaggatggagggcgaggcctggcagctgtagtgcttctgggcagtagaggcgcggggtgcggagctagggcggccgagagccatggcggcgctattggcggcggcggcagtgcgagcccggatcctgcaggtttcttccaaggtgaaatccagtcccacctggtattcagcatcttccttctcttcttcagtgccaactgtaaagctcttcattggtgggaaattcgttgaatccaaaagtgacaaatggatcgatatccacaacccagccaccaatgaggtcattggtcgggtccctcaggccaccaaggcagaaatggatgcagccattgcttcctgcaaacgtgcttttcctgcatgggcagacacttcagtattaagccgccagcaggtcttgctccgctatcaacaacttattaaagaaaacttgaaagaaattgccaagttaatcacattggaacaagggaagaccctagctgatgctgaaggagatgtatttcgaggccttcaggtggttgagcatgcctgtagtgtgacatccctcatgatgggagagaccatgccatccatcaccaaagacatggacctttattcctaccgtctgcctctgggagtgtgtgcaggcattgctccattcaattttcctgccatgatccccctttggatgtttcccatggccatggtgtgtggaaataccttcctaatgaaaccatctgagcgagtccctggagcaactatgcttcttgctaagttgctccaggattctggtgcccctgatggaacattaaacatcatccatggacagcatgaagctgtaaattttatttgcgatcatccggacatcaaagcaatcagctttgtgggatccaacaaggcaggagagtatatcttcgagagaggatcaagacatggcaagagggttcaagccaatatgggagccaagaaccatggggtagtcatgccagatgccaataaggaaaataccctgaaccagctggttggggcagcatttggagctgctggtcagcgctgcatggctctttcaacagcagtccttgtgggagaagccaagaagtggctgccagagctggtggagcatgccaaaaacctgagagtcaatgcaggagatcagcctggagctgatcttggccctctgatcactccccaggccaaagagcgagtctgtaatctgattgatagtggaacaaaggagggagcttccatccttcttgatggacgaaaaattaaagtgaaaggctatgaaaatggcaactttgttggaccaaccatcatctcgaatgtcaagccaaatatgacctgttacaaagaggagatttttggtccagttcttgtggttctggagacagaaacattggatgaagccatccagattgtaaataacaacccatatggaaatggaactgccatcttcaccaccaatggagccactgctcggaaatatgcccacttggtggatgttggacaggtgggagtgaatgtccccattccagtgcctttgccaatgttctcattcaccggctctcgatcctccttcaggggagacaccaatttctatggcaaacagggcatccaattctacactcagttaaagaccattacttctcagtggaaagaagaagatgctactctttcctcacctgctgttgtcatgcctaccatgggccgttagaaacaagtttgtttaagactgactccatcctgagtaatctccctttatttttgaccagcttcatttgtcagctttgctcagatcagatcgatgggattggaatacattgtaactaaaatcttcctcaggactattaacccccgcaaagtttctatagggaactgcctagtgtaacaatgaaaccagatttctcacttgctcttcatacttctattttgaggtaactgttgtaactatgaaatgcttatctgaaagtagtgcttaaacctgatttctaaaaattatcccattttctgatgatttgaaggggagaaaagccagtgtatgtaaagaaaatgttccagccaggcgcggtggctcacgcctgtaattccatcattttgggaggccacagtgggcagattgcttgagcccaggagttgaagaacgtggcgaaaccccgtatctattatttaaaaaaattgaaaaagtaaaaa

SEQ ID NO: 2564 - DNA, 2501 bp, Homo sapiens
gaacctcctcgcgactttccaaggtatctttcagatgaaggcattgaagcttgcacaagctctccagacaaagtcaatgtaaatgacatcatcctgattgctctcaatatctgagaacaattggcaagaaattcctccccagtgacatcaatagtggaaaggtagaaaagctcgaaggtccatgtgttttgcaaattcaaaaaattcgcaatgttgctgcaccaaaggataatgaagaatctcaggctgcaccaaggatgctgcgattacagatgactgatggtcatataagttgcacagcagtagaatttagttatatgtcaaaaataagcctgaacacaccacctggaactaaagttaagctctcaggcattgttgacataaaaaatggattcctgctcttgaatgactctaacaccacagttcttggtggtgaagtggaacaccttattgagaaatgggagttacagagaagcttatcaaaacacaatagaagcaatattggaactgaaggtggaccaccgccttttgtgccttttggacagaagtgtgtatctcatgtccaagtggatagcagagaacttgatcgaagaaaaacattgcaagttacaatgcctgtcaaacctacaaatgataatgatgaatttgaaaagcaaaggacggctgctattgctgaagttgcaaagagcaaggaaaccaagacatttggaggaggtggtggtggtgctagaagtaatctcaatatgaatgctgctggtaaccgaaatagggaagttttacagaaagaaaagtcaaccaaatcagagggaaaacatgaaggtgtctatagagaactggttgatgagaaagctctgaagcacataacggaaatgggcttcagtaaggaagcatcgaggcaagctcttatggataatggcaacaacttagaagcagcactgaacgtacttcttacaagcaataaacagaaacctgttatgggtcctcctctgagaggtagaggaaaaggcagggggcgaataagatctgaagatgaagaggacctgggaaatgcaaggccatcagcaccaagcacattatttgatttcttggaatctaaaatgggaactttgaatgtggaagaacctaaatcacagccacagcagcttcatcagggacaatacagatcatcaaatactgagcaaaatggagtaaaagataataatcatctgagacatcctcctcgaaatgataccaggcagccaagaaatgaaaaaccgcctcgttttcaaagagactcccaaaattcaaagtcagttttagaaggcagtggattacctagaaatagaggttctgaaagaccaagtacttcttcagtatctgaagtatgggctgaagacagaatcaaatgtgatagaccgtattctagatatgacagaactaaagatacttcatatcctttaggttctcagcatagtgatggtgcttttaaaaaaagagataactctatgcaaagcagatcaggaaaaggtccctcctttgcagaggcaaaagaaaatccacttcctcaaggatctgtagattataataatcaaaaacgtggaaaaagagaaagccaaacatctattcctgactatttttatgacaggaaatcacaaacaataaataatgaagctttcagtggtataaaaattgaaaaacattttaatgtaaatactgattatcagaatccagttcgaagtaatagtttcattggtgttccaaatggagaagtagaaatgccactgaaaggaagacgaataggacctattaagccagcaggacctgtcacagctgtaccctgtgatgataaaatattttacaatagtgggcccaaacgaagatctgggccaattaagccagaaaaaatactagaatcatctattcctatggagtatgcaaaaatgtggaaacctggagatgaatgttttgcactttattgggaagacaacaagttttaccgggcagaagttgaagccctccattcttcgggtatgacagcagttgttaaattcattgactacggaaactatgaagaggtgctactgagcaatatcaagcccattcaaacagaggcatgggaggaagaaggcacctacgatcaaactctggagttccgtaggggaggtgatggccagccaagacgatccactcggccaacccaacagttttaccaaccaccccgggctcggaactaataggaaaagactctttgtgaagaaacgagccagtgactgaaacaccctggtggaaacctgttgacagaccttccactttctcttcagaataagtagctgtggtggatattattatttgaagaaagaaaaaacagattttagggtggaaaaaacagtcaactcacacaaagaatggaaaaaaatactgagttaaattaagcaaataccttttacaagtgaaaggaagaatttttcttctgccgtcaataaaaccattgtgctattattgtttaaaaaaaaaaaaaaaaa

SEQ ID NO: 2565 - DNA, 806 bp, Homo sapiens
gggaggtgaaaggtcatagtcctgtttggcggccatttctcttgaaactgcggctcgggacctgcggtacctgctgtagtcacgagggacgggcggcggcctggtcggcagagagtagcctgcaacattcggccgtggttacgatgagtttacccctcaatcccaaacctttcctcaatggactaacaggaaagccagtgatggtgaaacttaagtggggaatggagtacaagggctatctggtatctgtagatggctacatgaacatgcagcttgcaaatacagaagaatacatagatggagctttgtctggacatctgggtgaagttttaataaggtgtaataatgtcctttatatcagaggtgtggaagaagaggaagaagatggggaaatgagagaatagcatcttttgtgggggattttttttatatatatttctagacaataaagatttgtttgtttttcaacttgacttgtgaactatttgtattcagatatttacaagcaaagctgaaatgatgaaccaattgggaaagattactcactgaactaatgctttaaaagccactgaatttcatttaagttgcttttcttttgtaagcccaatattcttttttttcccataaaggataattatttatatgctttagatatttttatgaaggtgaatttcagaccttttcttgtaaaattatctattagctgagaccttttaaatgcaactttttcttttaaagttatttttgagctacttttaacgtataaaattaaacattttcttggtattaataaaaaaaaaaaaaaa

SEQ ID NO: 2566 - DNA, 746 bp, Homo sapiens
ccctgcgccacacggccgtcgccatggtgaagctgagcaaagaggccaagcagagactacagcagctcttcaaggggagccagtttgccattcgctggggctttatccctcttgtgatttacctgggatttaagaggggtgcagatcccggaatgcctgaaccaactgttttgagcctactttggggataaaggattatttggtcttctggatttggaggcaatcagcggacagcatggaagatgtgtgctctggctcggataagagatgggacatcattcagtcactagttggatggcacaaggctcttcacagacgcatctgtagcagagtggatcttgtactaacttatgatagaatgtatcagaataaatgtttttaacagtgttatgcttgagtcttttttgaattgaacatgctaggattatcaggtaaaaattaagccttttggtactttctcaaaacagggaatttatgtgtatacctaggtgctatttaagcctgtaaatcccagcactttgggaggccagggcgggtggatcacgatataaaaaaatttttccaagttattcctgcccattgacctaacatatggattacagtttccctttgcagtgaattaataactccttctaggatattccgaggtagtaagaatacagatagttctgtttgtgacaaaccaagctgttacttcctcctctgcattaaagttctgactgcaagaaaaaaaaaaaaaaaaaaaa

SEQ ID NO: 2567 - DNA, 1277 bp, Homo sapiens
ctgccgcgctgtccgcgttatctcctcccggtgagaacgaaccgcagtgtccaccggcgaggagccagccctgtcccggtcagagaaagacgacgaggatacctgggagcgggcggcggccgggctgggccgcgccggtgcgggctggcgactctgctcctccgcttgctgctgtctctgggaactgggtgccagcgctgaggggcttccagcggacagggacccccttccccggctcccctgcccaccctgccggggagggcggaagatgccggtgaagaagaagagaaaatcccctggggtggcagcagcagtagcggaagacggaggcctcaaaaagtgtaaaatctccagctattgcagatcccaaccccctgctagactaataagtggagaggaacatttttcaagcaagaagtgcctggcttggttttatgaatatgcaggtcctgatgaagttgtagggccagaaggaatggaaaaattttgtgaagacattggtgttgaacctgaaaatattattatgttagttttagcgtggaaattggaggctgaaagcatgggattttttaccaaggaagaatggttaaagggaatgacttcattacagtgtgactgcacagaaaagttacaaaacaaatttgactttttgcgctcacagttgaatgatatttcgtcatttaagaatatctacagatatgcctttgattttgcaagggataaagatcagagaagccttgatattgatactgctaaatctatgttagctcttctgcttgggaggacatggccactgttttcagtattttaccagtacctggagcaatcaaagtatcgtgttatgaacaaagatcaatggtacaatgtattagaattcagcagaacagtccatgctgatcttagtaactatgatgaagatggtgcttggcctgttcttcttgatgaatttgttgagtggcaaaaagtccgtcagacatcatagcaagaactatgtgaagaaaatgcaaacctttcaattcccacgtgtatacaagctaatgtgatgagggggaaaaaaatccaacgggtgcattttcattcatatgaaagacttctcatagtacttttttttcctttttttaaaggaggtttttcttgttacatgtgatgggcattgagccacacctcttcttagactgaatattgaagtttttgttttgagttatgtttataacatttatttcagaacaataaagattcagatttgtgaaaaaaaaaaaaaaaaaaaaaaaaaaaaa

SEQ ID NO: 2568 - DNA, 2785 bp, Homo sapiens
atgaggtccagctcgtccctggctctctctctctctcaggtcctgatgtcttttccaagtctggagagcagcgatgctgctgtgccctgcgcagaaaaccgtgttccggctgcagctaaccaccgcagctcaatgtctctgggtgtatctcagagataagcaggtggtggtgttccttgcttatcccacaagggcacctggccggaataatggagtcacttccctccactggcctgaccccactctttctctttcctggacacaggaggcatacacggaatacctgaggagcatccactatatctcccaggtgttactagaagaagtggaaaccactaaagaagctggggaaactgtgccccccgacacctccaagatgctgaaactagcacagcagtgtctggagagggcccagtcgacggccgccaagcttgggaaaacacgcctgaagccaaccatgcctgcagctgctcccatcccccagcctgccggccgacaccgccgtgtatactccgatgaaggaggaaagctctctccttttctgccacccgagatcttccagaagcttcagggggcagagtcacaaagctgtaagaaagagctgacgccactggaggaggcctccctgcagaatcagaagctgaaggctgcgtatgaggcccgaatggcgcggctagaccccagccaggccatgcagaagacatccctgaccctctctctacagcggcagatgatggagaacctagtgattgccaaagcccgggaggagacactccagagaaagatggaggagcgccggctgcggctccaggaggccgccaacaggaggttttgcagcaagttcgccctgaccccggaggaacgggagcagcgggccctttacgccgccatcctggagtacgaacaggaccatgactggccgaagcactggaaggccaagctcaagaggaatccgggggacctgtcactcgtaaccagcctggtctcacacctgctcagcctccccgaccacccgatcgcgcagctcctgaggcggctgcagtgctccgtgtacagcgccctgtatcccgccgtgagcagagcagccgcgccagccccaggctgctgccccccgacccccaaccccggaagccgacggctgcggccctcgcagagcctccattgcatgctgtccccgcccgagcccagcgcagccccgcggccccaggacagtccccccacgcccccactccaacccggcccgtggggtctccctcacccctgggggacaccgcatctggattgccagacaaggacagctcgttcgaggacctggagcagttcctggggacgtctgagccgcagggccggggccgtggggtacagccggagccccagctgcagcagctgaagaccgcggtggaggagatccacaatgccgtagacaggctgtctcgctgacccttctggccttcgaaggcctaaacacagctgcctccaaggaccgctgcctggcctgcattgaggaaccctttttctccccgctgtggcctctgctgctggccctgtacaggagcgtgcaccgagcccgggaggctgccctgagcaggagcatggagctctacaggaatgcaccccccaccgccattggcatccccaccaagctcctcccccagaaccctgaggccaagggggccactggctacccctactgcgcggcggcccaggagctcggactgctggtcctggagagctgcccccagaagaagctggagtgcatagtgcggaccctgcggatcatctgtgtctgtgcggaagactactgccccaccccagaggccacaccccaggccggcccccgcccatcgctgcagctgccattggtgccgatgacctgctgcccatcctgtccttcgtggtgctgaggagcggcctccctcagctggtgtcggagtgcgcggccctggaggagttcatccacgaggggtacctgatcggagaggagggctactgcctcacatcactgcagagtgccctgagctacgtggagctgctgccccggggaggcctggccaagtagtacagctagagcccagggtccctgcagggcctggcctcgcctcccagggctgtctctcctacacctggagccatgggatctactgaggaccatcctggagcctcacgctgctctgcacatggtgggggcttgtccactgtggtgtgctctccagctcttcaccttcctcacctcacatctgaccctggagcttggggttggcacctctgccccgacagaatggggctgaatcagctccaggaggaaccaggccctgctctcctgtgtagcctcagagaggccaagaagggaagctttgggcttcggtgggtgcaggctcagcgatgaacatctggctggggcagctcctggggagcatcagggaagagggggccatgagccggccagcagtggagacggcagtccagtttctctcccctctgacccctagaaggggagttgtagccccatgaactagtttcttgtctgggtcaggaacaagggccggctggggcctggggtgcagctggtgtcagggtatgctgtttgctgatgggcagggacacccctgcagggtctcgggctctgagcccaggacattccctgccccttgctcaccttggctgtgggctgtgaacattccgggaccctgggcatcttatctaggtccgtgcagcccaagggtcagccctcttgactgtcacatgctgcccccacccagcctaaaataaagagctcactgctgtg

SEQ ID NO: 2569 - DNA, 1310 bp, Homo sapiens
ataactgagtttacgcagacgcagaaaacgcaggcaaacctgaggtcctcagaatggcgggcacaggtttggtggctggagaggttgtggtggatgcgctgccgtattttgatcaaggttatgaagcccctggtgtgcgggaagcggctgcagcgctggtggaggaggaaactcgcagataccgacctactaagaactacctgagctacctgacagccccggattattctgcctttgaaactgacataatgagaaatgaatttgaaagactggctgctcgacaaccaattgaattgctcagtatgaaacgatatgagcttccagccccctcctctggtcaaaaaaatgacattactgcatggcaagaatgtgtaaacaattctatggcccagttagagcatcaagcagttagaattgagaatctggaactaatgtcacagcatggatgtaatgcctggaaagtatacaatgaaaatctagttcatatgattgaacacgcacagaaggaacttcagaagttaagaaaacatattcaagatttaaactggcagagaaagaacatgcaactcacagctggatctaaattgagagaaatggagtcaaattgggtatccctggtcagtaagaattatgagattgaacggactattgttcagctagaaaatgaaatctatcaaattaagcagcaacatggagaggcaaacaaagaaaacatccggcaagacttctgaaaagacaatttagcaggtagaagaaaagttgggctttcacaaaaggcatctgaacttttaatgaactttgaaggacaacagcatcttcccaaaaccattgatgtttaagtgtttagaaatcatagaaggtgtaggctgctgtggtaattctatttgtatatctcaacagaattaaaatgtctagcttggtggtatttttatagccataaaagaaaatctttaggctttcaaaataaggatgactttagaataatattgtgtcatagaattaattttcagccatgtggaccatattttgtatccaaggatccttatttaaagctttcaacatgtacaggaagttggaaatttttggtttatgactttgtctaataaagagatagttctaaacacattcttgatcaccaaacaacttcagaaagacagtgactgtacagttatcattatcatcatcatcgtcatcatcataggtaacagttatatcaagcttaatatgtgctgaacattgttctgaacactttaggtagatgaactagatgtatgtgaataaaaattatttggtcctcacaaaaaaaaaaa

SEQ ID NO: 2570 - DNA, 1597 bp, Homo sapiens
agccttctgggtccgaggctcccacctgctctaagcgcttgacaccctttaaaaaaatgtatttaaagaggctggttcctatccatccgactggaggcatctcagtgcaagagcaaagctaagtcctgcacacgctcctcccctcctcctcctccttctccccccaggttttcccgaatgtatctactccggttacaactagacgcggcccctcccccacctgcctccccccttccttccctcgatcgtggagggagcgttctctgtgccttcccaagtccccgtgggggaccttctatgttggagtggggggagggggggagggtcatataacgaaggccagaaagaacaaattagataatcaaaagaattatagtaattgctttcactttcccccgcccgctcagcggattccctcccccgcccctcccctggtttttctgtctgtcgggaatactcggtctttccgaccccctcccctcccccaggttcctcctctcctctccccttgctcgcgcgttccctctcttcctccgttttctggtgtgctggaacgttcagcggaatatgatgaatgatcacctgtcacagcttgtttattataatgcaggcaatcaattacacatccccaatgctggccggcccgcaggaaatttatatgctcagcacaaaccaatgtgaaaatggaatctcatttgccaaatgtctttctccccgtacagcacgatgattacagtctgtgtttgtttcaacagtcgtgtacaactgacagtgccatcatttactgcctggctcaggtcacgttactctaaggctttatttatggtgttacgaagggcagcacaggaaaaggacaagggtgtctgtcagggatggcactgtgttaaaaagtgggcgtgcaagggccgcattcccgggcagccgctgcaacctcagcccctgggcccttacctccgcagcctctcccagcatccagctacccagactccaaggccccaggcgagagccagctctcggtacctggagctccacaggtcccagaatcggggtgggtcagagttcaaattctggttctgctactgtctaattgcgtgctgcagggactcaatctcttcatctgggaaatgggagtaataacccttggcaggaatgttgcgatcctctgggatgtcagaggtgttgatgaatgttagttcccgggacttcggaaagaggtcccgttggaagagatgtgaattggaattcacaccctatattaaaatctcctccaatcttcacctctgagacatggctgtctcaagactgttttgtttcccttcctggtggaattttgcacttttatgtcctgtgtagcagcaggtagtgtggctttgagaaaataaaatggccaccttgctccgctgttctttctttgtaaaaaaaaaaaaaaaaaaaaaaaaacggcatagcaatcttggcctttctagctgtgtgaccccaggccggtcaatccctcctcctctccaagcctcggattcctcccctgagaagtaaagaaaataactcctaaactgcctcccgaggcttgctggcaggatccaaggtgtccagagatgtt

SEQ ID NO: 2571 - DNA, 2753 bp, Homo sapiens
gagcgcagagcggtttggtcgttcgttgggcggtgctggtttttcgctcgtcgactgcggctcttcctcgggcagcggaagcggcgcggcggtcggagaagtggcctaaaacttcggcgttgggtgaaagaaaatggcccgaaccaagcagactgctcgtaagtccaccggtgggaaagccccccgcaaacagctggccacgaaagccgccaggaaaagcgctccctctaccggcggggtgaagaagcctcatcgctacaggcccgggaccgtggcgcttcgagagattcgtcgttatcagaagtcgaccgagctgctcatccggaagctgcccttccagaggttggtgagggagatcgcgcaggatttcaaaaccgacctgaggtttcagagcgcagccatcggtgcgctgcaggaggctagcgaagcgtacctggtgggtctgttcgaagataccaacctgtgtgccatccacgctaagagagtcaccatcatgcccaaagacatccagttggctcgccggatacggggagagagagcttaagtgaaggcagtttttatggcgttttgtagtaaattctgtaaaatactttggtttaatttgtgactttttttgtaagaaattgtttataatatgttgcatttgtacttaagtcattccatctttcactcaggatgaatgcgaaaagtgactgttcacagacctcagtgatgtgagcactgttgctcaggagtgacaagttgctaatatgcagaagggatgggtgatacttcttgcttctcatgatgcatgtttctgtatgttaatgacttgttgggtagctattaaggtactagagttgataaatgtgtacagggtccttttgcaataaaactggttatgacttgatccaagtgtttaacaattggggctgttaagtctgaccatacatcactgtgatagaatgtgggctttttcaagggtgaagatacaagtcttaaccacagtgtaacttacagtttcctttaaaaaaaaaaaaagtaaacctggcagctatagaatacactatgtgcatttataatagctattttatatattgtagtatcaacatttttaaattaaatgttttacattcacaagtggtggggagtcttgtcattaaggtgtgtgtaatttagagtccagttggttttcttctgactgcacttgttctcatagtagtaaaatgctatgcgcatttataccttgcataagtcctcattctaccacatgttaaccctctagctgataatgcaaacactaactgggggattttatttataagggctctagaaaaaacgagttattcacaccagcatcatcttaactaacattctgaactagttagtgcagcttttcattgtgttgtgtggttggtctcataactaggttgagtttttctcctctgctgaggaaacagtaccgaagttctttttcttgtggcatttgtattataaaaacttggtgtgggggaggagcacaaaactccagcccactgaacctctgccaattaagatggtgttgggttaggttacatctggttactgtcctgggaaaatcatttttatagagatggccttccaagtggttttaaaatttactgaagtttttaggtcaattatgtatgttgactaaatttacaaataaacttgtttatccaactaagtgtccaaaacctaaattgaatgtactaagttttcacatgtcccattatctaggtccttgtatactaatgttttgaacttagatcatttcaggtgttgtttggtggataaaggaaccttttatttataaagatactgtagaaagcatgtgaacagctctctgcttgattaagatgccataatagtgctgtatttgcagtgtgggctaagacaaagtatattaataagcttttcagcccccccactcccgttccgtagtgtagaagcccacaggtgtagaactcagtcttaaacttcagtatgaaaccagtttccttgtgcgatgatggccactaaagcatagtacgtggatgtcagtgagacagcatgagagccagcagtcatcaaagcgttccacgtttgaagttagcaactgcttaaagttatgccctattaaaattgctttctcaaaagtttgggttagtttcaaatgtgatattttggagggaaggtaaagtaggtatctttcaggtcgtgataatgagctcctatgaaaggatgcaatataatgacccgcttttctagaaagttcataatcagctctggaacaagcacacttgattcctcactgtgcttcagaatgagattaagatcagatgttggaacgtgctatgctgtagcgtgtctggaaacaaagtacacaaacctggctacggtgatgagttagcttctgcttactacctgtgacaacccaagtgggtgacactagtgaaccttctccagtctgcaggctggcatagaaggctcttagattatattgggcagcttgcaatctgccgaagcagtgacttgcatttccacacttggcttgagcactcaacccagaaggcgaagatagcttttggttgtaggcggcttcctgtatgggatatccctcggtaagggtaaaggagcagaggcaaaggagaaaagcagaagttgcagctgatgcaggtatcctatgcccttgatggatgagactaaaataaaatttttgaagttaaaaaaaaaaaaaaaaaaaaaaaaaaaaaaaaaaaaaaaaaaaaaaaaaa

SEQ ID NO: 2572 - DNA, 3273 bp, Homo sapiens
gagttcggagtagagatggccgcgcttgcaccgctgcccccgctccccgcacagttcaagagcatacagcatcatctgaggacggctcaggagcatgacaagcgagaccctgtggtggcttattactgtcgtttatacgcaatgcagactggaatgaagatcgatagtaaaactcctgaatgtcgcaaatttttatcaaagttaatggatcagttagaagctctaaagaagcagttgggtgataatgaagctattactcaagaaatagtgggctgtgcacatttggagaattatgctttgaaaatgtttttgtatgcagacaatgaagatcgtgctggacgatttcacaaaaacatgatcaagtccttctatactgcaagtcttttgatagatgtcataacagtatttggagaactcactgatgaaaatgtgaaacacaggaagtatgccagatggaaggcaacatacatccataattgtttaaagaatggggagactcctcaagcaggccctgttggaattgaagaagataatgatattgaagaaaatgaagatgctggagcagcctctctgcccactcagccaactcagccatcatcatcttcaacttatgacccaagcaacatgccatcaggcaactatactggaatacagattcctccgggtgcgcacgctccagctaatacaccagcagaagtgcctcacagcacaggtgtagcaagtaatactatccaacctactccacagactatacctgccattgatcccgcacttttcaatacaatttcccagggggatgttcgtctaaccccagaagactttgctagagctcagaagtactgcaaatatgctggcagtgctttgcagtatgaagatgtaagcactgctgtccagaatctacaaaaggctctcaagttactgacgacaggcagagaatgaagcctttgtatgacagacccatgtatttttggcatgaggaactaacagtccattactctatcttcagcctatcaggatcacagttttaaggaagacttggttttgttgaatatgacaatgaaatctgtgtgtatcagatttttattgaagcattcatcagcagcctcaaccagttttcattgtccatttactagattcaatcgtctctgagtatatagggctgatgttagcaagaccctaaaaatgtccattgaaccctgcttcaaaaaatgaaaacacacctctataaaatgtgtactgggaataagctttgtatttacatacattaggggaattttttaaaatctgtaatgtttggacaaacagatgatattactttgctataaaattataaatgtaacttttaataaagatagccagaatattctaaattagaaattacgtttttgtttccctcaagacataaaacaaatataaacattctaaactgctggatgaatctgaaaagacattaagttcaaattttaatttattctcatattaaatataactccattaaaagtttaaaatttcatgggagaaaatataataaggtaaagaggtagaatcactttcagacttaagaataatgttgatttcccaagtgctttaccttatctgttaaagcgtaagatgaattggtatttgcttcataggcagtttgactgcatgtattagagaatgaaaagaagatatttgtagtaatgcctggaaacttggtgctttaaattaaggtactcctctgctgctgtagaatggattccacacagtggatagctatgggtgattcagaatattatgtttagattcccatttgttaagtttataagttttgtggggaattatgaacttactgtgtactacctgcatttgtgctgtgtgaaaaataaatacaaggattcgtttagctaattcaacttactacaaagacaaatgtctgtttttatttgcctgctaggattgtcttttttaaaagtcatttttatttataggaatatgggtgtttctataggaagaaacaggttttttgttttttgttttttaagataaatttgacaaagttaactgaaatttatctggtccattttattcatgctactaagatgggaatctttaaacacaagggtcagcaagctttggcccatggattggccacctgttacgtaaataaagtttctttgaaacaagcctacactcattcatttatgttttgtctgtggttgctttccacaactgcagagttgtatggcttgcaagtctaaaaacatttactatttggccctctaagaaaaagttaagacacctagtctaatggccttttgggaaaaaacaaatcactaactcataatcatttatatccattattttctgcataaatgtaatgctattgtacagggtttggtagaataaatattcagactgactaaactgttctaaatcctcacaaaaaagtccccaaacaacatgcctcctaaaaaacattttcctatcttttacaagaggtatgaacatttgtagggttccacatttgcatctagaaatccaatgctctttagaatgttattacgaatagaaagatggccaggatgacctttagtgttacatgatgttcagcaaattttaattcaaaccttgatatgcctggacactgaaaagtaaacgcatcacctcctattttataccctaccttctggttcccaattgggagagcacatagagggaaggagacaatatagaaactacggagtccgctggtagtgggctgcatggtgtgacagagcccttctctgtaaaatggaaatgacaccactagccatctcaatagttacaagaattaaaagagatacagtacctgaagtgcttagcgcatggtagcatttcataaatgtttagtgtcaatactaatgctctaataatgtaaattgttaataatttatttccctaatatcaggaaatcccagttgtctatgtggcccagtgcttaaaaacgccttcttgcatgaggggattgaactatacaatgtttgttaactttgtatttgtattttttcctataaaatcttaaaataaaattaggagatgtgttctgatgtaacagtaggattagcaattttcatttattccttccatatatatttactgaatggctactatatgcctggtattgttctttgaaagcagaaacagcaggaaaaaaagtccctccctcatagagtttacattctaaaagggaggaaatagataataaaatatacattacatttaaaaaaaaaaaaaaaaaaaaaaaaaaaaaaa

SEQ ID NO: 2573 - DNA, 4454 bp, Homo sapiens
gtggagatgaatggcgggcgcggcgaccgggagccggacccctgggaggtcggagcttgtcgagggatgcggctggcgctgcccggagcatggcgaccgcgtggctgagctcttctgtcgccgctgccgccgctgcgtgtgcgcgctttgcccggtgctgggcgcgcaccgtggccaccctgtgggcctggcgctggaggcagcggtgcacgtgcagaaactcagccaagaatgtttaaagcagctggcaatcaagaagcagcagcacattgacaacataacccagatagaagatgccaccgagaagctcaaggctaatgcagagtcaagtaaaacctggctgaaggggaaattcactgaactcagattactacttgacgaagaggaagcgctggccaagaaattcattgataaaaacacgcagcttaccctccaggtgtacagggaacaagctgactcttgcagagagcaacttgacatcatgaatgatctctccaacagggtctggagtatcagccaggagcccgatcctgtccagaggcttcaggcatacacggccaccgagcaggagatgcagcagcagatgagcctcggggagctgtgccatcccgtgcccctctcttttgagcccgtcaagagcttctttaagggcctcgtggaagccgtggagagtacattacagacgccattggacattcgccttaaggaaagcataaactgccagctctcagacccttccagcaccaagccaggtaccttgttgaaaaccagcccctcaccagagcgatcgctattgctgaaatacgcgcgcacgcccacgctggatcctgacacgatgcacgcgcgcctgcgcctgtccgccgatcgcctgacggtgcgctgcggcctgctgggcagcctggggcccgtgcccgtgctgcggttcgacgcgctctggcaagtgctggctcgtgactgcttcgccaccggccgccactactgggaggttgacgtgcaggaggcgggcgccggctggtgggtgggcgcggcctacgcctcccttcggcgccgcggggcctcggccgccgcccgcctgggctgcaaccgccagtcctggtgcctcaagcgctacgaccttgagtactgggccttccacgacggccagcgcagccgcctgcggccccgcgacgacctcgaccggctcggcgtcttcctggactacgaggccggcgtcctcgccttctacgacgtgacgggcggcatgagccacctgcataccttccgcgccacgttccaggagccgctctacccggccctgcggctctgggagggggccatcagcatcccccggctgccctaggggccaggaccggcgtgacagcctccaggtacgccgcagctgcccagtctcgcctaatctacctagatcagcgtggctggtccccttactgcctgcttcttagggccctctccctgccccagctttccccgaccaatcacgcctacagtgctttgaaggtttcctctcctaggctagtttcaaacaggccctaaacaagtctgctgctgccctctcatcagacctccgcaccctcaccccaccatcacttaaactactttaatccagttccttcaaagtgatacccccacaggtaagccctcagcatcctgaatacatcatccgcagcctgggaaccttctccctcgtacagcacaggaacctgacacatagtaggcacacagtaaacgtttgtgaatgaatgggagtcatccagtcctgactcttctgtctcttgaggtcccttgaatcttccgcttcctccccaccgatttcagcgtgtccacatcacagctccctccagaagctgcaagagcttcttagcagttcctggtctgaaccctctcccagtcctcatcttccaccctaaaactagagtgatcttcctaaaacttcacttaacccctcagctatgaaaaggcttccaggagtttccatgaaataacaaaaaaaaatacaagcgcctcaccttagcattcaaggcttgtctagtctgcccaaaattacttatcctcacctagctcctaccactcttcttagagactctccagtcagaaatgtgtcgcatagttccacctccacacctctctgctgccagcacattcatgcagaaaagtcttttcacctgtctcagtcttccgcaggcttacctgcgccaggaagtctaaccaaggaacaagaatctcactatcagagccacaaatctgggacctgtctttccaactaaattggaggctttggaagggcagctttgtcctatactctctccaccctgaaaagttcccagaaagccccttccctcccaagcagtgaattaataaccagcaggtgcctatcactgagtaacagaagagctgagttaggcgggcctcacaggtcacccagccagatctcatctggggagtctgaggtcctgaaagaaagcagagctgcgtaaagttaccccggggtgatataggggggccagacgtgtgccccgttcacccacccccaggcaagcatctgacctgtcccctggcccagcccttaggcccagctttcaacctgcttactcatttctcaggggattttgggaaggaatcagcaggtgacagttgctaagcaaccaaagggcgtggtgtttcccaactgtcttgggacaaaaagggtaagagcacccttagatccagatgttgccaaggaaacccagagtgcccagctgtctggaatgaagtgacagaggtagaaaacagtaggccctcacaggaggccaccttcgctagcagggagtgggaggcttctttccagggatttgtgtctccgttctgaaggttctgcgtcctgttttgtcaattccctagacggttttgaagttatattctgttaaagcatcttcataggtgcttggtgggaggccaaggtcgccgaatcctcgtggtttaaatagactttcagtgcattagtttgaaccatataaaactgacaattttcaatagtttttgagttaaaaatggcacttttgatatgagacaatgtagcagaataccaggcagacagaaccttgcaaacaccttaacttctaaccaaagactttaaaactctggctggacagagttttaagcactatgctgcaggaatcctgagaaaaaggggaaattaattctattaggaatggcccaaactgaattgtgacaggcagagggtgttcctgacagagggaagatgaatacacttgaccccaacatttctgcccatccctgatgaccaagacctcttcccagacccacagctgcaggggccaagtaataacagctcttaatagtttataatgcactgttttaatgctttacgactaaactcatctgatcctttcatcagccctagagggtagaaagttttcccaattctacacatggcaaaatggagacccagagtcacttgcccaaggtcgcacagctagtggtggagctggagtctgggcccaggctgtgagttccaggtctgtgctcatggccaccaggccatactgctcagggtgaatgcagctggtctctggccagtgcctggtgctctggcccctctcgtggagctactgcccatgatgctttcctagtgcctggttactctgcgagacttgagtctacctttggactgccttccttgggggtctgagatgaggccttatggcccagaggggaacttgattcaaaaatttgggattcatgtagcagagacagagctagactgtaaaggtcacaaactagctgtgtcaaggcccgtgatagccagaaagcggcagtttcagtccatatcaattgtgtgaccagggctagtcactttttacttctcagtgccatctataaaatggggataatagcactacctaccaagtgctgtgaggctcaaatgagccaaaggttataaacttgccttaaaactatagtcctatacaaaaattagctgggcgtggtggtgcatgcctgtaatcccagctactagggaggctgaggcaagagagttgcttgaacccaggaggcggagattgcagtgagctgagattgcaccactgcactccagcctggggacagagcaagactcttgtctcaaaaaaaacaaaaaaaacatatatactgctgtatcatgccaggatttatcagcattcccaagggagcttgcacggtactgaccgagtgctgagactactggtattcccagctgccatgtggcagcagcaggagctactagaatattctcagcacaggaatgaggcttccttggtttccatgtctgtaagggttactgatcacttaccttcttctctttcagacttgaatctgtagacatttctttattgatatggcaaattgcttgcagatatttttaaatgacagcaattttctaatatttggtttaataaaatgtgaataatgtccctttt

SEQ ID NO: 2574 - DNA, 1479 bp, Homo sapiens
gtggagatgaatggcgggcgcggcgaccgggagccggacccctgggaggtcggagcttgtcgagggatgcggctggcgctgcccggagcatggcgaccgcgtggctgagctcttctgtcgccgctgccgccgctgcgtgtgcgcgctttgcccggtgctgggcgcgcaccgtggccaccctgtgggcctggcgctggaggcagcggtgcacgtgcagaaactcagccaagaatgtttaaagcagctggcaatcaagaagcagcagcacattgacaacataacccagatagaagatgccaccgagaagctcaaggctaatgcagagtcaagtaaaacctggctgaaggggaaattcactgaactcagattactacttgacgaagaggaagcgctggccaagaaattcattgataaaaacacgcagcttaccctccaggtgtacagggaacaagctgactcttgcagagagcaacttgacatcatgaatgatctctccaacagggtctggagtatcagccaggagcccgatcctgtccagaggcttcaggcatacacggccaccgagcaggagatgcagcagcagatgagcctcggggagctgtgccatcccgtgcccctctcttttgagcccgtcaagagcttctttaagggcctcgtggaagccgtggagagtacattacagacgccattggacattcgccttaaggaaagcataaactgccagctctcagacccttccagcaccaagccaggtaccttgttgaaaaccagcccctcaccagagcgatcgctattgctgaaatacgcgcgcacgcccacgctggatcctgacacgatgcacgcgcgcctgcgcctgtccgccgatcgcctgacggtgcgctgcggcctgctgggcagcctggggcccgtgcccgtgctgcggttcgacgcgctctggcaagtgctggctcgtgactgcttcgccaccggccgccactactgggaggttgacgtgcaggaggcgggcgccggctggtgggtgggcgcggcctacgcctcccttcggcgccgcggggcctcggccgccgcccgcctgggctgcaaccgccagtcctggtgcctcaagcgctacgaccttgagtactgggccttccacgacggccagcgcagccgcctgcggccccgcgacgacctcgaccggctcggcgtcttcctggactacgaggccggcgtcctcgccttctacgacgtgacgggcggcatgagccacctgcataccttccgcgccacgttccaggagccgctctacccggccctgcggctctgggagggggccatcagcatcccccggctgccctaggggccaggaccggcgtgacagcctccagacttgaatctgtagacatttctttattgatatggcaaattgcttgcagatatttttaaatgacagcaattttctaatatttggtttaataaaatgtgaataatgtccctttt

SEQ ID NO: 2575 - DNA, 1789 bp, Homo sapiens
cggaggaggtggagatgaatggcgggcgcggcgaccgggagccggacccctgggaggtcggagcttgtcgagggatgcggctggcgctgcccggagcatggcgaccgcgtggctgagctcttctgtcgccgctgccgccgctgcgtgtgcgcgctttgcccggtgctgggcgcgcaccgtggccaccctgtgggcctggcgctggaggcagcggtgcacgtgcagaaactcagccaagaatgtttaaagcagctggcaatcaagaagcagcagcacattgacaacataacccagatagaagatgccaccgagaagctcaaggctaatgcagagtcaagtaaaacctggctgaaggggaaattcactgaactcagattactacttgacgaagaggaagcgctggccaagaaattcattgataaaaacacgcagcttaccctccaggtgtacagggaacaagctgactcttgcagagagcaacttgacatcatgaatgatctctccaacagggtctggagtatcagccaggagcccgatcctgtccagaggcttcaggcatacacggccaccgagcaggagatgcagcagcagatgagcctcggggagctgtgccatcccgtgcccctctcctttgagcccgtcaagagcttctttaagggcctcgtggaagccgtggagagtacattacagacgccattggacattcgccttaaggaaagcataaactgccagctctcagacccttccagcaccaagccaggtaccttgttgaaaaccagcccctcaccagagcgatcgctattgctgaaatacgcgcgcacgcccacgctggatcctgacacgatgcacgcgcgcctgcgcctgtccgccgatcgcctgacggtgcgctgcggcctgctgggcagcctggggcccgtgcccgtgctgcggttcgacgcgctctggcaagtgctggctcgtgactgcttcgccaccggccgccactactgggaggttgacgtgcaggaggcgggcgccggctggtgggtgggcgcggcctacgcctcccttcggcgccgcggggcctcggccgccgcccgcctgggctgcaaccgccagtcctggtgcctcaagcgctacgaccttgagtactgggccttccacgacggccagcgcagccgcctgcggccccgcgacgacctcgaccggctcggcgtcttcctggactacgaggccggcgtcctcgccttctacgacgtgacgggcggcatgagccacctgcataccttccgcgccacgttccaggagccgctctacccggccctgcggctctgggagggggccatcagcatcccccggctgccctaggggccaggaccggcgtgacagcctccagaatgtcatggaagcagaatcgtacagtatgttcccttctgcatatgctgctttctcactcagcatcatttccttgagatgcatccaggctgctgcacgcatcaatagttcattcctggctgggcgcggtggctcacgcctgtaatcccagcgctttgggaggccgatgtgggtggatcacaaggtcaggagtttgagactagcctggccaagatggtgaaaccccatctctgcaaaaaatacaaaaattagccgggcaccatggcatgtgcctgtaatccctgctactcaggaggctgaggaaggagaatcacttgaacccgggcagcggaggttgcagtgagccgagatcacaccactgcactccagcctgggcaatagagtgagactccgtttcaaaaaaaaaaaaaaaaaa

SEQ ID NO: 2576 - DNA, 3693 bp, Homo sapiens
gtggagatgaatggcgggcgcggcgaccgggagccggacccctgggaggtcggagcttgtcgagggatgcggctggcgctgcccggagcatggcgaccgcgtggctgagctcttctgtcgccgctgccgccgctgcgtgtgcgcgctttgcccggtgctgggcgcgcaccgtggccaccctgtgggcctggcgctggaggcagcggtgcacgtgcagaaactcagccaagaatgtttaaagcagctggcaatcaagaagcagcagcacattgacaacataacccagatagaagatgccaccgagaagctcaaggctaatgcagagtcaagtaaaacctggctgaaggggaaattcactgaactcagattactacttgacgaagaggaagcgctggccaagaaattcattgataaaaacacgcagcttaccctccaggtgtacagggaacaagctgactcttgcagagagcaacttgacatcatgaatgatctctccaacagggtctggagtatcagccaggagcccgatcctgtccagaggcttcaggcatacacggccaccgagcaggagatgcagcagcagatgagcctcggggagctgtgccatcccgtgcccctctcttttgagcccgtcaagagcttctttaagggcctcgtggaagccgtggagagtacattacagacgccattggacattcgcctttccccgaccaatcacgcctacagtgctttgaaggtttcctctcctaggctagtttcaaacaggccctaaacaagtctgctgctgccctctcatcagacctccgcaccctcaccccaccatcacttaaactactttaatccagttccttcaaagtgatacccccacaggtaagccctcagcatcctgaatacatcatccgcagcctgggaaccttctccctcgtacagcacaggaacctgacacatagtaggcacacagtaaacgtttgtgaatgaatgggagtcatccagtcctgactcttctgtctcttgaggtcccttgaatcttccgcttcctccccaccgatttcagcgtgtccacatcacagctccctccagaagctgcaagagcttcttagcagttcctggtctgaaccctctcccagtcctcatcttccaccctaaaactagagtgatcttcctaaaacttcacttaacccctcagctatgaaaaggcttccaggagtttccatgaaataacaaaaaaaaatacaagcgcctcaccttagcattcaaggcttgtctagtctgcccaaaattacttatcctcacctagctcctaccactcttcttagagactctccagtcagaaatgtgtcgcatagttccacctccacacctctctgctgccagcacattcatgcagaaaagtcttttcacctgtctcagtcttccgcaggcttacctgcgccaggaagtctaaccaaggaacaagaatctcactatcagagccacaaatctgggacctgtctttccaactaaattggaggctttggaagggcagctttgtcctatactctctccaccctgaaaagttcccagaaagccccttccctcccaagcagtgaattaataaccagcaggtgcctatcactgagtaacagaagagctgagttaggcgggcctcacaggtcacccagccagatctcatctggggagtctgaggtcctgaaagaaagcagagctgcgtaaagttaccccggggtgatataggggggccagacgtgtgccccgttcacccacccccaggcaagcatctgacctgtcccctggcccagcccttaggcccagctttcaacctgcttactcatttctcaggggattttgggaaggaatcagcaggtgacagttgctaagcaaccaaagggcgtggtgtttcccaactgtcttgggacaaaaagggtaagagcacccttagatccagatgttgccaaggaaacccagagtgcccagctgtctggaatgaagtgacagaggtagaaaacagtaggccctcacaggaggccaccttcgctagcagggagtgggaggcttctttccagggatttgtgtctccgttctgaaggttctgcgtcctgttttgtcaattccctagacggttttgaagttatattctgttaaagcatcttcataggtgcttggtgggaggccaaggtcgccgaatcctcgtggtttaaatagactttcagtgcattagtttgaaccatataaaactgacaattttcaatagtttttgagttaaaaatggcacttttgatatgagacaatgtagcagaataccaggcagacagaaccttgcaaacaccttaacttctaaccaaagactttaaaactctggctggacagagttttaagcactatgctgcaggaatcctgagaaaaaggggaaattaattctattaggaatggcccaaactgaattgtgacaggcagagggtgttcctgacagagggaagatgaatacacttgaccccaacatttctgcccatccctgatgaccaagacctcttcccagacccacagctgcaggggccaagtaataacagctcttaatagtttataatgcactgttttaatgctttacgactaaactcatctgatcctttcatcagccctagagggtagaaagttttcccaattctacacatggcaaaatggagacccagagtcacttgcccaaggtcgcacagctagtggtggagctggagtctgggcccaggctgtgagttccaggtctgtgctcatggccaccaggccatactgctcagggtgaatgcagctggtctctggccagtgcctggtgctctggcccctctcgtggagctactgcccatgatgctttcctagtgcctggttactctgcgagacttgagtctacctttggactgccttccttgggggtctgagatgaggccttatggcccagaggggaacttgattcaaaaatttgggattcatgtagcagagacagagctagactgtaaaggtcacaaactagctgtgtcaaggcccgtgatagccagaaagcggcagtttcagtccatatcaattgtgtgaccagggctagtcactttttacttctcagtgccatctataaaatggggataatagcactacctaccaagtgctgtgaggctcaaatgagccaaaggttataaacttgccttaaaactatagtcctatacaaaaattagctgggcgtggtggtgcatgcctgtaatcccagctactagggaggctgaggcaagagagttgcttgaacccaggaggcggagattgcagtgagctgagattgcaccactgcactccagcctggggacagagcaagactcttgtctcaaaaaaaacaaaaaaaacatatatactgctgtatcatgccaggatttatcagcattcccaagggagcttgcacggtactgaccgagtgctgagactactggtattcccagctgccatgtggcagcagcaggagctactagaatattctcagcacaggaatgaggcttccttggtttccatgtctgtaagggttactgatcacttaccttcttctctttcagacttgaatctgtagacatttctttattgatatggcaaattgcttgcagatatttttaaatgacagcaattttctaatatttggtttaataaaatgtgaataatgtccctttt

SEQ ID NO: 2577 - DNA, 1561 bp, Homo sapiens
ggcccgctccaacatcagaatggtaacagctttcaggagcctaccacgcggcagctccggagctgccgcgtccatgtccgcgcacaatcggggcaccgagctcgaccttagctggatctccaaaatacaagtgaatcacccggcagttctgaggcgtgcggaacaaatccaggctcgcagaaccgtgaaaaaggagtggcaggctgcttggctcctgaaagctgttacctttatagatcttactacactttcaggtgatgatacatcttccaacattcaaaggctctgttataaagccaaatacccaatccgggaagatctcttaaaagctttaaatatgcatgataaaggcattactacagccgccgtttgtgtttatcccgcccgggtgtgtgatgctgtaaaagcactcaaggctgcaggctgtaatatccctgtggcatcagtggccgctggatttccagctggacagactcatttgaagacacgattagaagagatcagattggctgtggaagatggagctacagaaatcgacgtggtaattaacagaagcttggtgctgacaggccagtgggaagccctgtatgatgagattcgtcagtttcgcaaggcctgtggggaggctcatcttaaaactatattagcgacaggagaacttggaactcttactaatgtctataaagccagtatgatagcaatgatggcaggatcagattttattaagacctctactggaaaagaaacagtaaatgccaccttcccggtagctatagtaatgctgcgggccattagagatttcttctggaaaactggaaacaagatagggtttaaaccagcaggaggcatccgcagtgcaaaggattcccttgcttggctctctcttgtaaaggaggagcttggagatgagtggctgaagccagaactctttcgaataggtgccagtactctgctctcggacattgagaggcagatttaccatcatgtgactggaagatatgcagcttatcatgatcttccaatgtcttaaatcagtcaccagttccagaaaagttctttacgacaatgtttaaaaattatttttctacgtaattgctaaaattatttaattaaaaaattgggcagtaggtaactggcattcctctctttaaaatttctaccgaacttaatggaatggaaaaagcaaactcatccacatgtggtactcatttcaggcacatctgaaatgatcttaattactagaagatctgcactattaactttgtgaagagtttctcctaaaaactttaagtaaaatgttaatggtagctttgataacatcaaattctaagggagaaaaaaacaatattaaaccgcccaagcagtgtgccctagcagaggaaaatgcaacatctcgcaagcgctgctgtaacgacttcaggagtcactgattcagcactaatttcctgctgtgaaaactcatctttcatttttgccgtggataggcgcttttattaattgttgtcctaatgaaatttctgacattgtcatatacaacgatgaatatcattaaaatttttaa

SEQ ID NO: 2578 - DNA, 2312 bp, Homo sapiens
gggcccggcgcgcggtagcgcgggcccctcagtgcacaatggctagagcaggcggcggagccccaaccccacccagtgcggagcgcgccgcgagccccgccgcaagctgagcgcctccgcccgccaggcgcgccggcgccgggccatgtactcggggaaccgcagcggcggccacggctactgggacggcggcggggccgcgggcgctgaggggccggcgccggcggggacactgagccccgcgcccctcttcagccccggcacctacgagcgcctggcgctgctgctgggctccattgggctgctgggcgtcggcaacaacctgctggtgctcgtcctctactacaagttccagcggctccgcactcccactcacctcctcctggtcaacatcagcctcagcgacctgctggtgtccctcttcggggtcacctttaccttcgtgtcctgcctgaggaacggctgggtgtgggacaccgtgggctgcgtgtgggacgggtttagcggcagcctcttcgcttcgttgtgtggaagatcttcagacaattcaagtgatcaagattttaaaatatgaaaagaaactggccaaaatgtgctttttaatgatattcaccttcctggtctgttggatgccttatatcgtgatctgcttcttggtggttaatggtcatggtcacctggtcactccaacaatatctattgtttcgtacctctttgctaaatcgaacactgtatacaatccagtgatttatgtcttcatgatcagaaagtttcgaagatcccttttgcagcttctgtgcctccgactgctgaggtgccagaggcctgctaaagacctaccagcagctggaagtgaaatgcagatcagacccattgtgatgtcacagaaagatggggacaggccaaagaaaaaagtgactttcaactcttcttccatcatttttatcatcaccagtgatgaatcactgtcagttgacgacagcgacaaaaccaatgggtccaaagttgatgtaatccaagttcgtcctttgtaggaatgaagaatggcaacgaaagatggggccttaaattggatgccacttttggactttcatcataagaagtgtctggaatacccgttctatgtaatatcaacagaaccttgtggtccagcaggaaatccgaattgcccatatgctcttgggcctcaggaagaggttgaacaaaaacaaattcttttaattcaacgggtgctttacataatgaaaaaaccacttgtggcacacgatgggcatctaacatcatcatcttctaatgtgttggagattttcatttcaaatatattttttaaattactctattttccaaaacacgtaatgcatttttctcgaaaataccttactgtaaaaataactgtcgcgtacacatgtgtgaagtagctagaacatactgaattttttttgtactgttggactctattcagtgtcatgtcctatatctgatcaagttatcaaggagataattctagaatgaaaaagaaaatcctcttgttggaaacaaaagacgttttatatgtgcagtatgacaaagaggagtttcagagacaactttgaatccttgtcagcctggagaccagcaccagaggaatctacaaggcaaactcccatatatttgcttcccccaaattgctgcccctacagactcaaagctctttttctttgttttgttgtttctctaaaaatttactgttctttgtcgatgctatataagccagggagttctaagacgccagctctttgagatttgctcattcccctgtatttcccacatatatattacatatacccgctaataaatttatgtttgtttttctcttgtcaatctgtcttttgttataggggccccagccaaggaacctaaagtgggtagaaggaaaaattattttttctttccctacaaactgaacatggattattagaactcaaggttttcattgacaatatagaaaagaaacactgaatcattttattttattgcccaatttttatttcttatatgactctagtgtttcatcttcataattaatcatgtttgaaggatttctgagtgactcagcagcctgttaaagaaggatgaaccaaagaaaacatttcactaaatgtgcttttaaaaatcaagtgtattgctggttctgctgcagtatgtagtcgaagaataaattagtaaattgcttctgagggtctgaaattgaataaagtaatggctttgtatttctataaaagttgtctccccttgtttcctttccattctggcacatgtagacatttaattta

SEQ ID NO: 2579 - DNA, 2472 bp, Homo sapiens
gggcccggcgcgcggtagcgcgggcccctcagtgcacaatggctagagcaggcggcggagccccaaccccacccagtgcggagcgcgccgcgagccccgccgcaagctgagcgcctccgcccgccaggcgcgccggcgccgggccatgtactcggggaaccgcagcggcggccacggctactgggacggcggcggggccgcgggcgctgaggggccggcgccggcggggacactgagccccgcgcccctcttcagccccggcacctacgagcgcctggcgctgctgctgggctccattgggctgctgggcgtcggcaacaacctgctggtgctcgtcctctactacaagttccagcggctccgcactcccactcacctcctcctggtcaacatcagcctcagcgacctgctggtgtccctcttcggggtcacctttaccttcgtgtcctgcctgaggaacggctgggtgtgggacaccgtgggctgcgtgtgggacgggtttagcggcagcctcttcgggattgtttccattgccaccctaaccgtgctggcctatgaacgttacattcgcgtggtccatgccagagtgatcaatttttcctgggcctggagggccattacctacatctggctctactcactggcgtgggcaggagcacctctcctgggatggaacagcttcgttgtgtggaagatcttcagacaattcaagtgatcaagattttaaaatatgaaaagaaactggccaaaatgtgctttttaatgatattcaccttcctggtctgttggatgccttatatcgtgatctgcttcttggtggttaatggtcatggtcacctggtcactccaacaatatctattgtttcgtacctctttgctaaatcgaacactgtatacaatccagtgatttatgtcttcatgatcagaaagtttcgaagatcccttttgcagcttctgtgcctccgactgctgaggtgccagaggcctgctaaagacctaccagcagctggaagtgaaatgcagatcagacccattgtgatgtcacagaaagatggggacaggccaaagaaaaaagtgactttcaactcttcttccatcatttttatcatcaccagtgatgaatcactgtcagttgacgacagcgacaaaaccaatgggtccaaagttgatgtaatccaagttcgtcctttgtaggaatgaagaatggcaacgaaagatggggccttaaattggatgccacttttggactttcatcataagaagtgtctggaatacccgttctatgtaatatcaacagaaccttgtggtccagcaggaaatccgaattgcccatatgctcttgggcctcaggaagaggttgaacaaaaacaaattcttttaattcaacgggtgctttacataatgaaaaaaccacttgtggcacacgatgggcatctaacatcatcatcttctaatgtgttggagattttcatttcaaatatattttttaaattactctattttccaaaacacgtaatgcatttttctcgaaaataccttactgtaaaaataactgtcgcgtacacatgtgtgaagtagctagaacatactgaattttttttgtactgttggactctattcagtgtcatgtcctatatctgatcaagttatcaaggagataattctagaatgaaaaagaaaatcctcttgttggaaacaaaagacgttttatatgtgcagtatgacaaagaggagtttcagagacaactttgaatccttgtcagcctggagaccagcaccagaggaatctacaaggcaaactcccatatatttgcttcccccaaattgctgcccctacagactcaaagctctttttctttgttttgttgtttctctaaaaatttactgttctttgtcgatgctatataagccagggagttctaagacgccagctctttgagatttgctcattcccctgtatttcccacatatatattacatatacccgctaataaatttatgtttgtttttctcttgtcaatctgtcttttgttataggggccccagccaaggaacctaaagtgggtagaaggaaaaattattttttctttccctacaaactgaacatggattattagaactcaaggttttcattgacaatatagaaaagaaacactgaatcattttattttattgcccaatttttatttcttatatgactctagtgtttcatcttcataattaatcatgtttgaaggatttctgagtgactcagcagcctgttaaagaaggatgaaccaaagaaaacatttcactaaatgtgcttttaaaaatcaagtgtattgctggttctgctgcagtatgtagtcgaagaataaattagtaaattgcttctgagggtctgaaattgaataaagtaatggctttgtatttctataaaagttgtctccccttgtttcctttccattctggcacatgtagacatttaattta

SEQ ID NO: 2580 - DNA, 2632 bp, Homo sapiens
gggcccggcgcgcggtagcgcgggcccctcagtgcacaatggctagagcaggcggcggagccccaaccccacccagtgcggagcgcgccgcgagccccgccgcaagctgagcgcctccgcccgccaggcgcgccggcgccgggccatgtactcggggaaccgcagcggcggccacggctactgggacggcggcggggccgcgggcgctgaggggccggcgccggcggggacactgagccccgcgcccctcttcagccccggcacctacgagcgcctggcgctgctgctgggctccattgggctgctgggcgtcggcaacaacctgctggtgctcgtcctctactacaagttccagcggctccgcactcccactcacctcctcctggtcaacatcagcctcagcgacctgctggtgtccctcttcggggtcacctttaccttcgtgtcctgcctgaggaacggctgggtgtgggacaccgtgggctgcgtgtgggacgggtttagcggcagcctcttcgggattgtttccattgccaccctaaccgtgctggcctatgaacgttacattcgcgtggtccatgccagagtgatcaatttttcctgggcctggagggccattacctacatctggctctactcactggcgtgggcaggagcacctctcctgggatggaacaggtacatcctggacgtacacggactaggctgcactgtggactggaaatccaaggatgccaacgattcctcctttgtgcttttcttatttcttggctgcctggtggtgcccctgggtgtcatagcccattgctatggccatattctatattccattcgaatgcttcgttgtgtggaagatcttcagacaattcaagtgatcaagattttaaaatatgaaaagaaactggccaaaatgtgctttttaatgatattcaccttcctggtctgttggatgccttatatcgtgatctgcttcttggtggttaatggtcatggtcacctggtcactccaacaatatctattgtttcgtacctctttgctaaatcgaacactgtatacaatccagtgatttatgtcttcatgatcagaaagtttcgaagatcccttttgcagcttctgtgcctccgactgctgaggtgccagaggcctgctaaagacctaccagcagctggaagtgaaatgcagatcagacccattgtgatgtcacagaaagatggggacaggccaaagaaaaaagtgactttcaactcttcttccatcatttttatcatcaccagtgatgaatcactgtcagttgacgacagcgacaaaaccaatgggtccaaagttgatgtaatccaagttcgtcctttgtaggaatgaagaatggcaacgaaagatggggccttaaattggatgccacttttggactttcatcataagaagtgtctggaatacccgttctatgtaatatcaacagaaccttgtggtccagcaggaaatccgaattgcccatatgctcttgggcctcaggaagaggttgaacaaaaacaaattcttttaattcaacgggtgctttacataatgaaaaaaccacttgtggcacacgatgggcatctaacatcatcatcttctaatgtgttggagattttcatttcaaatatattttttaaattactctattttccaaaacacgtaatgcatttttctcgaaaataccttactgtaaaaataactgtcgcgtacacatgtgtgaagtagctagaacatactgaattttttttgtactgttggactctattcagtgtcatgtcctatatctgatcaagttatcaaggagataattctagaatgaaaaagaaaatcctcttgttggaaacaaaagacgttttatatgtgcagtatgacaaagaggagtttcagagacaactttgaatccttgtcagcctggagaccagcaccagaggaatctacaaggcaaactcccatatatttgcttcccccaaattgctgcccctacagactcaaagctctttttctttgttttgttgtttctctaaaaatttactgttctttgtcgatgctatataagccagggagttctaagacgccagctctttgagatttgctcattcccctgtatttcccacatatatattacatatacccgctaataaatttatgtttgtttttctcttgtcaatctgtcttttgttataggggccccagccaaggaacctaaagtgggtagaaggaaaaattattttttctttccctacaaactgaacatggattattagaactcaaggttttcattgacaatatagaaaagaaacactgaatcattttattttattgcccaatttttatttcttatatgactctagtgtttcatcttcataattaatcatgtttgaaggatttctgagtgactcagcagcctgttaaagaaggatgaaccaaagaaaacatttcactaaatgtgcttttaaaaatcaagtgtattgctggttctgctgcagtatgtagtcgaagaataaattagtaaattgcttctgagggtctgaaattgaataaagtaatggctttgtatttctataaaagttgtctccccttgtttcctttccattctggcacatgtagacatttaattta

SEQ ID NO: 2581 - DNA, 3504 bp, Homo sapiens
gagaaggcggcagcggcgattctaggcggcccaggcggcggggaggaggagaaggaggagggtggcggccgggcttggcttcggctccttgaggagttggcggcggcgcgacccggggaaccggcattgatgtccagctcgccgctgtccaagaaacgtcgcgtgtccgggcctgatccaaagccgggttctaactgctcccctgcccagtccgtgttgtccgaagtgccctcggtgccaaccaacggaatggccaagaacggcagtgaagcagacatagacgagggcctttactcccggcagctgtatgtgttgggccatgaggcaatgaagcggctccagacatccagtgtcctggtatcaggcctgcggggcctgggcgtggagatcgctaagaacatcatccttggtggggtcaaggctgttaccctacatgaccagggcactgcccagtgggctgatctttcctcccagttctacctgcgggaggaggacatcggtaaaaaccgggccgaggtatcacagccccgcctcgctgagctcaacagctatgtgcctgtcactgcctacactggacccctcgttgaggacttccttagtggtttccaggtggtggtgctcaccaacacccccctggaggaccagctgcgagtgggtgagttctgtcacaaccgtggcatcaagctggtggtggcagacacgcggggcctgtttgggcagctcttctgtgactttggagaggaaatgatcctcacagattccaatggggagcagccactcagtgctatggtttctatggttaccaaggacaaccccggtgtggttacctgcctggatgaggcccgacacgggtttgagagcggggactttgtctccttttcagaagtacagggcatggttgaactcaacggaaatcagcccatggagatcaaagtcctgggtccttatacctttagcatctgtgacacctccaacttctccgactacatccgtggaggcatcgtcagtcaggtcaaagtacctaagaagattagctttaaatccttggtggcctcactggcagaacctgactttgtggtgacggacttcgccaagttttctcgccctgcccagctgcacattggcttccaggccctgcaccagttctgtgctcagcatggccggccacctcggccccgcaatgaggaggatgcagcagaactggtagccttagcacaggctgtgaatgctcgagccctgccagcagtgcagcaaaataacctggacgaggacctcatccggaagctggcatatgtggctgctggggatctggcacccataaacgccttcattgggggcctggctgcccaggaagtcatgaaggcctgctccgggaagttcatgcccatcatgcagtggctatactttgatgcccttgagtgtctccctgaggacaaagaggtcctcacagaggacaagtgcctccagcgccagaaccgttatgacgggcaagtggctgtgtttggctcagacctgcaagagaagctgggcaagcagaagtatttcctggtgggtgcgggggccattggctgtgagctgctcaagaactttgccatgattgggctgggctgcggggagggtggagaaatcatcgttacagacatggacaccattgagaagtcaaatctgaatcgacagtttcttttccggccctgggatgtcacgaagttaaagtctgacacggctgctgcagctgtgcgccaaatgaatccacatatccgggtgacaagccaccagaaccgtgtgggtcctgacacggagcgcatctatgatgacgattttttccaaaacctagatggcgtggccaatgccctggacaacgtggatgcccgcatgtacatggaccgccgctgtgtctactaccggaagccactgctggagtcaggcacactgggcaccaaaggcaatgtgcaggtggtgatccccttcctgacagagtcgtacagttccagccaggacccacctgagaagtccatccccatctgtaccctgaagaacttccctaatgccatcgagcacaccctgcagtgggctcgggatgagtttgaaggcctcttcaagcagccagcagaaaatgtcaaccagtacctcacagaccccaagtttgtggagcgaacactgcggctggcaggcactcagcccttggaggtgctggaggctgtgcagcgcagcctggtgctgcagcgaccacagacctgggctgactgcgtgacctgggcctgccaccactggcacacccagtactcgaacaacatccggcagctgctgcacaacttccctcctgaccagctcacaagctcaggagcgccgttctggtctgggcccaaacgctgtccacacccgctcacctttgatgtcaacaatcccctgcatctggactatgtgatggctgctgccaacctgtttgcccagacctacgggctgacaggctctcaggaccgagctgctgtggccacattcctgcagtctgtgcaggtccccgaattcacccccaagtctggcgtcaagatccatgtttctgaccaggagctgcagagcgccaatgcctctgttgatgacagtcgtctagaggagctcaaagccactctgcccagcccagacaagctccctggattcaagatgtaccccattgactttgagaaggatgatgacagcaactttcatatggatttcatcgtggctgcatccaacctccgggcagaaaactatgacattccttctgcagaccggcacaagagcaagctgattgcagggaagatcatcccagccattgccacgaccacagcagccgtggttggccttgtgtgtctggagctgtacaaggttgtgcaggggcaccgacagcttgactcctacaagaatggtttcctcaacttggccctgcctttctttggtttctctgaaccccttgccgcaccacgtcaccagtactataaccaagagtggacattgtgggatcgctttgaggtacaagggctgcagcctaatggtgaggagatgaccctcaaacagttcctcgactattttaagacagagcacaaattagagatcaccatgctgtcccagggcgtgtccatgctctattccttcttcatgccagctgccaagctcaaggaacggttggatcagccgatgacagagattgtgagccgtgtgtcgaagcgaaagctgggccgccacgtgcgggcgctggtgcttgagctgtgctgtaacgacgagagcggcgaggatgtcgaggttccctatgtccgatacaccatccgctgaccccgtctgctcctctaggctggccccttgtccacccctctccacaccccttccagcccagggttcccatttggcttctggcagtggcccaactagccaagtctggtgttccctcatcatccccctacctgaacccctcttgccactgccttctaccttgtttgaaacctgaatcctaataaagaattaataactccc

SEQ ID NO: 2582 - DNA, 3483 bp, Homo sapiens
cttgtacgacagaggtggtttgctcttccgttgccccgtggcttcagctcatctttggcaggaaggcgaggcttccgcccggcacaggggatgtccagctcgccgctgtccaagaaacgtcgcgtgtccgggcctgatccaaagccgggttctaactgctcccctgcccagtccgtgttgtccgaagtgccctcggtgccaaccaacggaatggccaagaacggcagtgaagcagacatagacgagggcctttactcccggcagctgtatgtgttgggccatgaggcaatgaagcggctccagacatccagtgtcctggtatcaggcctgcggggcctgggcgtggagatcgctaagaacatcatccttggtggggtcaaggctgttaccctacatgaccagggcactgcccagtgggctgatctttcctcccagttctacctgcgggaggaggacatcggtaaaaaccgggccgaggtatcacagccccgcctcgctgagctcaacagctatgtgcctgtcactgcctacactggacccctcgttgaggacttccttagtggtttccaggtggtggtgctcaccaacacccccctggaggaccagctgcgagtgggtgagttctgtcacaaccgtggcatcaagctggtggtggcagacacgcggggcctgtttgggcagctcttctgtgactttggagaggaaatgatcctcacagattccaatggggagcagccactcagtgctatggtttctatggttaccaaggacaaccccggtgtggttacctgcctggatgaggcccgacacgggtttgagagcggggactttgtctccttttcagaagtacagggcatggttgaactcaacggaaatcagcccatggagatcaaagtcctgggtccttatacctttagcatctgtgacacctccaacttctccgactacatccgtggaggcatcgtcagtcaggtcaaagtacctaagaagattagctttaaatccttggtggcctcactggcagaacctgactttgtggtgacggacttcgccaagttttctcgccctgcccagctgcacattggcttccaggccctgcaccagttctgtgctcagcatggccggccacctcggccccgcaatgaggaggatgcagcagaactggtagccttagcacaggctgtgaatgctcgagccctgccagcagtgcagcaaaataacctggacgaggacctcatccggaagctggcatatgtggctgctggggatctggcacccataaacgccttcattgggggcctggctgcccaggaagtcatgaaggcctgctccgggaagttcatgcccatcatgcagtggctatactttgatgcccttgagtgtctccctgaggacaaagaggtcctcacagaggacaagtgcctccagcgccagaaccgttatgacgggcaagtggctgtgtttggctcagacctgcaagagaagctgggcaagcagaagtatttcctggtgggtgcgggggccattggctgtgagctgctcaagaactttgccatgattgggctgggctgcggggagggtggagaaatcatcgttacagacatggacaccattgagaagtcaaatctgaatcgacagtttcttttccggccctgggatgtcacgaagttaaagtctgacacggctgctgcagctgtgcgccaaatgaatccacatatccgggtgacaagccaccagaaccgtgtgggtcctgacacggagcgcatctatgatgacgattttttccaaaacctagatggcgtggccaatgccctggacaacgtggatgcccgcatgtacatggaccgccgctgtgtctactaccggaagccactgctggagtcaggcacactgggcaccaaaggcaatgtgcaggtggtgatccccttcctgacagagtcgtacagttccagccaggacccacctgagaagtccatccccatctgtaccctgaagaacttccctaatgccatcgagcacaccctgcagtgggctcgggatgagtttgaaggcctcttcaagcagccagcagaaaatgtcaaccagtacctcacagaccccaagtttgtggagcgaacactgcggctggcaggcactcagcccttggaggtgctggaggctgtgcagcgcagcctggtgctgcagcgaccacagacctgggctgactgcgtgacctgggcctgccaccactggcacacccagtactcgaacaacatccggcagctgctgcacaacttccctcctgaccagctcacaagctcaggagcgccgttctggtctgggcccaaacgctgtccacacccgctcacctttgatgtcaacaatcccctgcatctggactatgtgatggctgctgccaacctgtttgcccagacctacgggctgacaggctctcaggaccgagctgctgtggccacattcctgcagtctgtgcaggtccccgaattcacccccaagtctggcgtcaagatccatgtttctgaccaggagctgcagagcgccaatgcctctgttgatgacagtcgtctagaggagctcaaagccactctgcccagcccagacaagctccctggattcaagatgtaccccattgactttgagaaggatgatgacagcaactttcatatggatttcatcgtggctgcatccaacctccgggcagaaaactatgacattccttctgcagaccggcacaagagcaagctgattgcagggaagatcatcccagccattgccacgaccacagcagccgtggttggccttgtgtgtctggagctgtacaaggttgtgcaggggcaccgacagcttgactcctacaagaatggtttcctcaacttggccctgcctttctttggtttctctgaaccccttgccgcaccacgtcaccagtactataaccaagagtggacattgtgggatcgctttgaggtacaagggctgcagcctaatggtgaggagatgaccctcaaacagttcctcgactattttaagacagagcacaaattagagatcaccatgctgtcccagggcgtgtccatgctctattccttcttcatgccagctgccaagctcaaggaacggttggatcagccgatgacagagattgtgagccgtgtgtcgaagcgaaagctgggccgccacgtgcgggcgctggtgcttgagctgtgctgtaacgacgagagcggcgaggatgtcgaggttccctatgtccgatacaccatccgctgaccccgtctgctcctctaggctggccccttgtccacccctctccacaccccttccagcccagggttcccatttggcttctggcagtggcccaactagccaagtctggtgttccctcatcatccccctacctgaacccctcttgccactgccttctaccttgtttgaaacctgaatcctaataaagaattaataactcccaaaaaaaaaaaaaaaaaa

SEQ ID NO: 2583 - DNA, 461 bp, Homo sapiens
ctcgagtccgggccgcaagtcccagacgctgcccatggaggcgtccagcgagccgccgctggatgctaagtccgatgtcaccaaccagcttgtagattttcagtggaaactgggtatggctgtgagctcagacacttgcagatctcttaagtatccttacgttgcagtgatgctaaaagtggcagatcattcaggccaagtaaagaccaagtgctttgaaatgacgattccacagtttcagaatttctacagacagttcaaggaaattgctgcagttattgaaacggtgtgaagacggattctttggttgataaattgctatcattctaaagtcatggacttcactttcggcaacaaaactaaataaggatggaacatttattgaatgaaaaatgcacttttgtttttccatttttttaaataataaaaatcagacaaacaggaaaaaaaaaaaaaaaaaa

SEQ ID NO: 2584 - DNA, 958 bp, Homo sapiens
gggggcgttctctcgagtccgggccgcaagtcccagacgctgcccatggaggcgtccagcgagccgccgctggatgctaagtccgatgtcaccaaccagcttgtagattttcagtggaaactgggtatggctgtgagctcagacacttgcagatctcttaagtatccttacgttgcagtgatgctaaaagtggcagatcattcaggccaagtaaagaccaagtgctttgaaatgacgattccacagtttcagcctcagctcctggcaacctccagtctcctttctgcttctaatttctacagacagttcaaggaaattgctgcagttattgaaacggtgtgaagacggattctttggttgataaattgctatcattctaaagtcatggacttcactttcggcaacaaaactaaataaggatggaacatttattgaatgaaaaatgcacttttgtttttccatttttttaaataataaaaatcagacaaacaggaactgggtagtggtgatgaatgcaaaactttgtgaatgtgctttataaaagtgataattagacactttagaggatatacttggtgataatgtgaatgatgtaatcagactaacagttgaatcattgctgttggaggcagcacaaatttatgtgttacaacagtagtttaaaaacttgtactggatggaacccattttataaacagtcttatttggagtcatgtatataaaaatatatataaattagaaaagtagtatttgattaggataactttacaaattcaatagtatagccatcacttattataatggcaatcagaagagtgaggcttcttttttcaaacttttgtaatcagattaagattgaccattgctcctttacacagtattagtctagcattcaattatttctgttattaatggttgtagaaagttcaaatacatacgcagagttggaaaaaaaaaa

SEQ ID NO: 2585 - DNA, 5911 bp, Homo sapiens
cttgttcctccgccgttgcaatgaactattttctctcagtccggggtggtacttttgagtaaccccttccaaatagaaacccataccagcctatttagctcggtctccactatatgaaggtttcctagggcttggtgtgacgcaacgtatacgaggctcggaaggacaccccgcggaaggatccggtttgttgtggtgtggggaggggagacgctgacaaaccaagatggcggcggcggcgctgaaggccgcggcgtttgggaggtaactgtggtggcgaaggctgcggtagtggggaggcaaccacacagtttggaagaaacggagcgggacgaagaggcggtagcagtagagtcagcctgagactctcagagcacgacggccacacgcccccttaggccctcggcgggcggcggctgcccgcttaggcctagcctccgagcattgcctcggcttcaaacagcggcggcgccatgagtccttaagggcggtccaagcctcccgatccctggcccagacctcgggcccaccatggagccggggtccgacgatttcctaccgccaccggagtgcccggtgttcgagcctagctgggccgagttccgagaccctcttggctacatcgcgaaaatcaggcccatcgcagagaaatcgggcatttgcaagatccgcccacccgcggactggcagccaccctttgctgtggaagtggacaacttcaggtttaccccccgaatccagaggctgaatgagctagaggcccagacgagagtgaaactgaactacttggaccagattgccaaattctgggaaatccagggctcctccttaaagattcccaatgtagaacggcggatcttggacctctacagtctcagcaaaattgtggtggaggaaggtggttatgaagctatctgcaaggaccgtcggtgggctcgggtagcccagcgcctcaactatccaccaggcaaaaatattggctccttgctacgctcccactacgaacgcattgtttatccctatgaaatgtaccagtctggagccaaccttgtgcagtgtaacacacgtccatttgataatgaggagaaggacaaggaatacaaaccccacagcatccccctacgacagtctgtgcagccttccaagttcaacagctatggccggcgggccaagagactgcagcctgatccggaacccacagaggaagacattgagaagaatccagagctgaaaaagctacagatctatggggcaggccccaagatgatgggcctgggcctcatggccaaagacaagactctgcggaagaaagataaggaggggcctgagtgtccccccacagtagtggtgaaggaggagttaggtggggatgtgaaggtggagtcaacatcgcctaagaccttcctggagagcaaggaggagctgagtcacagcccagaaccctgcaccaagatgaccatgaggctacggaggaaccacagcaatgcccagtttattgagtcatatgtctgccggatgtgttctcgaggggatgaggatgacaagctcctgctgtgtgatggctgtgatgacaactaccacatcttctgcctgctgcctcctctgcctgagatccccaagggtgtctggcggtgcccaaagtgtgtcatggcggagtgtaagcggcccccagaagcctttggctttgagcaggctacccgggaatacactctgcagagctttggcgagatggccgactcctttaaagctgactacttcaacatgcccgtgcatatggtgcccacagaacttgtggagaaggagttctggaggctggtaaatagcattgaggaagatgtgactgttgagtatggagctgacatccattccaaagaatttggcagcggtttccctgtcagtgacagtaaacggcacctaacccccgaagaggaggagtatgctaccagtggttggaacctaaatgtgatgccggtgttggaacagtctgtactgtgccacatcaatgcagatatctctggcatgaaggtgccctggctctacgtgggcatggtcttctcagccttttgctggcatattgaggatcactggagttactccattaactacctccactggggtgagccgaagacctggtatggggtgccctcacttgcagcagaacatttggaagaagtgatgaagaagctgacacctgaactatttgatagccagcctgacctcctgcaccaacttgtcaccctcatgaatcccaacaccctcatgtcccatggtgtgccagttgtccgcacaaaccagtgtgcaggagagtttgtcatcaccttcccccgtgcttaccacagcggcttcaaccaaggctacaactttgccgaggctgtcaacttttgcactgctgactggttgcctgctgggcgccagtgcattgagcactaccgccggctccggagatactgcgtcttctcccatgaggagcttatctgcaagatggctgcctgcccagagaagctagacctgaacctggcggcagctgtgcataaggagatgttcatcatggtgcaagaagagcggcgtctacgaaaggccctgctggagaagggtatcacagaggctgagcgagaggctttcgagctgctcccagatgatgagcgccagtgtatcaagtgcaagactacgtgtttcctgtcagccctggcctgctacgactgcccagacggccttgtctgcctttcccacatcaatgatctctgcaagtgctccagtagccggcagtacctgcggtatcggtataccttggatgagcttcctgccatgctgcataagctgaaggttcgggctgagtcctttgacacctgggccaacaaagtgcgagtggccctggaggtggaggatgggcggaagcgcagccttgaagaactgagggcactagagtctgaagcccgtgagcggaggtttcctaatagtgagctgctgcagcaactaaagaactgcctgagtgaggcagaggcttgcgtgtcccgagctctgggactggtcagcggccaggaagctggcccccacagggtggctggtctacagatgaccctgactgagctccgggcctttctggaccagatgaacaacctgccttgcgccatgcaccagattggggatgtcaagggtgttctggaacaggtggaggcctaccaggctgaggctcgtgaggccctggcctcactgccctccagtccagggctactgcagtccctgttggagagggggcggcagctgggggtggaggtgcctgaggcccagcagctccagcggcaggtggaacaggcgcgatggctggatgaggtgaaacgcacactggccccctcagcccgaaggggcaccttggctgtcatgcgaggactgttggtcgcgggtgccagtgtagcccctagccctgctgtggataaagcccaggccgagctgcaggaactgctgaccattgctgaacgctgggaggagaaagcccacctctgcctggaggccaggcagaagcatccaccagccacacttgaggccataatccgtgaagcggaaaacatccctgttcacctgcccaacatccaggctctcaaggaggctcttgctaaggcccgggcctggattgctgatgttgatgagatccaaaatggtgaccactacccctgcctggatgacttggagggcctagtagctgtgggccgggacctacctgtggggctggaggagctgagacagctagagctacaggtactgacagcgcactcctggagggagaaggcctccaagaccttcctcaagaaaaattcttgctacacgctgctggaggttctctgcccatgtgcagatgccggctcagacagcaccaagcgcagccggtggatggagaaggagctggggttgtacaaatctgacacagagctgctggggctgtctgcgcaggacctcagggacccaggctctgtgatcgtggccttcaaggagggggaacagaaggagaaggagggtatcctgcagctgcgtcgcaccaattcggccaagcccagtccactggcatcatcgagcacggcctcctctacaacctctatctgtgtgtgtgggcaggtgctggctggggcgggacgtctgcagtgtgacctgtgtcaggactggttccatgggcggtgtgtgtcagtgcctcgcctcctcagctctccgaggcccaatcccacctcatccccactgctggcctggtgggaatgggacaccaaattcctgtgtccactgtgtatgcgctcaaggcgcccgcgcctggagaccatcctggcactgctggtagccctgcagagactgcctgtgcggctgcccgagggcgaggccctgcagtgcctcacagagagggccatcagctggcaaggccgcgccaggcaggctctggcctctgaagatgtgactgctcttttgggacggctggctgagctccgccaacggctacaggctgaacctagacctgaggagcctcctaactaccctgcagcccctgcttctgaccccctcagagagggcagtggcaaggatatgcctaaggtccagggcttactggagaatggagacagtgtgaccagtcctgagaaggtagccccggaggagggctcaggtaagagagatctggagctgctgtcctcgctgttgccacagttgactggccctgtgttggaactgcctgaggcaacccgggcccccttggaggagctcatgatggagggggacctgctcgaggtgaccctggatgagaaccacagcatatggcagctgctgcaggctggacagcccccagacctggagaggatccgcacacttctggagctggagaaggcagagcgtcacgggagtcgggctcggggccgggccctggagaggcggcggcggcggaaggtggatcggggtggggagggcgatgacccagcccgagaggagctagagccaaagagggtacggagctcagggccagaggctgaggaggtccaggaggaggaagagctggaggaggagactgggggtgagggcccccctgcacccatccccaccactggcagccccagcacccaggagaaccagaatggcttggaaccggcggaagggaccacttcaggcccctcggcccctttctccactctgactccccggctgcatctgccctgcccacagcagccgcctcagcaacagttgtgacagtggctgagcctagcacagaccctgacagagacccccctcggcctcaaggatcctctttctgaccatcaagcctgcttcttggggggtgggcgggtagggggggtggccatccctgctacccgcccacccctgagtcccttgacttttgtattctgactccaaggtattgttcagacctcagctcctgggggccggcccctggagtcttccctccctggtagcctctaaccagcattcccagacacctgaggcagatagatggatgggctggtgggcaggggggtggctggggctgggccatcaccattccagagacaaggccagtgtatatgcaaactgggggactctcctcccttctctccccagttctggtcctggccaggccatgctacactaacccctgcccccactctcctcccctcttttccttccttcctacccccttctccctctcccttcccctgactgttccacccaggaggaggaaacttcacatagccgtgctcacagttttttattttaaaggaatttggctggggagctgaacagggctccctgtgatctgaagaaagcttttggtgcttgtcctcacaaccacctcagtcctccctccctgtcctcccctgtctcctttcctcctcctgggttcatgttgtaataaaagaagattgttggtgtgtaattaatttgttca

SEQ ID NO: 2586 - DNA, 1355 bp, Homo sapiens
cagtggctggtaggcagtggctgggaggcagcggcccaattagtgtcgtgcggcccgtggcgaggcgaggtccggggagcgagcgagcaagcaaggcgggaggggtggccggagctgcggcggctggcacaggaggaggagcccgggcgggcgaggggcggccggagagcgccagggcctgagctgccggagcggcgcctgtgagtgagtgcagaaagcaggcgcccgcgcgctagccgtggcaggagcagcccgcacgccgcgctctctccctgggcgacctgcagtttgcaatatgactttggaggaattctcggctggagagcagaagaccgaaaggatggataaggtgggggatgccctggaggaagtgctcagcaaagccctgagtcagcgcacgatcactgtcggggtgtacgaagcggccaagctgctcaacgtcgaccccgataacgtggtgttgtgcctgctggcggcggacgaggacgacgacagagatgtggctctgcagatccacttcaccctgatccaggcgttttgctgcgagaacgacatcaacatcctgcgcgtcagcaacccgggccggctggcggagctcctgctcttggagaccgacgctggccccgcggcgagcgagggcgccgagcagcccccggacctgcactgcgtgctggtgacgaatccacattcatctcaatggaaggatcctgccttaagtcaacttatttgtttttgccgggaaagtcgctacatggatcaatgggttccagtgattaatctccctgaacggtgatggcatctgaatgaaaataactgaaccaaattgcactgaagtttttgaaatacctttgtagttactcaagcagttactccctacactgatgcaaggattacagaaactgatgccaaggggctgagtgagttcaactacatgttctgggggcccggagatagatgactttgcagatggaaagaggtgaaaatgaagaaggaagctgtgttgaaacagaaaaataagtcaaaaggaacaaaaattacaaagaaccatgcaggaaggaaaactatgtattaatttagaatggttgagttacattaaaataaaccaaatatgttaaagtttaagtgtgcagccatagtttgggtatttttggtttatatgccctcaagtaaaagaaaagccgaaagggttaatcatatttgaaaaccatattttattgtattttgatgagatattaaattctcaaagttttattataaattctactaagttattttatgacatgaaaagttatttatgctataaattttttgaaacacaatacctacaataaactggtatgaataattgcatcatt

SEQ ID NO: 2587 - DNA, 2755 bp, Homo sapiens
cctacccgcgcgcaggccaagttgctgaatcaatggagccctccccaacccgggcgttccccagcgaggcttccttcccatcctcctgaccaccggggcttttcgtgagctcgtctctgatctcgcgcaagagtgacacacaggtgttcaaagacgcttctggggagtgagggaagcggtttacgagtgacttggctggagcctcaggggcgggcactggcacggaacacaccctgaggccagccctggctgcccaggcggagctgcctcttctcccgcgggttggtggacccgctcagtacggagttggggaagctctttcacttcggaggattgctcaacaaccatgctgggcatctggaccctcctacctctggttcttacgtctgttgctagattatcgtccaaaagtgttaatgcccaagtgactgacatcaactccaagggattggaattgaggaagactgttactacagttgagactcagaacttggaaggcctgcatcatgatggccaattctgccataagccctgtcctccaggtgaaaggaaagctagggactgcacagtcaatggggatgaaccagactgcgtgccctgccaagaagggaaggagtacacagacaaagcccatttttcttccaaatgcagaagatgtagattgtgtgatgaaggacatggcttagaagtggaaataaactgcacccggacccagaataccaagtgcagatgtaaaccaaactttttttgtaactctactgtatgtgaacactgtgacccttgcaccaaatgtgaacatggaatcatcaaggaatgcacactcaccagcaacaccaagtgcaaagaggaaggatccagatctaacttggggtggctttgtcttcttcttttgccaattccactaattgtttgggtgaagagaaaggaagtacagaaaacatgcagaaagcacagaaaggaaaaccaaggttctcatgaatctccaaccttaaatcctgaaacagtggcaataaatttatctgatgttgacttgagtaaatatatcaccactattgctggagtcatgacactaagtcaagttaaaggctttgttcgaaagaatggtgtcaatgaagccaaaatagatgagatcaagaatgacaatgtccaagacacagcagaacagaaagttcaactgcttcgtaattggcatcaacttcatggaaagaaagaagcgtatgacacattgattaaagatctcaaaaaagccaatctttgtactcttgcagagaaaattcagactatcatcctcaaggacattactagtgactcagaaaattcaaacttcagaaatgaaatccaaagcttggtctagagtgaaaaacaacaaattcagttctgagtatatgcaattagtgtttgaaaagattcttaatagctggctgtaaatactgcttggttttttactgggtacattttatcatttattagcgctgaagagccaacatatttgtagatttttaatatctcatgattctgcctccaaggatgtttaaaatctagttgggaaaacaaacttcatcaagagtaaatgcagtggcatgctaagtacccaaataggagtgtatgcagaggatgaaagattaagattatgctctggcatctaacatatgattctgtagtatgaatgtaatcagtgtatgttagtacaaatgtctatccacaggctaaccccactctatgaatcaatagaagaagctatgaccttttgctgaaatatcagttactgaacaggcaggccactttgcctctaaattacctctgataattctagagattttaccatatttctaaactttgtttataactctgagaagatcatatttatgtaaagtatatgtatttgagtgcagaatttaaataaggctctacctcaaagacctttgcacagtttattggtgtcatattatacaatatttcaattgtgaattcacatagaaaacattaaattataatgtttgactattatatatgtgtatgcattttactggctcaaaactacctacttctttctcaggcatcaaaagcattttgagcaggagagtattactagagctttgccacctctccatttttgccttggtgctcatcttaatggcctaatgcacccccaaacatggaaatatcaccaaaaaatacttaatagtccaccaaaaggcaagactgcccttagaaattctagcctggtttggagatactaactgctctcagagaaagtagctttgtgacatgtcatgaacccatgtttgcaatcaaagatgataaaatagattcttatttttcccccacccccgaaaatgttcaataatgtcccatgtaaaacctgctacaaatggcagcttatacatagcaatggtaaaatcatcatctggatttaggaattgctcttgtcatacccccaagtttctaagatttaagattctccttactactatcctacgtttaaatatctttgaaagtttgtattaaatgtgaattttaagaaataatatttatatttctgtaaatgtaaactgtgaagatagttataaactgaagcagatacctggaaccacctaaagaacttccatttatggaggatttttttgccccttgtgtttggaattataaaatataggtaaaagtacgtaattaaataatgtttttggtaaaaaaaaaaaaaaaaaaaaaaaaaaaaaaaaaaaaaaaaaaaaaaaaaaaaaaaaaaaaaaaaaaa

SEQ ID NO: 2588 - DNA, 2692 bp, Homo sapiens
cctacccgcgcgcaggccaagttgctgaatcaatggagccctccccaacccgggcgttccccagcgaggcttccttcccatcctcctgaccaccggggcttttcgtgagctcgtctctgatctcgcgcaagagtgacacacaggtgttcaaagacgcttctggggagtgagggaagcggtttacgagtgacttggctggagcctcaggggcgggcactggcacggaacacaccctgaggccagccctggctgcccaggcggagctgcctcttctcccgcgggttggtggacccgctcagtacggagttggggaagctctttcacttcggaggattgctcaacaaccatgctgggcatctggaccctcctacctctggttcttacgtctgttgctagattatcgtccaaaagtgttaatgcccaagtgactgacatcaactccaagggattggaattgaggaagactgttactacagttgagactcagaacttggaaggcctgcatcatgatggccaattctgccataagccctgtcctccaggtgaaaggaaagctagggactgcacagtcaatggggatgaaccagactgcgtgccctgccaagaagggaaggagtacacagacaaagcccatttttcttccaaatgcagaagatgtagattgtgtgatgaaggacatggcttagaagtggaaataaactgcacccggacccagaataccaagtgcagatgtaaaccaaactttttttgtaactctactgtatgtgaacactgtgacccttgcaccaaatgtgaacatggaatcatcaaggaatgcacactcaccagcaacaccaagtgcaaagaggaagtgaagagaaaggaagtacagaaaacatgcagaaagcacagaaaggaaaaccaaggttctcatgaatctccaaccttaaatcctgaaacagtggcaataaatttatctgatgttgacttgagtaaatatatcaccactattgctggagtcatgacactaagtcaagttaaaggctttgttcgaaagaatggtgtcaatgaagccaaaatagatgagatcaagaatgacaatgtccaagacacagcagaacagaaagttcaactgcttcgtaattggcatcaacttcatggaaagaaagaagcgtatgacacattgattaaagatctcaaaaaagccaatctttgtactcttgcagagaaaattcagactatcatcctcaaggacattactagtgactcagaaaattcaaacttcagaaatgaaatccaaagcttggtctagagtgaaaaacaacaaattcagttctgagtatatgcaattagtgtttgaaaagattcttaatagctggctgtaaatactgcttggttttttactgggtacattttatcatttattagcgctgaagagccaacatatttgtagatttttaatatctcatgattctgcctccaaggatgtttaaaatctagttgggaaaacaaacttcatcaagagtaaatgcagtggcatgctaagtacccaaataggagtgtatgcagaggatgaaagattaagattatgctctggcatctaacatatgattctgtagtatgaatgtaatcagtgtatgttagtacaaatgtctatccacaggctaaccccactctatgaatcaatagaagaagctatgaccttttgctgaaatatcagttactgaacaggcaggccactttgcctctaaattacctctgataattctagagattttaccatatttctaaactttgtttataactctgagaagatcatatttatgtaaagtatatgtatttgagtgcagaatttaaataaggctctacctcaaagacctttgcacagtttattggtgtcatattatacaatatttcaattgtgaattcacatagaaaacattaaattataatgtttgactattatatatgtgtatgcattttactggctcaaaactacctacttctttctcaggcatcaaaagcattttgagcaggagagtattactagagctttgccacctctccatttttgccttggtgctcatcttaatggcctaatgcacccccaaacatggaaatatcaccaaaaaatacttaatagtccaccaaaaggcaagactgcccttagaaattctagcctggtttggagatactaactgctctcagagaaagtagctttgtgacatgtcatgaacccatgtttgcaatcaaagatgataaaatagattcttatttttcccccacccccgaaaatgttcaataatgtcccatgtaaaacctgctacaaatggcagcttatacatagcaatggtaaaatcatcatctggatttaggaattgctcttgtcatacccccaagtttctaagatttaagattctccttactactatcctacgtttaaatatctttgaaagtttgtattaaatgtgaattttaagaaataatatttatatttctgtaaatgtaaactgtgaagatagttataaactgaagcagatacctggaaccacctaaagaacttccatttatggaggatttttttgccccttgtgtttggaattataaaatataggtaaaagtacgtaattaaataatgtttttggtaaaaaaaaaaaaaaaaaaaaaaaaaaaaaaaaaaaaaaaaaaaaaaaaaaaaaaaaaaaaaaaaaaa

SEQ ID NO: 2589 - DNA, 2730 bp, Homo sapiens
cctacccgcgcgcaggccaagttgctgaatcaatggagccctccccaacccgggcgttccccagcgaggcttccttcccatcctcctgaccaccggggcttttcgtgagctcgtctctgatctcgcgcaagagtgacacacaggtgttcaaagacgcttctggggagtgagggaagcggtttacgagtgacttggctggagcctcaggggcgggcactggcacggaacacaccctgaggccagccctggctgcccaggcggagctgcctcttctcccgcgggttggtggacccgctcagtacggagttggggaagctctttcacttcggaggattgctcaacaaccatgctgggcatctggaccctcctacctctggttcttacgtctgttgctagattatcgtccaaaagtgttaatgcccaagtgactgacatcaactccaagggattggaattgaggaagactgttactacagttgagactcagaacttggaaggcctgcatcatgatggccaattctgccataagccctgtcctccaggtgaaaggaaagctagggactgcacagtcaatggggatgaaccagactgcgtgccctgccaagaagggaaggagtacacagacaaagcccatttttcttccaaatgcagaagatgtagattgtgtgatgaaggacatggcttagaagtggaaataaactgcacccggacccagaataccaagtgcagatgtaaaccaaactttttttgtaactctactgtatgtgaacactgtgacccttgcaccaaatgtgaacatggaatcatcaaggaatgcacactcaccagcaacaccaagtgcaaagaggaaggatccagatctaacttggggtggctttgtcttcttcttttgccaattccactaattgtttgggtgaagagaaaggaagtacagaaaacatgcagaaagcacagaaaggaaaaccaaggttctcatgaatctccaaccttaaatcctatgttgacttgagtaaatatatcaccactattgctggagtcatgacactaagtcaagttaaaggctttgttcgaaagaatggtgtcaatgaagccaaaatagatgagatcaagaatgacaatgtccaagacacagcagaacagaaagttcaactgcttcgtaattggcatcaacttcatggaaagaaagaagcgtatgacacattgattaaagatctcaaaaaagccaatctttgtactcttgcagagaaaattcagactatcatcctcaaggacattactagtgactcagaaaattcaaacttcagaaatgaaatccaaagcttggtctagagtgaaaaacaacaaattcagttctgagtatatgcaattagtgtttgaaaagattcttaatagctggctgtaaatactgcttggttttttactgggtacattttatcatttattagcgctgaagagccaacatatttgtagatttttaatatctcatgattctgcctccaaggatgtttaaaatctagttgggaaaacaaacttcatcaagagtaaatgcagtggcatgctaagtacccaaataggagtgtatgcagaggatgaaagattaagattatgctctggcatctaacatatgattctgtagtatgaatgtaatcagtgtatgttagtacaaatgtctatccacaggctaaccccactctatgaatcaatagaagaagctatgaccttttgctgaaatatcagttactgaacaggcaggccactttgcctctaaattacctctgataattctagagattttaccatatttctaaactttgtttataactctgagaagatcatatttatgtaaagtatatgtatttgagtgcagaatttaaataaggctctacctcaaagacctttgcacagtttattggtgtcatattatacaatatttcaattgtgaattcacatagaaaacattaaattataatgtttgactattatatatgtgtatgcattttactggctcaaaactacctacttctttctcaggcatcaaaagcattttgagcaggagagtattactagagctttgccacctctccatttttgccttggtgctcatcttaatggcctaatgcacccccaaacatggaaatatcaccaaaaaatacttaatagtccaccaaaaggcaagactgcccttagaaattctagcctggtttggagatactaactgctctcagagaaagtagctttgtgacatgtcatgaacccatgtttgcaatcaaagatgataaaatagattcttatttttcccccacccccgaaaatgttcaataatgtcccatgtaaaacctgctacaaatggcagcttatacatagcaatggtaaaatcatcatctggatttaggaattgctcttgtcatacccccaagtttctaagatttaagattctccttactactatcctacgtttaaatatctttgaaagtttgtattaaatgtgaattttaagaaataatatttatatttctgtaaatgtaaactgtgaagatagttataaactgaagcagatacctggaaccacctaaagaacttccatttatggaggatttttttgccccttgtgtttggaattataaaatataggtaaaagtacgtaattaaataatgtttttggtaaaaaaaaaaaaaaaaaaaaaaaaaaaaaaaaaaaaaaaaaaaaaaaaaaaaaaaaaaaaaaaaaaa

SEQ ID NO: 2590 - DNA, 2646 bp, Homo sapiens
cctacccgcgcgcaggccaagttgctgaatcaatggagccctccccaacccgggcgttccccagcgaggcttccttcccatcctcctgaccaccggggcttttcgtgagctcgtctctgatctcgcgcaagagtgacacacaggtgttcaaagacgcttctggggagtgagggaagcggtttacgagtgacttggctggagcctcaggggcgggcactggcacggaacacaccctgaggccagccctggctgcccaggcggagctgcctcttctcccgcgggttggtggacccgctcagtacggagttggggaagctctttcacttcggaggattgctcaacaaccatgctgggcatctggaccctcctacctctggttcttacgtctgttgctagattatcgtccaaaagtgttaatgcccaagtgactgacatcaactccaagggattggaattgaggaagactgttactacagttgagactcagaacttggaaggcctgcatcatgatggccaattctgccataagccctgtcctccaggtgaaaggaaagctagggactgcacagtcaatggggatgaaccagactgcgtgccctgccaagaagggaaggagtacacagacaaagcccatttttcttccaaatgcagaagatgtagattgtgtgatgaaggacatgatgtgaacatggaatcatcaaggaatgcacactcaccagcaacaccaagtgcaaagaggaaggatccagatctaacttggggtggctttgtcttcttcttttgccaattccactaattgtttgggtgaagagaaaggaagtacagaaaacatgcagaaagcacagaaaggaaaaccaaggttctcatgaatctccaaccttaaatcctgaaacagtggcaataaatttatctgatgttgacttgagtaaatatatcaccactattgctggagtcatgacactaagtcaagttaaaggctttgttcgaaagaatggtgtcaatgaagccaaaatagatgagatcaagaatgacaatgtccaagacacagcagaacagaaagttcaactgcttcgtaattggcatcaacttcatggaaagaaagaagcgtatgacacattgattaaagatctcaaaaaagccaatctttgtactcttgcagagaaaattcagactatcatcctcaaggacattactagtgactcagaaaattcaaacttcagaaatgaaatccaaagcttggtctagagtgaaaaacaacaaattcagttctgagtatatgcaattagtgtttgaaaagattcttaatagctggctgtaaatactgcttggttttttactgggtacattttatcatttattagcgctgaagagccaacatatttgtagatttttaatatctcatgattctgcctccaaggatgtttaaaatctagttgggaaaacaaacttcatcaagagtaaatgcagtggcatgctaagtacccaaataggagtgtatgcagaggatgaaagattaagattatgctctggcatctaacatatgattctgtagtatgaatgtaatcagtgtatgttagtacaaatgtctatccacaggctaaccccactctatgaatcaatagaagaagctatgaccttttgctgaaatatcagttactgaacaggcaggccactttgcctctaaattacctctgataattctagagattttaccatatttctaaactttgtttataactctgagaagatcatatttatgtaaagtatatgtatttgagtgcagaatttaaataaggctctacctcaaagacctttgcacagtttattggtgtcatattatacaatatttcaattgtgaattcacatagaaaacattaaattataatgtttgactattatatatgtgtatgcattttactggctcaaaactacctacttctttctcaggcatcaaaagcattttgagcaggagagtattactagagctttgccacctctccatttttgccttggtgctcatcttaatggcctaatgcacccccaaacatggaaatatcaccaaaaaatacttaatagtccaccaaaaggcaagactgcccttagaaattctagcctggtttggagatactaactgctctcagagaaagtagctttgtgacatgtcatgaacccatgtttgcaatcaaagatgataaaatagattcttatttttcccccacccccgaaaatgttcaataatgtcccatgtaaaacctgctacaaatggcagcttatacatagcaatggtaaaatcatcatctggatttaggaattgctcttgtcatacccccaagtttctaagatttaagattctccttactactatcctacgtttaaatatctttgaaagtttgtattaaatgtgaattttaagaaataatatttatatttctgtaaatgtaaactgtgaagatagttataaactgaagcagatacctggaaccacctaaagaacttccatttatggaggatttttttgccccttgtgtttggaattataaaatataggtaaaagtacgtaattaaataatgtttttggtaaaaaaaaaaaaaaaaaaaaaaaaaaaaaaaaaaaaaaaaaaaaaaaaaaaaaaaaaaaaaaaaaaa

SEQ ID NO: 2591 - DNA, 2563 bp, Homo sapiens
cctacccgcgcgcaggccaagttgctgaatcaatggagccctccccaacccgggcgttccccagcgaggcttccttcccatcctcctgaccaccggggcttttcgtgagctcgtctctgatctcgcgcaagagtgacacacaggtgttcaaagacgcttctggggagtgagggaagcggtttacgagtgacttggctggagcctcaggggcgggcactggcacggaacacaccctgaggccagccctggctgcccaggcggagctgcctcttctcccgcgggttggtggacccgctcagtacggagttggggaagctctttcacttcggaggattgctcaacaaccatgctgggcatctggaccctcctacctctggttcttacgtctgttgctagattatcgtccaaaagtgttaatgcccaagtgactgacatcaactccaagggattggaattgaggaagactgttactacagttgagactcagaacttggaaggcctgcatcatgatggccaattctgccataagccctgtcctccaggtgaaaggaaagctagggactgcacagtcaatggggatgaaccagactgcgtgccctgccaagaagggaaggagtacacagacaaagcccatttttcttccaaatgcagaagatgtagattgtgtgatgaaggacatgatgtgaacatggaatcatcaaggaatgcacactcaccagcaacaccaagtgcaaagaggaaggatccagatctaacttggggtggctttgtcttcttcttttgccaattccactaattgtttggggaaacagtggcaataaatttatctgatgttgacttgagtaaatatatcaccactattgctggagtcatgacactaagtcaagttaaaggctttgttcgaaagaatggtgtcaatgaagccaaaatagatgagatcaagaatgacaatgtccaagacacagcagaacagaaagttcaactgcttcgtaattggcatcaacttcatggaaagaaagaagcgtatgacacattgattaaagatctcaaaaaagccaatctttgtactcttgcagagaaaattcagactatcatcctcaaggacattactagtgactcagaaaattcaaacttcagaaatgaaatccaaagcttggtctagagtgaaaaacaacaaattcagttctgagtatatgcaattagtgtttgaaaagattcttaatagctggctgtaaatactgcttggttttttactgggtacattttatcatttattagcgctgaagagccaacatatttgtagatttttaatatctcatgattctgcctccaaggatgtttaaaatctagttgggaaaacaaacttcatcaagagtaaatgcagtggcatgctaagtacccaaataggagtgtatgcagaggatgaaagattaagattatgctctggcatctaacatatgattctgtagtatgaatgtaatcagtgtatgttagtacaaatgtctatccacaggctaaccccactctatgaatcaatagaagaagctatgaccttttgctgaaatatcagttactgaacaggcaggccactttgcctctaaattacctctgataattctagagattttaccatatttctaaactttgtttataactctgagaagatcatatttatgtaaagtatatgtatttgagtgcagaatttaaataaggctctacctcaaagacctttgcacagtttattggtgtcatattatacaatatttcaattgtgaattcacatagaaaacattaaattataatgtttgactattatatatgtgtatgcattttactggctcaaaactacctacttctttctcaggcatcaaaagcattttgagcaggagagtattactagagctttgccacctctccatttttgccttggtgctcatcttaatggcctaatgcacccccaaacatggaaatatcaccaaaaaatacttaatagtccaccaaaaggcaagactgcccttagaaattctagcctggtttggagatactaactgctctcagagaaagtagctttgtgacatgtcatgaacccatgtttgcaatcaaagatgataaaatagattcttatttttcccccacccccgaaaatgttcaataatgtcccatgtaaaacctgctacaaatggcagcttatacatagcaatggtaaaatcatcatctggatttaggaattgctcttgtcatacccccaagtttctaagatttaagattctccttactactatcctacgtttaaatatctttgaaagtttgtattaaatgtgaattttaagaaataatatttatatttctgtaaatgtaaactgtgaagatagttataaactgaagcagatacctggaaccacctaaagaacttccatttatggaggatttttttgccccttgtgtttggaattataaaatataggtaaaagtacgtaattaaataatgtttttggtaaaaaaaaaaaaaaaaaaaaaaaaaaaaaaaaaaaaaaaaaaaaaaaaaaaaaaaaaaaaaaaaaaa

SEQ ID NO: 2592 - DNA, 2583 bp, Homo sapiens
cctacccgcgcgcaggccaagttgctgaatcaatggagccctccccaacccgggcgttccccagcgaggcttccttcccatcctcctgaccaccggggcttttcgtgagctcgtctctgatctcgcgcaagagtgacacacaggtgttcaaagacgcttctggggagtgagggaagcggtttacgagtgacttggctggagcctcaggggcgggcactggcacggaacacaccctgaggccagccctggctgcccaggcggagctgcctcttctcccgcgggttggtggacccgctcagtacggagttggggaagctctttcacttcggaggattgctcaacaaccatgctgggcatctggaccctcctacctctggttcttacgtctgttgctagattatcgtccaaaagtgttaatgcccaagtgactgacatcaactccaagggattggaattgaggaagactgttactacagttgagactcagaacttggaaggcctgcatcatgatggccaattctgccataagccctgtcctccaggtgaaaggaaagctagggactgcacagtcaatggggatgaaccagactgcgtgccctgccaagaagggaaggagtacacagacaaagcccatttttcttccaaatgcagaagatgtagattgtgtgatgaaggacatgatgtgaacatggaatcatcaaggaatgcacactcaccagcaacaccaagtgcaaagaggaagtgaagagaaaggaagtacagaaaacatgcagaaagcacagaaaggaaaaccaaggttctcatgaatctccaaccttaaatcctgaaacagtggcaataaatttatctgatgttgacttgagtaaatatatcaccactattgctggagtcatgacactaagtcaagttaaaggctttgttcgaaagaatggtgtcaatgaagccaaaatagatgagatcaagaatgacaatgtccaagacacagcagaacagaaagttcaactgcttcgtaattggcatcaacttcatggaaagaaagaagcgtatgacacattgattaaagatctcaaaaaagccaatctttgtactcttgcagagaaaattcagactatcatcctcaaggacattactagtgactcagaaaattcaaacttcagaaatgaaatccaaagcttggtctagagtgaaaaacaacaaattcagttctgagtatatgcaattagtgtttgaaaagattcttaatagctggctgtaaatactgcttggttttttactgggtacattttatcatttattagcgctgaagagccaacatatttgtagatttttaatatctcatgattctgcctccaaggatgtttaaaatctagttgggaaaacaaacttcatcaagagtaaatgcagtggcatgctaagtacccaaataggagtgtatgcagaggatgaaagattaagattatgctctggcatctaacatatgattctgtagtatgaatgtaatcagtgtatgttagtacaaatgtctatccacaggctaaccccactctatgaatcaatagaagaagctatgaccttttgctgaaatatcagttactgaacaggcaggccactttgcctctaaattacctctgataattctagagattttaccatatttctaaactttgtttataactctgagaagatcatatttatgtaaagtatatgtatttgagtgcagaatttaaataaggctctacctcaaagacctttgcacagtttattggtgtcatattatacaatatttcaattgtgaattcacatagaaaacattaaattataatgtttgactattatatatgtgtatgcattttactggctcaaaactacctacttctttctcaggcatcaaaagcattttgagcaggagagtattactagagctttgccacctctccatttttgccttggtgctcatcttaatggcctaatgcacccccaaacatggaaatatcaccaaaaaatacttaatagtccaccaaaaggcaagactgcccttagaaattctagcctggtttggagatactaactgctctcagagaaagtagctttgtgacatgtcatgaacccatgtttgcaatcaaagatgataaaatagattcttatttttcccccacccccgaaaatgttcaataatgtcccatgtaaaacctgctacaaatggcagcttatacatagcaatggtaaaatcatcatctggatttaggaattgctcttgtcatacccccaagtttctaagatttaagattctccttactactatcctacgtttaaatatctttgaaagtttgtattaaatgtgaattttaagaaataatatttatatttctgtaaatgtaaactgtgaagatagttataaactgaagcagatacctggaaccacctaaagaacttccatttatggaggatttttttgccccttgtgtttggaattataaaatataggtaaaagtacgtaattaaataatgtttttggtaaaaaaaaaaaaaaaaaaaaaaaaaaaaaaaaaaaaaaaaaaaaaaaaaaaaaaaaaaaaaaaaaaa

SEQ ID NO: 2593 - DNA, 2445 bp, Homo sapiens
cctacccgcgcgcaggccaagttgctgaatcaatggagccctccccaacccgggcgttccccagcgaggcttccttcccatcctcctgaccaccggggcttttcgtgagctcgtctctgatctcgcgcaagagtgacacacaggtgttcaaagacgcttctggggagtgagggaagcggtttacgagtgacttggctggagcctcaggggcgggcactggcacggaacacaccctgaggccagccctggctgcccaggcggagctgcctcttctcccgcgggttggtggacccgctcagtacggagttggggaagctctttcacttcggaggattgctcaacaaccatgctgggcatctggaccctcctacctctggttcttacgtctgttgctagattatcgtccaaaagtgttaatgcccaagtgactgacatcaactccaagggattggaattgaggaagactgttactacagttgagactcagaacttggaaggcctgcatcatgatggccaattctgccataagccctgtcctccagatgtgaacatggaatcatcaaggaatgcacactcaccagcaacaccaagtgcaaagaggaagtgaagagaaaggaagtacagaaaacatgcagaaagcacagaaaggaaaaccaaggttctcatgaatctccaaccttaaatcctgaaacagtggcaataaatttatctgatgttgacttgagtaaatatatcaccactattgctggagtcatgacactaagtcaagttaaaggctttgttcgaaagaatggtgtcaatgaagccaaaatagatgagatcaagaatgacaatgtccaagacacagcagaacagaaagttcaactgcttcgtaattggcatcaacttcatggaaagaaagaagcgtatgacacattgattaaagatctcaaaaaagccaatctttgtactcttgcagagaaaattcagactatcatcctcaaggacattactagtgactcagaaaattcaaacttcagaaatgaaatccaaagcttggtctagagtgaaaaacaacaaattcagttctgagtatatgcaattagtgtttgaaaagattcttaatagctggctgtaaatactgcttggttttttactgggtacattttatcatttattagcgctgaagagccaacatatttgtagatttttaatatctcatgattctgcctccaaggatgtttaaaatctagttgggaaaacaaacttcatcaagagtaaatgcagtggcatgctaagtacccaaataggagtgtatgcagaggatgaaagattaagattatgctctggcatctaacatatgattctgtagtatgaatgtaatcagtgtatgttagtacaaatgtctatccacaggctaaccccactctatgaatcaatagaagaagctatgaccttttgctgaaatatcagttactgaacaggcaggccactttgcctctaaattacctctgataattctagagattttaccatatttctaaactttgtttataactctgagaagatcatatttatgtaaagtatatgtatttgagtgcagaatttaaataaggctctacctcaaagacctttgcacagtttattggtgtcatattatacaatatttcaattgtgaattcacatagaaaacattaaattataatgtttgactattatatatgtgtatgcattttactggctcaaaactacctacttctttctcaggcatcaaaagcattttgagcaggagagtattactagagctttgccacctctccatttttgccttggtgctcatcttaatggcctaatgcacccccaaacatggaaatatcaccaaaaaatacttaatagtccaccaaaaggcaagactgcccttagaaattctagcctggtttggagatactaactgctctcagagaaagtagctttgtgacatgtcatgaacccatgtttgcaatcaaagatgataaaatagattcttatttttcccccacccccgaaaatgttcaataatgtcccatgtaaaacctgctacaaatggcagcttatacatagcaatggtaaaatcatcatctggatttaggaattgctcttgtcatacccccaagtttctaagatttaagattctccttactactatcctacgtttaaatatctttgaaagtttgtattaaatgtgaattttaagaaataatatttatatttctgtaaatgtaaactgtgaagatagttataaactgaagcagatacctggaaccacctaaagaacttccatttatggaggatttttttgccccttgtgtttggaattataaaatataggtaaaagtacgtaattaaataatgtttttggtaaaaaaaaaaaaaaaaaaaaaaaaaaaaaaaaaaaaaaaaaaaaaaaaaaaaaaaaaaaaaaaaaaa

SEQ ID NO: 2594 - DNA, 2508 bp, Homo sapiens
cctacccgcgcgcaggccaagttgctgaatcaatggagccctccccaacccgggcgttccccagcgaggcttccttcccatcctcctgaccaccggggcttttcgtgagctcgtctctgatctcgcgcaagagtgacacacaggtgttcaaagacgcttctggggagtgagggaagcggtttacgagtgacttggctggagcctcaggggcgggcactggcacggaacacaccctgaggccagccctggctgcccaggcggagctgcctcttctcccgcgggttggtggacccgctcagtacggagttggggaagctctttcacttcggaggattgctcaacaaccatgctgggcatctggaccctcctacctctggttcttacgtctgttgctagattatcgtccaaaagtgttaatgcccaagtgactgacatcaactccaagggattggaattgaggaagactgttactacagttgagactcagaacttggaaggcctgcatcatgatggccaattctgccataagccctgtcctccagatgtgaacatggaatcatcaaggaatgcacactcaccagcaacaccaagtgcaaagaggaaggatccagatctaacttggggtggctttgtcttcttcttttgccaattccactaattgtttgggtgaagagaaaggaagtacagaaaacatgcagaaagcacagaaaggaaaaccaaggttctcatgaatctccaaccttaaatcctgaaacagtggcaataaatttatctgatgttgacttgagtaaatatatcaccactattgctggagtcatgacactaagtcaagttaaaggctttgttcgaaagaatggtgtcaatgaagccaaaatagatgagatcaagaatgacaatgtccaagacacagcagaacagaaagttcaactgcttcgtaattggcatcaacttcatggaaagaaagaagcgtatgacacattgattaaagatctcaaaaaagccaatctttgtactcttgcagagaaaattcagactatcatcctcaaggacattactagtgactcagaaaattcaaacttcagaaatgaaatccaaagcttggtctagagtgaaaaacaacaaattcagttctgagtatatgcaattagtgtttgaaaagattcttaatagctggctgtaaatactgcttggttttttactgggtacattttatcatttattagcgctgaagagccaacatatttgtagatttttaatatctcatgattctgcctccaaggatgtttaaaatctagttgggaaaacaaacttcatcaagagtaaatgcagtggcatgctaagtacccaaataggagtgtatgcagaggatgaaagattaagattatgctctggcatctaacatatgattctgtagtatgaatgtaatcagtgtatgttagtacaaatgtctatccacaggctaaccccactctatgaatcaatagaagaagctatgaccttttgctgaaatatcagttactgaacaggcaggccactttgcctctaaattacctctgataattctagagattttaccatatttctaaactttgtttataactctgagaagatcatatttatgtaaagtatatgtatttgagtgcagaatttaaataaggctctacctcaaagacctttgcacagtttattggtgtcatattatacaatatttcaattgtgaattcacatagaaaacattaaattataatgtttgactattatatatgtgtatgcattttactggctcaaaactacctacttctttctcaggcatcaaaagcattttgagcaggagagtattactagagctttgccacctctccatttttgccttggtgctcatcttaatggcctaatgcacccccaaacatggaaatatcaccaaaaaatacttaatagtccaccaaaaggcaagactgcccttagaaattctagcctggtttggagatactaactgctctcagagaaagtagctttgtgacatgtcatgaacccatgtttgcaatcaaagatgataaaatagattcttatttttcccccacccccgaaaatgttcaataatgtcccatgtaaaacctgctacaaatggcagcttatacatagcaatggtaaaatcatcatctggatttaggaattgctcttgtcatacccccaagtttctaagatttaagattctccttactactatcctacgtttaaatatctttgaaagtttgtattaaatgtgaattttaagaaataatatttatatttctgtaaatgtaaactgtgaagatagttataaactgaagcagatacctggaaccacctaaagaacttccatttatggaggatttttttgccccttgtgtttggaattataaaatataggtaaaagtacgtaattaaataatgtttttggtaaaaaaaaaaaaaaaaaaaaaaaaaaaaaaaaaaaaaaaaaaaaaaaaaaaaaaaaaaaaaaaaaaa

SEQ ID NO: 2595 - DNA, 1293 bp, Homo sapiens
gcttgaagcctcccaggagaaagaagccagcctgtagggtccagcgtcaaagcgaatcatggggtccagggctgagctgtgcactctcttaggcggattctccttcctcctgctactgataccaggcgagggggccaagggtggatccctcagagagagtcagggagtctgctccaagcagacactggtggtcccgctccactacaacgagtcctacagccaaccagtgtacaagccctacctgaccttgtgcgctgggaggcgcatctgcagcacttacaggaccatgtaccgcgttatgtggcgggaggtgaggcgggaggttcagcagacccatgcagtgtgctgccagggctggaagaagcggcacccgggggcgctcacctgtgaagccatctgcgccaagccttgcctgaacggaggcgtctgcgttaggcctgaccagtgcgagtgcgcccccggctggggagggaagcactgtcatgtggacgtggatgaatgtaggaccagcatcaccctctgctcgcaccattgttttaatacggcaggcagcttcacctgcggctgcccccatgacctagtgctaggcgtggacgggcgcacctgcatggaggggtccccagagcccccaaccagtgccagcatactcagcgtggccgttcgggaggcggaaaaagatgagcgcgctctgaagcaggagattcacgagctgcgagggcgcctggagcggctggagcagtgggccggtcaggctggggcctgggtcagagcggtgctgcccgtgccgcctgaagagctgcagccagaacaggtggctgagctgtggggccggggtgaccggatcgaatctctcagcgaccaggtgctgctgctggaggagaggctaggtgcctgctcctgtgaggacaacagcctgggcctcggcgtcaatcatcgataagaagcctctacagcacccctgccccctaatttatacagaaaccggacccactaatcctctgggattggccgactgtgagctgcagataaggctatcagccaccaaagagcaatgaacaatggaaacttcagagagctgaagaaagggggaggcctgtgttcttggcctgcccctgagtcttctggctgggggcaggttgcctgggcaagaactgcttcttcaattccttaacaaatgcaaccaccaacacccagatctctctctctctttattttcagtttttttgctgttatccagataattaataaaaaccaaccacgcaaaactggaaaaaaaaaaaaaaaaaaactcga

SEQ ID NO: 2596 - DNA, 4802 bp, Homo sapiens
atatttcaggggatatgaatcccctacattaagtaaggattatgagggctacccagccccagcaatgccagattttcaacctggggataccacagtaagactagacaaaagaatgtctcttactgcaatatatgacaagaggagagagacagattatagtgacaaaggatataatttagcttttgtttctcaagatgaacaagaaaattcttcctttactatattatacgaagagccccttcaagaggaggacaagtatgcttccgcagaagcaagacaaacacagtctgtcttgtttcatgatacgtccgctgacagcatgcctgttctggcatgtgaaaggtctgagagtagaactgaccttgtccatcactttgaaaaaggtactaaattaggtgagacatttgatagtgatagttcagaaatgttcttatcagtggaggccaaaaggtacaaaatttatcctttagcattgtctcccatttatgaggatgacagctcacaggaggacattctatctagtgaggtttcacctggtcaccatggccccaggaaatcaagagacagtgaaaaccagtcctcttctgttttatcccttctccagtcagtgtcagaacgtttaaagatgaattttgatgaagatgacagagaggcagctgatgaggaagaagaggaggaggaggcagcagtattgcataaaggagatctgagagctggaagtggggagcgtgttaccttccagttgccagatccttccatcacattttaccctgatgaccaggagagcgttggaatttctaagaattcatatgtgatgccaaatgaacctactacctccaatctgcaagttggtctgtggccagaaaagacctcgtttctccagaaatctgaccttacttctaaactacattcttctttaaagagtgcttatcatcagtatctgcagacttcccaaagtcattcctcagaaaaaggagccagatttggtggaatttttcaggaaccagtgtcaaaatatttccgtgttcaagacagcccaggcagattgagcccatttatagagaatgttgacaaacaaactctgagatgtaacccaagacctgggaagatggttatctatgatctccatgaaagtacatataaacaagaagtctactgtaatattcctgatgctacatcatggtcttttccaaatggagttctaataaaagttgtaaggggctgctggattttatatgagaaaccacatttccgaggtcagaaatgtgtgctagaagaaggggaaaaggtgttaaatcgtgactggattcttcagaacagaaggcatccacaaagaaactttatattgggttctctcaaacgtgtcttaaaggactgcagcattccagaaatagagcttttcccacaatctgacccagcctgttgtcctgtctacatacagagagcagtccccaatttggaagaactgaatatctccaaatctgtgtccttcactgtgaagtcaggagtttggcttgcctacccagatattaattttaagggacaagctacagttctggaggaagaccatgggctctttgagatttctacagcagaaatgaaatcattacatccgcttcaaatgggtggactgaaagtggaaatgcccatgaacttaaaggttattatttatgaaaaacctcacttccatggacaggctaaagagtttagtgaacatatagattctgttcctaattttttgaaaaataatggagattttcacagaattggatcaattcgtgtcattggtggagtgtgggttgcctatgaaaaagaacattttaaaggccagcagtttctgcttgaagaaggagactttgaagacagtaatgcttgtggtgcattaagtagccctatcttgtctttccggtacttacaagctaattttatagaatcttctgtcacactatttgaatctgacctagaaagtgggaagtttattgacattacaaatcaggaaatttctgatttggaagaaattggctttggcagtaaaacaagatccattcatgttaaaagtggagtatgggttgcctaccagcaaaagttcttctgtggagaacaatacattttagaaaaagggaaatacaaatgcttttttgactggggaggatcaaataatataatcatgtcgatacggccaatccaactggaaccacttgggataaatgaacctccgcatttgctcaaagcattcagcaaaccagggttccaaggtgaatgtatagattttacagaagaaacttctgatttgacttcactcatgccatgttcttttaaagttcttcgaggttgctggctcctctattaccaagaagacatgtttgttaatcactgtgtgttagaagaaggcctctatgctgaccttacttcctgcggttgcccagcatctaaagtcaaatctctcaagcccattgactatgtttttgaagaaccctccatcagcctttttgctctggagcattgtgagggaagagagttacatctagaagaggctgtgaactctgttctgaacaaggacctacacttctacacccagtctgtgtgggtaaaaagtggactatggatagcttatgaaggatccaatttcttgggaagacaaatcctactcaggcctaatgagatcccaaactggacagcattcagcagatggaaaacaattggttccctccgtcctatgaagcagcctgcagtgtacatcagaataaagaaccgtgcccagggtgaatatctgacagtcactggaagtctagcagacaccagggcaacatctgtgtgcatttctccctatagtggaaagaatactcagatctggtactactgccgaggactctttaaatccaaggccagtgatacatgtcttgatgtgattggtggccgggacacacctggagctaaagtagctctatggactgaacatgggcaattcaggcagaagtggagactgaataaaaatggaactatcagctcttatctcagtgatcaacttgtccttgatgttaaaggaggaaattattgtgacaagactcatgtaattgtaaatcagcccctggagggagaagaaacacagaaatgggacattgaaatattgtgagagaatcaacatccctagaaagatccctagaaagagcaaagaaggaaacacatctgtcattgtcttgtggacgtggaaaggaagctactgtcctcacactcctggatcactgagcagaatgaacattttctccagcctctgagactatcgctcttaaccatggaaaagctcaaaatattcttgccattactcagtgttcctataaagaaaatattatgatatcttggaaaggttctattcctgatctccagctgtggtgagcaagtttcctgaagtgtttattttctctcatatccaccaaacgtgaatcctgttcctgatggcccgttattggacactggtgatgctattatcctgtattatttattaatatcctacctagatgcttgtatgagtacaaagcataaagaaacagatttctataggtcaagtcatacttttgcaaacagatgagtaattttttagcaacacctgaaaatatactaaactttcctagataaactttaaggtttctatactgaggcttttataatgaacgcacctcgttaagtatttatacttgtaactaaccccaggcagggacctcagctttgttaggaataaggcacaagaagtattttctgtagctattgtttcctcagtccttcaaactaaaaaagtacaaataaataacctatggccaaacttgcactgttacgtgttaaccaagacatccctttaggtgacaagactctataacagtggttacctgtctccatgttgacacttcatcctagatttaaggagaggcatcaatttttttttttttttgcctcaagagaaatttcaaatatccaaattaaaacacagtagcatttgaaccttgaccttaccatctctttaagtaaacgtggagttgatttctctactaaataacagaaacctcagtttttcactcccattgtaagtaacttttatttaagtaagtaaaatcaggtaggaaatcacctttgacttagcttccagtagtcattaccaccttttactgcacaattcacaagcatgttttcctggtgaattggactgaaaattacattttgacaactttttttccttttatccccaacttttgccagaaagcagaaaaatgctctatttttataaagaaagattaaattctccaatgatattttaaaaaatatcaacctacatgcactttagaatgtaaaataacaatgactattttaaactcgaagacccactattttgagtattttttatagactttaaatactgggtttttttcctccttcaatctcaggcttttctccatcttttaagcagcctctgtaactcccttttgtccataggtgttgcgtgcctctcatctgtggggaagtattatttaataaaatttatgttacaggataactttattttaatgggcatgggcttgtctatacacaaaggtatgtatattttcattataaaaaaccagtttaaaattttttcttattttaattgtttgaaatttttctagagccaaagaagctctttaaagaagttgtttcttccaaagaacaaagccaggttaatgacattcaattctaaatgatacattggaattgtgccttttctaccacactggattaaataaacttgtcaaaatatggaaaaaaaaaaaaaaaaa

SEQ ID NO: 2597 - DNA, 4465 bp, Homo sapiens
gcggaccggccgggtggaggccacacgctaccccgaggctgcgtaggccgcgcgaagggggacgccgtgccgtgggcctggggtcgggggagcagcagaccgggaagcaccgtgaggaccgaggatttggggtggaaggcaggcatggtcaaacccatttcactgacaggagagcagagacaggacgtgtctctctccacgtcttccagccagtaaaagaagccaagctggagcccaaagccaggtgttctgactcccagcgtgggggtccctgcaccaaccatgagccgcctgctctggaggaaggtggccggcgccaccgtcgggccagggccggttccagctccggggcgctgggtctccagctccgtccccgcgtccgaccccagcgacgggcagcggcggcggcagcagcagcagcagcagcagcagcagcagcaacagcagcctcagcagccgcaagtgctatcctcggagggcgggcagctgcggcacaacccattggacatccagatgctctcgagagggctgcacgagcaaatcttcgggcaaggaggggagatgcctggcgaggccgcggtgcgccgcagcgtcgagcacctgcagaagcacgggctctgggggcagccagccgtgcccttgcccgacgtggagctgcgcctgccgcccctctacggggacaacctggaccagcacttccgcctcctggcccagaagcagagcctgccctacctggaggcggccaacttgctgttgcaggcccagctgcccccgaagcccccggcttgggcctgggcggagggctggacccggtacggccccgagggggaggccgtacccgtggccatccccgaggagcgggccctggtgttcgacgtggaggtctgcttggcagagggaacttgccccacattggcggtggccatatccccctcggcctggtattcctggtgcagccagcggctggtggaagagcgttactcttggaccagccagctgtcgccggctgacctcatccccctggaggtccctactggtgccagcagccccacccagagagactggcaggagcagttagtggtggggcacaatgtttcctttgaccgagctcatatcagggagcagtacctgatccagggttcccgcatgcgtttcctggacaccatgagcatgcacatggccatctcagggctaagcagcttccagcgcagtctgtggatagcagccaagcagggcaaacacaaggtccagccccccacaaagcaaggccagaagtcccagaggaaagccagaagaggcccagcgatctcatcctgggactggctggacatcagcagtgtcaacagtctggcagaggtgcacagactttatgtaggggggcctcccttagagaaggagcctcgagaactgtttgtgaagggcaccatgaaggacattcgtgagaacttccaggacctgatgcagtactgtgcccaggacgtgtgggccacccatgaggttttccagcagcagctaccgctcttcttggagaggtgtccccacccagtgactctggccggcatgctggagatgggtgtctcctacctgcctgtcaaccagaactgggagcgttacctggcagaggcacagggcacttatgaggagctccagcgggagatgaagaagtcgttgatggatctggccaatgatgcctgccagctgctctcaggagagaggtacaaagaagacccctggctctgggacctggagtgggacctgcaagaatttaagcagaagaaagctaagaaggtgaagaaggaaccagccacagccagcaagttgcccatcgagggggctggggcccctggtgatcccatggatcaggaagacctcggcccctgcagtgaggaggaggagtttcaacaagatgtcatggcccgcgcctgcttgcagaagctgaaggggaccacagagctcctgcccaagcggccccagcaccttcctggacaccctggatggtaccggaagctctgcccccggctagacgaccctgcatggaccccgggccccagcctcctcagcctgcagatgcgggtcacacctaaactcatggcacttacctgggatggcttccctctgcactactcagagcgtcatggctggggctacttggtgcctgggcggcgggacaacctggccaagctgccgacaggtaccaccctggagtcagctggggtggtctgcccctacagagccatcgagtccctgtacaggaagcactgtctcgaacaggggaagcagcagctgatgccccaggaggccggcctggcggaggagttcctgctcactgacaatagtgccatatggcaaacggtagaagaactggattacttagaagtggaggctgaggccaagatggagaacttgcgagctgcagtgccaggtcaacccctagctctgactgcccgtggtggccccaaggacacccagcccagctatcaccatggcaatggaccttacaacgacgtggacatccctggctgctggtttttcaagctgcctcacaaggatggtaatagctgtaatgtgggaagcccctttgccaaggacttcctgcccaagatggaggatggcaccctgcaggctggcccaggaggtgccagtgggccccgtgctctggaaatcaacaaaatgatttctttctggaggaacgcccataaacgtatcagctcccagatggtggtgtggctgcccaggtcagctctgccccgtgctgtgatcaggcaccccgactatgatgaggaaggcctctatggggccatcctgccccaagtggtgactgccggcaccatcactcgccgggctgtggagcccacatggctcaccgccagcaatgcccggcctgaccgagtaggcagtgagttgaaagccatggtgcaggccccacctggctacacccttgtgggtgctgatgtggactcccaagagctgtggattgcagctgtgcttggagacgcccactttgccggcatgcatggctgcacagcctttgggtggatgacactgcagggcaggaagagcaggggcactgatctacacagtaagacagccactactgtgggcatcagccgtgagcatgccaaaatcttcaactacggccgcatctatggtgctgggcagccctttgctgagcgcttactaatgcagtttaaccaccggctcacacagcaggaggcagctgagaaggcccagcagatgtacgctgccaccaagggcctccgctggtatcggctgtcggatgagggcgagtggctggtgagggagttgaacctcccagtggacaggactgagggtggctggatttccctgcaggatctgcgcaaggtccagagagaaactgcaaggaagtcacagtggaagaagtgggaggtggttgctgaacgggcatggaaggggggcacagagtcagaaatgttcaataagcttgagagcattgctacgtctgacataccacgtaccccggtgctgggctgctgcatcagccgagccctggagccctcggctgtccaggaagagtttatgaccagccgtgtgaattgggtggtacagagctctgctgttgactacttacacctcatgcttgtggccatgaagtggctgtttgaagagtttgccatagatgggcgcttctgcatcagcatccatgacgaggttcgctacctggtgcgggaggaggaccgctaccgcgctgccctggccttgcagatcaccaacctcttgaccaggtgcatgtttgcctacaagctgggtctgaatgacttgccccagtcagtcgcctttttcagtgcagtcgatattgaccggtgcctcaggaaggaagtgaccatggattgtaaaaccccttccaacccaactgggatggaaaggagatacgggattccccagggtgaagcgctggatatttaccagataattgaactcaccaaaggctccttggaaaaacgaagccagcctggaccatagcactgcctggaggctctgtatttgctcccgtggagcttcatcggggtggtgcaggctcccaaactcaggctttcagctgtgctttttgcaaaagggcttgcctaaggccagccatttttcagtagcaggacctgccaagaagattccttctaactgaaggtgcagttgaattcagtgggttcagaaccaagatgccaacatcggtgtggactacaggacaaggggcattgttgcttgttgggtaaaaatgaagcagaagccccaaagttcacattaactcaggcatttcatttattttttccttttcttcttggctggttctttgttctgtcccccatgctctgatgcagtgccctagaaggggaaagaattaatgctctaacgtgataaacctgctccaaggcagtggaaataaaaagaaggaaaaaaaagaaaaaaaaaaaaaaaaaaaaaaaaaaaaaat

SEQ ID NO: 2598 - DNA, 7108 bp, Homo sapiens
gcgcgcccgaggctcctacgctgccgcgcccggcttctctccagcgccccgcgccgttagccacgtggaccgactccggcgcgccgtcctcacgtggttccagtggagtttgcagtccttcccgcttctccgtactcgcccccgcctctgagctcccttcccatggcggccctagtgttggaggacgggtcggtcctgcggggccagccctttggggccgccgtgtcgactgccggggaagtggtgtttcaaaccggcatggtcggctaccccgaggccctcactgatccctcctacaaggcacagatcttagtgctcacctatcctctgatcggcaactatggcatccccccagatgaaatggatgagttcggtctctgcaagtggtttgaatcctcgggcatccacgtagcagcactggtagtgggagagtgctgtcctactcccagccactggagtgccacccgcaccctgcatgagtggctgcagcagcatggcatccctggcttgcaaggagtagacactcgggagctgaccaagaagttgcgggaacaggggtctctgctggggaagctggtccagaatggaacagaaccttcatccctgccattcttggaccccaatgcccgccccctggtaccagaggtctccattaagactccacgggtattcaatacagggggtgcccctcggatccttgctttggactgtggcctcaagtataatcagatccgatgcctctgccagcgtggggctgaggtcactgtggtaccctgggaccatgcactagacagccaagagtatgagggtctcttcttaagtaatgggcctggtgaccctgcctcctatcccagtgtcgtatccacactgagccgtgttttatctgagcctaatccccgacctgtctttgggatctgcctgggacaccagctattggccttagccattggggccaagacttacaagatgagatatgggaaccgaggccataaccagccctgcttgttggtgggctctgggcgctgctttctgacatcccagaaccatgggtttgctgtggagacagactcactgccagcagactgggctcctctcttcaccaacgccaatgatggttccaatgaaggcattgtgcacaacagcttgcctttcttcagtgtccagtttcacccagagcaccaagctggcccttcagatatggaactgcttttcgatatctttctggaaactgtgaaagaggccacagctgggaaccctgggggccagacagttagagagcggctgactgagcgcctctgtccccctgggattcccactcccggctctggacttccaccaccacgaaaggttctgatcctgggctcagggggcctctccattggccaagctggagaatttgactactcgggctctcaggcaattaaggccctgaaggaggaaaacatccagacgttgctgatcaaccccaatattgccacagtgcagacctcccaggggctggccgacaaggtctattttcttcccataacacctcattatgtaacccaggtgatacgtaatgaacgccccgatggtgtgttactgacttttgggggccagactgctctgaactgtggtgtggagctgaccaaggccggggtgctggctcggtatggggtccgggtcctgggcacaccagtggagaccattgagctgaccgaggatcgacgggcctttgctgccagaatggcagagatcggagagcatgtggccccgagcgaggcagcaaattctcttgaacaggcccaggcagccgctgaacggctggggtaccctgtgctagtgcgtgcagcctttgccctgggtggcctgggctctggctttgcctctaacagggaggagctctctgctctcgtggccccagcttttgcccataccagccaagtgctagtagacaagtctctgaagggatggaaggagattgagtacgaggtggtgagagacgcctatggcaactgtgtcacggtgtgtaacatggagaacttggacccactgggcatccacactggtgagtccatagtggtggcccctagccagacactgaatgacagggagtatcagctcctgaggcagacagctatcaaggtgacccagcacctgggaattgttggggagtgcaatgtgcagtatgccttgaaccctgagtctgagcagtattacatcattgaagtgaatgccaggctctctcgcagctctgccctggccagtaaggccacaggttatccactggcttatgtggcagccaagctagcattgggcatccctttgcctgagctcaggaactctgtgacagggggtacagcagcctttgaacccagcgtggattattgtgtggtgaagattcctcgatgggaccttagcaagttcctgcgagtcagcacaaagattgggagctgcatgaagagcgttggtgaagtcatgggcattgggcgttcatttgaggaggccttccagaaggccctgcgcatggtggatgagaactgtgtgggctttgatcacacagtgaaaccagtcagcgatatggagttggagactccaacagataagcggatttttgtggtggcagctgctttgtgggctggttattcagtggaccgcctgtatgagctcacacgcatcgaccgctggttcctgcaccgaatgaagcgtatcatcgcacatgcccagctgctagaacaacaccgtggacagcctttgccgccagacctgctgcaacaggccaagtgtcttggcttctcagacaaacagattgcccttgcagttctgagcacagagctggctgttcgcaagctgcgtcaggaactggggatctgtccagcagtgaaacagattgacacagttgcagctgagtggccagcccagacaaattacctatacctaacgtattggggcaccacccatgacctcacctttcgaacacctcatgtcctagtccttggctctggcgtctaccgtattggctctagcgttgaatttgactggtgtgctgtaggctgcatccagcagctccgaaagatgggatataagaccatcatggtgaactataacccagagacagtcagcaccgactatgacatgtgtgatcgactctactttgatgagatctcttttgaggtggtgatggacatctatgagctcgagaaccctgaaggtgtgatcctatccatgggtggacagctgcccaacaacatggccatggcgttgcatcggcagcagtgccgggtgctgggcacctcccctgaagccattgactcggctgagaaccgtttcaagttttcccggctccttgacaccattggtatcagccagcctcagtggagggagctcagtgacctcgagtctgctcgccaattctgccagaccgtggggtacccctgtgtggtgcgcccctcctatgtgctgagcggtgctgctatgaatgtggcctacacggatggagacctggagcgcttcctgagcagcgcagcagccgtctccaaagagcatcccgtggtcatctccaagttcatccaggaggctaaggagattgacgtggatgccgtggcctctgatggtgtggtggcagccatcgccatctctgagcatgtggagaatgcaggtgtgcattcaggtgatgcgacgctggtgacccccccacaagatatcactgccaaaaccctggagcggatcaaagccattgtgcatgctgtgggccaggagctacaggtcacaggacccttcaatctgcagctcattgccaaggatgaccagctgaaagttattgaatgcaacgtacgtgtctctcgctccttccccttcgtttccaagacactgggtgtggacctagtagccttggccacgcgggtcatcatgggggaagaagtggaacctgtggggctaatgactggttctggagtcgtgggagtaaaggtgcctcagttctccttctcccgcttggcgggtgctgacgtggtgttgggtgtggaaatgaccagtactggggaggtggccggctttggggagagccgctgtgaggcatacctcaaggccatgctaagcactggctttaagatccccaagaagaatatcctgctgaccattggcagctataagaacaaaagcgagctgctcccaactgtgcggctactggagagcctgggctacagcctctatgccagtctcggcacagctgacttctacactgagcatggcgtcaaggtaacagctgtggactggcactttgaggaggctgtggatggtgagtgcccaccacagcggagcatcctggagcagctagctgagaaaaactttgagctggtgattaacctgtcaatgcgtggagctgggggccggcgtctctcttcctttgtcaccaagggctaccgcacccgacgcttggccgctgacttctccgtgcccctaatcatcgatatcaagtgcaccaaactctttgtggaggccctaggccagatcgggccagcccctcctttgaaggtgcatgttgactgtatgacctcccaaaagcttgtgcgactgccgggattgattgatgtccatgtgcacctgcgggaaccaggtgggacacataaggaggactttgcttcaggcacagccgctgccctggctgggggtatcaccatggtgtgtgccatgcctaatacccggccccccatcattgacgcccctgctctggccctggcccagaagctggcagaggctggcgcccggtgcgactttgcgctattccttggggcctcgtctgaaaatgcaggaaccttgggcaccgtggccgggtctgcagccgggctgaagctttacctcaatgagaccttctctgagctgcggctggacagcgtggtccagtggatggagcatttcgagacatggccctcccacctccccattgtggctcacgcagagcagcaaaccgtggctgctgtcctcatggtggctcagctcactcagcgctcagtgcacatatgtcacgtggcacggaaggaggagatcctgctaattaaagctgcaaaggcacggggcttgccagtgacctgcgaggtggctccccaccacctgttcctaagccatgatgacctggagcgcctggggcctgggaagggggaggtccggcctgagcttggctcccgccaggatgtggaagccctgtgggagaacatggctgtcatcgactgctttgcctcagaccatgctccccataccttggaggagaagtgtgggtccaggcccccacctgggttcccagggttagagaccatgctgccactactcctgacggctgtaagcgagggccggctcagcctggacgacctgctgcagcgattgcaccacaatcctcggcgcatctttcacctgcccccgcaggaggacacctatgtggaggtggatctggagcatgagtggacaattcccagccacatgcccttctccaaggcccactggacaccttttgaagggcagaaagtgaagggcaccgtccgccgtgtggtcctgcgaggggaggttgcctatatcgatgggcaggttctggtacccccgggctatggacaggatgtacggaagtggccacagggggctgttcctcagctcccaccctcagcccctgccactagtgagatgaccacgacacctgaaagaccccgccgtggcatcccagggcttcctgatggccgcttccatctgccgccccgaatccatcgagcctccgacccaggtttgccagctgaggagccaaaggagaagtcctctcggaaggtagccgagccagagctgatgggaacccctgatggcacctgctaccctccaccaccagtaccgagacaggcatctccccagaacctggggacccctggcttgctgcacccccagacctcacccctgctgcactcattagtgggccaacatatcctgtccgtccagcagttcaccaaggatcagatgtctcacctgttcaatgtggcacacacactgcgtatgatggtgcagaaggagcggagcctcgacatcctgaaggggaaggtcatggcctccatgttctatgaagtgagcacacggaccagcagctcctttgcagcagccatggcccggctgggaggtgctgtgctcagcttctcggaagccacatcgtccgtccagaagggcgaatccctggctgactccgtgcagaccatgagctgctatgccgacgtcgtcgtgctccggcacccccagcctggagcagtggagctggccgccaagcactgccggaggccagtgatcaatgctggggatggggtcggagagcaccccacccaggccctgctggacatcttcaccatccgtgaggagctgggaactgtcaatggcatgacgatcacgatggtgggtgacctgaagcacggacgcacagtacattccctggcctgcctgctcacccagtatcgtgtcagcctgcgctacgtggcacctcccagcctgcgcatgccacccactgtgcgggccttcgtggcctcccgcggcaccaagcaggaggaattcgagagcattgaggaggcgctgcctgacactgatgtgctctacatgactcgaatccagaaggaacgatttggctctacccaggagtacgaagcttgctttggtcagttcatcctcactccccacatcatgacccgggccaagaagaagatggtggtgatgcacccgatgccccgtgtcaacgagataagcgtggaagtggactcggatccccgcgcagcctacttccgccaggctgagaacggcatgtacatccgcatggctctgttagccaccgtgctgggccgtttctagggcctggcttcctcagcctcttctctttaggcccagctgctgggcaaggaattccagtgcctcctacgggggcagcacacttagatattcctggacatccagatagctcacatgtgctgaccacacttcaggctctggactggagctctctggcatgggggtggggcctcagatgctggggcccagtctgccccatcttcattcctgcaccttaaacctgtacagtcatttttctactgacttaataaacagccgagctgtcccttga

SEQ ID NO: 2599 - DNA, 4083 bp, Homo sapiens
atggcgagcgactccccggctcgaagcctggatgaaatagatctctcggctctgagggaccctgcagggatctttgaattggtggaacttgttggaaatggaacatacgggcaagtttataagggtcgtcatgtcaaaacgggccagcttgcagccatcaaggttatggatgtcacaggggatgaagaggaagaaatcaaacaagaaattaacatgttgaagaaatattctcatcaccggaatattgctacatactatggtgcttttatcaaaaagaacccaccaggcatggatgaccaactttggttggtgatggagttttgtggtgctggctctgtcaccgacctgatcaagaacacaaaaggtaacacgttgaaagaggagtggattgcatacatctgcagggaaatcttacgggggctgagtcacctgcaccagcataaagtgattcatcgagatattaaagggcaaaatgtcttgctgactgaaaatgcagaagttaaactagtggactttggagtcagtgctcagcttgatcgaacagtgggcaggaggaatactttcattggaactccctactggatggcaccagaagttattgcctgtgatgaaaacccagatgccacatatgatttcaagagtgacttgtggtctttgggtatcaccgccattgaaatggcagaaggtgctccccctctctgtgacatgcaccccatgagagctctcttcctcatcccccggaatccagcgcctcggctgaagtctaagaagtggtcaaaaaaattccagtcatttattgagagctgcttggtaaagaatcacagccagcgaccagcaacagaacaattgatgaagcatccatttatacgagaccaacctaatgagcgacaggtccgcattcaactcaaggaccatattgatagaacaaagaagaagcgaggagaaaaagatgagacagagtatgagtacagtggaagtgaggaagaagaggaggagaatgactcaggagagcccagctccatcctgaatctgccaggggagtcgacgctgcggagggactttctgaggctgcagctggccaacaaggagcgttctgaggccctacggaggcagcagctggagcagcagcagcgggagaatgaggagcacaagcggcagctgctggccgagcgtcagaagcgcatcgaggagcagaaagagcagaggcggcggctggaggagcaacaaaggcgagagaaggagctgcggaagcagcaggagagggagcagcgccggcactatgaggagcagatgcgccgggaggaggagaggaggcgtgcggagcatgaacaggaatacatcaggcgacagttagaggaggagcagagacagttagagatcttgcagcagcagctactgcatgaacaagctctacttctggaatataagcgcaaacaattggaagaacagagacaagcagaaagactgcagaggcagctaaagcaagaaagagactacttagtttcccttcagcatcagcggcaggagcagaggcctgtggagaagaagccactgtaccattacaaagaaggaatgagtcctagtgagaagccagcatgggccaaggaggtagaagaacggtcaaggctcaaccggcaaagttcccctgccatgcctcacaaggttgccaacaggatatctgaccccaacctgcccccaaggtcggagtccttcagcattagtggagttcagcctgctcgaacaccccccatgctcagaccagtcgatccccagatcccacatctggtagctgtaaaatcccagggacctgccttgaccgcctcccagtcagtgcacgagcagcccacaaagggcctctctgggtttcaggaggctctgaacgtgacctcccaccgcgtggagatgccacgccagaactcagatcccacctcggaaaatcctcctctccccactcgcattgaaaagtttgaccgaagctcttggttacgacaggaagaagacattccaccaaaggtgcctcaaagaacaacttctatatccccagcattagccagaaagaattctcctgggaatggtagtgctctgggacccagactaggatctcaacccatcagagcaagcaaccctgatctccggagaactgagcccatcttggagagccccttgcagaggaccagcagtggcagttcctccagctccagcacccctagctcccagcccagctcccaaggaggctcccagcctggatcacaagcaggatccagtgaacgcaccagagttcgagccaacagtaagtcagaaggatcacctgtgcttccccatgagcctgccaaggtgaaaccagaagaatccagggacattacccggcccagtcgaccagctagctacaaaaaagctatagatgaggatctgacggcattagccaaagaactaagagaactccggattgaagaaacaaaccgcccaatgaagaaggtgactgattactcctcctccagtgaggagtcagaaagtagcgaggaagaggaggaagatggagagagcgagacccatgatgggacagtggctgtcagcgacatacccagactgataccaacaggagctccaggcagcaacgagcagtacaatgtgggaatggtggggacgcatgggctggagacctctcatgcggacagtttcagcggcagtatttcaagagaaggaaccttgatgattagagagacgtctggagagaagaagcgatctggccacagtgacagcaatggctttgctggccacatcaacctccctgacctggtgcagcagagccattctccagctggaaccccgactgagggactggggcgcgtctcaacccattcccaggagatggactctgggactgaatatggcatggggagcagcaccaaagcctccttcaccccctttgtggaccccagagtataccagacgtctcccactgatgaagatgaagaggatgaggaatcatcagccgcagctctgtttactagcgaacttcttaggcaagaacaggccaaactcaatgaagcaagaaagatttcggtggtaaatgtaaacccaaccaacattcggcctcatagcgacacaccagaaatcagaaaatacaagaaacgattcaactcagaaatactttgtgcagctctgtggggtgtaaaccttctggtggggactgaaaatggcctgatgcttttggaccgaagtgggcaaggcaaagtctataatctgatcaaccggaggcgatttcagcagatggatgtgctagagggactgaatgtccttgtgacaatttcaggaaagaagaataagctacgagtttactatctttcatggttaagaaacagaatactacataatgacccagaagtagaaaagaaacaaggctggatcactgttggggacttggaaggctgtatacattataaagttgttaaatatgaaaggatcaaatttttggtgattgccttaaagaatgctgtggaaatatatgcttgggctcctaaaccgtatcataaattcatggcatttaagtcttttgcagatctccagcacaagcctctgctagttgatctcacggtagaagaaggtcaaagattaaaggttatttttggttcacacactggtttccatgtaattgatgttgattcaggaaactcttatgatatctacataccatctcatattcagggcaatatcactcctcatgctattgtcatcttgcctaaaacagatggaatggaaatgcttgtttgctatgaggatgagggggtgtatgtaaacacctatggccggataactaaggatgtggtgctccaatggggagaaatgcccacgtctgtggcctacattcattccaatcagataatgggctggggcgagaaagctattgagatccggtcagtggaaacaggacatttggatggagtatttatgcataagcgagctcaaaggttaaagtttctatgtgaaagaaatgataaggtattttttgcatccgtgcgatctggaggaagtagccaagtgtttttcatgaccctcaacagaaattccatgatgaactggtaa

SEQ ID NO: 2600 - DNA, 1496 bp, Homo sapiens
cgcactccctgctgggtgagcagcactgtaaagatgaagctggctaactggtactggctgagctcagctgttcttgccacttacggttttttggttgtggcaaacaatgaaacagaggaaattaaagatgaaagagcaaaggatgtctgcccagtgagactagaaagcagagggaaatgcgaagaggcaggggagtgcccctaccaggtaagcctgccccccttgactattcagctcccgaagcaattcagcaggatcgaggaggtgttcaaagaagtccaaaacctcaaggaaatcgtaaatagtctaaagaaatcttgccaagactgcaagctgcaggctgatgacaacggagacccaggcagaaacggactgttgttacccagtacaggagccccgggagaggttggtgataacagagttagagaattagagagtgaggttaacaagctgtcctctgagctaaagaatgccaaagaggagatcaatgtacttcatggtcgcctggagaagctgaatcttgtaaatatgaacaacatagaaaattatgttgacagcaaagtggcaaatctaacatttgttgtcaatagtttggatggcaaatgttcaaagtgtcccagccaagaacaaatacagtcacgtccagttcaacatctaatatataaagattgctctgactactacgcaataggcaaaagaagcagtgagacctacagagttacacctgatcccaaaaatagtagctttgaagtttactgtgacatggagaccatggggggaggctggacagtgctgcaggcacgtctcgatgggagcaccaacttcaccagaacatggcaagactacaaagcaggctttggaaacctcagaagggaattttggctggggaacgataaaattcatcttctgaccaagagtaaggaaatgattctgagaatagatcttgaagactttaatggtgtcgaactatatgccttgtatgatcagttttatgtggctaatgagtttctcaaatatcgtttacacgttggtaactataatggcacagctggagatgcattacgtttcaacaaacattacaaccacgatctgaagtttttcaccactccagataaagacaatgatcgatatccttctgggaactgtgggctgtactacagttcaggctggtggtttgatgcatgtctttctgcaaacttaaatggcaaatattatcaccaaaaatacagaggtgtccgtaatgggattttctggggtacctggcctggtgtaagtgaggcacaccctggtggctacaagtcctccttcaaagaggctaagatgatgatcagacccaagcactttaagccataaatcactctgttcattcctccaggtattcgttatctaatagggcaattaattccttcagcactttagaatatgccttgtttcatatttttcatagctaaaaaatgtttgacatcctttgagatattttattactaaaatctgcc

SEQ ID NO: 2601 - DNA, 1420 bp, Homo sapiens
tgaaacagcagattacttttatttatgcatttaatggattgaagaaaagaacctttttttttctctctctctctgcaactgcagtaagggaggggagttggatatacctcgcctaatatctcctgggttgacaccatcattattgtttattcttgtgctccaaaagccgagtcctctgatggctcccttaggtgaagttgggaactatttcggtgtgcaggatgcggtaccgtttgggaatgtgcccgtgttgccggtggacagcccggttttgttaagtgaccacctgggtcagtccgaagcaggggggctccccaggggacccgcagtcacggacttggatcatttaaaggggattctcaggcggaggcagctatactgcaggactggatttcacttagaaatcttccccaatggtactatccagggaaccaggaaagaccacagccgatttggcattctggaatttatcagtatagcagtgggcctggtcagcattcgaggcgtggacagtggactctacctcgggatgaatgagaagggggagctgtatggatcagaaaaactaacccaagagtgtgtattcagagaacagttcgaagaaaactggtataatacgtactcgtcaaacctatataagcacgtggacactggaaggcgatactatgttgcattaaataaagatgggaccccgagagaagggactaggactaaacggcaccagaaattcacacattttttacctagaccagtggaccccgacaaagtacctgaactgtataaggatattctaagccaaagttgacaaagacaatttcttcacttgagcccttaaaaaagtaaccactataaaggtttcacgcggtgggttcttattgattcgctgtgtcatcacatcagctccactgttgccaaactttgtcgcatgcataatgtatgatggaggcttggatgggaatatgctgattttgttctgcacttaaaggcttctcctcctggagggctgcctagggccacttgcttgatttatcatgagagaagaggagagagagagagactgagcgctaggagtgtgtgtatgtgtgtgtgtgtgtgtgtgtgtgtgtgtgtatgtgtgtagcgggagatgtgggcggagcgagagcaaaaggactgcggcctgatgcatgctggaaaaaagacacgcttttcatttctgatcagttgtacttcatcctatatcagcacagctgccatacttcgacttatcaggattctggctggtggcctgcgcgagggtgcagtcttacttaaaagactttcagttaattctcactggtatcatcgcagtgaacttaaagcaaagacctcttagtaaaaaataaaaaaaaataaaaaataaaaataaaaaaagttaaatttatttatagaaattccaaaa

SEQ ID NO: 2602 - DNA, 1271 bp, Homo sapiens
ggatgaatgtgggggtggcacacagcgaagtaaaccccaacacccgagtgatgaatagccgaggcatctggctggcctacatcatcttggtaggattgctgcatatggttctactcagcatccccttcttcagcattcctgttgtctggaccctgaccaacgtcatccataacctggctacgtatgtcttccttcatacggtgaaagggacaccctttgagactcctgaccaaggaaaggcccggctactgacacactgggagcaaatggactatgggctccagtttacctcttcccgcaagttcctcagcatctctcctattgtgctctatctcctggccagcttctataccaagtatgatgctgcgcacttcctcatcaacacagcctcattgctaagtgtactgctgccgaagttgccccagttccatggggttcgtgtctttggcatcaacaaatactgagggatgggttttgggacagctccatgggcatggggaaggcactgaaacagaggactataaaacatccttctcttattctccatactgtcttctacacctttaaagcctgagaactatacaacctttcccagactcccaagaagagaagagattggcaaatggggctcctgggcccagtcctgctagtggcaagtttctttgaatcaggaaggcaggtgaggtaagggccaaatcactctcctccatagcaggaagccatttgggcagcttctttggtgattacatctttccatatcttttacacttaccaccttccagctctgttttgctgtgtatttttcttacaataatttttttcagctatagctgcagtttaatcaggatgggtagagagctgtcctcataaggctgggggtgggaagatggaatactgacctaatgtataaaacttaaaacaattctccaatcccctctcctttggtccagtaggaggtgcccttcactctaagcttaacacttagtagggaagagattctcaaatgagaaaaagggctccggctatatgggcaacaaagagggaagatacaggttgccagttatacatttatagaaagataatcccctggctttaaatagtcatgtacatacaaatatgaacaaacttaaaaaaaaaatacaaacccttggatcacatgggggcttctgggaacccccgtattcttccccctcacccaagggcagtgggcatgaatctactttttaaaaatgattaattttgacaaaaaaaaaaaaaaaaaaaaaaaaaaa

SEQ ID NO: 2603 - DNA, 4272 bp, Homo sapiens
tcctgcttcacaggctccgcggcctccggcctcctcggcccccgtcccccggcctcctcggcccccgtcccccgccatccgccgcccggatcctcgccgccctccctaggccgccccgccgccatgggcctgcgcccgccgcgccgccgggccgagggcagctgaggcgcggtgcgaagatgggcgaggacagagcagggcccgagcgccagccccagcagcccgggcgccccgcgcgcgcccgcccgcgccgccgaggggatgcccgcgcccgccgccgcgccctgagcgcctttgtctgccgcccgcgccctccgcaccactagcctctcgggagcatggcgtcggccccgccggcctcgcccccgggctcggagccgccggggcccgacccggagccgggcgggccggacgggccgggggcggcgcaactggctccgggccctgcggagctacgcctcggagcgcccgtcggcggccccgacccgcagtccccgggcctggatgagcctgcgcccggggccgctgcagatggcggggcgcgttggagcgccgggccggccccggggctggagggaggcccgcgagaccccgggccgtccgccccgccgccgcgctccggcccgcgggggcagcttgcgagccccgacgccccgggcccagggccgcgctccgaagcgccgcttccagaactcgacccgttgttctcctggactgaggagcccgaggagtgtggccccgcgagctgcccggagagcgcgcctttccgcttgcaggggtccagcagcagccaccgagcgcggggcgaggtcgacgtcttctctcccttccccgcgcccacggcgggcgagctggcgctggagcaaggtcccgggtccccgccgcagccctcggacctcagccagacccacccccttccgagcgagcccgtggggagtcaggaggacggcccccgcctccgagccgtgttcgatgccctggacggggatggggacggtttcgtccgcatcgaggacttcatccagtttgctacggtctacggggcagagcaggtgaaggacttaactaagtacttggatcccagtgggctcggcgtgatcagctttgaagacttctaccaagggatcacagccatcagaaacggagatcctgatggccagtgctacggtggtgtcgcttctgcccaagatgaggagcccctggcctgcccggacgagttcgatgacttcgtcacctatgaggccaacgaggtgacggacagcgcgtacatgggctccgagagcacctacagtgagtgtgagaccttcacggacgaggacaccagcaccctggtgcaccctgagctgcaacctgaaggggacgcagacagtgccggcggctcggccgtgccctctgagtgcctggacgccatggaggagcccgaccatggtgccctgctgctgctcccaggcaggcctcacccccatggccagtctgtcatcacggtgatcgggggcgaggagcactttgaggactacggtgaaggcagtgaggcggagctgtccccagagaccctatgcaacgggcagctgggctgcagtgaccccgctttcctcacgcccagtccgacaaagcggctctccagcaagaaggtggcaaggtacctgcaccagtcaggggccctgaccatggaggccctggaggacccttcccccgagctcatggagggcccagaggaggacattgctgacaaggttgtcttcctggaaaggcgtgtgctggagctggaaaaggacacggcagccaccggtgagcaacacagccgcctgaggcaggagaacctgcagctggtgcacagagcaaacgccctggaggagcagctgaaggagcaggagctgagagcctgcgagatggtcctggaagagacccggcgtcagaaggagctcctgtgcaagatggagagggagaagagcattgagatcgagaacctgcagaccaggctacagcaactggacgaggagaacagtgaactccggtcctgcacgccctgtctgaaggccaacattgagcgtctggaggaggagaagcagaagctgttggatgagatagagtcgctgacgctgcggctcagtgaagagcaggagaacaagaggagaatgggggacaggctgagtcacgagaggcaccagttccagagggacaaggaggccacccaggagctgatcgaggacctccgaaagcagctggagcacctgcagctcctcaagctggaggccgagcagcggcggggccgcagcagcagcatgggcctgcaggagtaccacagccgcgcccgggagagcgagctggagcaggaggtccgcaggctgaagcaggacaaccgcaacctgaaggagcagaacgaggagctgaacgggcagatcattaccctcagcatccagggcgccaagagcctcttctccacagccttctctgagtccctggctgcagagatcagctccgtctcccgagatgagctcatggaggcgattcagaagcaggaggagatcaacttccgcctgcaggactacatcgacaggatcatcgtggccatcatggagaccaacccgtccatcctggaggtcaagtagaggcaggaaggtccagcctgagctggattcgggactccaacaccctggagtggttccgtcagaccatgaggagccaagaccagcaggtcccacagccgacagtgcccagagcatgcagggaaccctcgtgcagctgagctggggccgccaaagaccggggctgccaaaggggcagagggtggtggagaggagagggagaaagggaagtcccagggcccggggtccacagaggatgagggttgtggcagggccgtccatcagcgctgaccttccgggggcccagagcttcccagccctgagtcaagctggccatgaacgcgtacacttcagttcagcaggatgggctggagagcctctctgtgcagcggtgtggggtgagccctgctgtggcctccttgtggtggtccctcttcccacgtgcagccctgttgggaagaaaggaagaaaacaggtccctccaggggtgctgctgcctaagccacccacataagtacgctggtgccgtgtcacccatgttgagccgctcctgatggctgacgggctcccagaccctcacctcggacatggtggtgggggaaggacgggtgggcaaggctggtgcgttccccagctctccctacgctgctcgggccattgcccagccagatgtggtcacctcagtccagctctggggcctccaggccatgtggctgttcccacggcccagtcctcgctgcagtaacccctgggggctctgaccacctatgggggccgggcaggagcctctggggcctccactccgacatcaggacctgagatgaccgctgtgtggcgctctctccctgggcagggtggatgccacaggcccctctggctcccaggtgctgcttctccacaggtgcggcctggcccggcctcctaaaggccacaccctccccacgcacttcccaggccagaatccaaacatcgggaaccctgttttcttctgggtgtgtctcacttagaaatcgtggttcttccccgagggtgcatgttgcaggagggagagggcagggaagactcacagcagagcaggagggggcctgtgcttctcggggtctgcaccccaggcacagcggtgtcaccccgcaggaccgcgggcctgccccaacccccagcattcccgggtgggcccagaccccatcaccaagactggccacccgctgcgtgtgtgtgcgcgcgcgtgtacgtgtggccccacatccgccgccttccacgctaggatgtaagaggtcgcctcctattgtacatttggggaaagccttgggtgtaaatcagtgtaaacttggaggagagatttttctatcatgtagagtaggtattttttatagattgaaggttgatcaattttttaatactttcaagagaaaactgtgtatacacatgaaatatatatatatatatatatatatatatgtataatatataaagactggcaccctgcctctctgtgcccaggcccagccctggtgacatggcaccactcagcagtgctgtcactgtaagcatggactcccaggagacagtgtgggaaacgctcctgctttaattccccgagaaacggctcttcctgcctggatgcaggagggcaggggccaccacagattaaagctgttactgcacaaaaaaaaaaaaaaaaaaaaaa

SEQ ID NO: 2604 - DNA, 4611 bp, Homo sapiens
gtgtcgctcgctttctgtcagcctctctccctctccctctcccctctccttcctctcgcttcctctctcgcacctgagcgtacgcacctgcccgggcccggctccctcctcctctcccctccctctttccccgcccggccgcgggagcctcgtggctgcgtcaccgccgcccccccagacaagatggacaccgcggaggaagacatatgtagagtgtgtcggtcagaaggaacacctgagaaaccgctttatcatccttgtgtatgtactggcagtattaagtttatccatcaagaatgcttagttcaatggctgaaacacagtcgaaaagaatactgtgaattatgcaagcacagatttgcttttacaccaatttattctccagatatgccttcacggcttccaattcaagacatatttgctggactggttacaagtattggcactgcaatacgatattggtttcattatacacttgtggcctttgcatggttgggagttgttcctcttacagcatgccgcatctacaagtgcttgtttactggctccgtgagctcactactgacgctgccattagatatgctgtcaacggaaaatttgttggcagattgtttgcagggttgttttgtggtgacgtgcacactgtgtgcattcatcagcctggtgtggttgagagagcagatagtccatgggggagcaccaatttggttggagcatgctgccccaccgttcaatgctgcggggcatcaccaaaatgaggctccagcaggaggaaatggtgcagaaaatgttgctgctgatcagcctgctaacccaccagctgagaacgcagtggtgggggaaaaccctgatgcccaggatgaccaggcagaagaggaggaggaggacaatgaggaggaagatgacgctggtgtggaggatgcggcagatgctaataacggagcccaggatgacatgaattggaatgctttagaatgggaccgagctgctgaagagcttacatgggaaagaatgctaggacttgatggatcactagtttttctggaacatgtcttctgggtggtatctttaaatacactgttcattcttgtttttgcattttgcccttaccatattggtcatttctcccttgttggtttgggatttgaagaacacgtccaagcatctcattttgaaggcctaatcacaaccatagttgggtatatacttttagcaataacactgataatttgtcatggcttggcaactcttgtgaaatttcatagatctcgtcgcttactgggagtctgctatattgttgttaaggtctctttgttagtggtggtagaaattggagtattccctctcatttgtggttggtggctggatatctgttccttggaaatgtttgatgctactctgaaagatcgagaactgagctttcagtcggctccaggtactaccatgtttctgcattggctagtgggaatggtatatgtcttctactttgcctccttcattctactactgagagaggtacttcgacctggtgtcctgtggtttctaaggaatttgaatgatccagatttcaatccagtacaggaaatgatccatttgccaatatataggcatctccgaagatttattttgtcagtgattgtctttggctccattgtcctcctgatgctttggcttcctatacgtataattaagagtgtgctgcctaattttcttccatacaatgtcatgctctacagtgatgctccagtgagtgaactgtccctcgagctgcttctgcttcaggttgtcttgccagcattactcgaacagggacacacgaggcagtggctgaaggggctggtgcgagcgtggactgtgaccgccggatacttgctggatcttcattcttatttattgggagaccaggaagaaaatgaaaacagtgcaaatcaacaagttaacaataatcagcatgctcgaaataacaacgctattcctgtggtgggagaaggccttcatgcagcccaccaagccatactccagcagggagggcctgttggctttcagccttaccgccgacctttaaattttccactcaggatatttctgttgattgtcttcatgtgtataacattactgattgccagcctcatctgccttactttaccagtatttgctggccgttggttaatgtcgttttggacggggactgccaaaatccatgagctctacacagctgcttgtggtctctatgtttgctggctaaccataagggctgtgacggtgatggtggcatggatgcctcagggacgcagagtgatcttccagaaggttaaagagtggtctctcatgatcatgaagactttgatagttgcggtgctgttggctggagttgtccctctccttctggggctcctgtttgagctggtcattgtggctcccctgagggttcccttggatcagactcctcttttttatccatggcaggactgggcacttggagtcctgcatgccaaaatcattgcagctataacattgatgggtcctcagtggtggttgaaaactgtaattgaacaggtttacgcaaatggcatccggaacattgaccttcactatattgttcgtaaactggcagctcccgtgatctctgtgctgttgctttccctgtgtgtaccttatgtcatagcttctggtgttgttcctttactaggtgttactgcggaaatgcaaaacttagtccatcggcggatttatccatttttactgatggtcgtggtattgatggcaattttgtccttccaagtccgccagtttaagcgcctttatgaacatattaaaaatgacaagtaccttgtgggtcaacgactcgtgaactacgaacggaaatctggcaaacaaggctcatctccaccacctccacagtcatcccaagaataaagtagttgtctcaacaacttgaccttcccctttacatgtccttttttgtggacttctctctttggagatttttcccagtgatctctcagcgttgtttttaagttaaatgtatttgacttgtgttctcagcattcagagagcagcggtgtaagattctgctgttctccctggatcttctgacattactgctgtctgagatttgtatatgtgtaaatacaagttccttgataccctaaaaccttggattaaacagaatgtgcattgtacatctttaaacaaaatgtatattaatttattaaatctagttgtcactttattttggacctgctgtgatctcgacaggaaacgtgccacagagcagtagtgcgcaggcaagacttttcagtgacgccttgtggaacgcagttcatgatgtcctagcagctctcactaagggaactgtacattctttctttcttggctattcagaccttaccaagaacgttaaaggaaacaagtagaaatcagcagtggagtgtctgtggtaagaaaacatgaactttatgcttcactgttagttgtttgtggaagttattttgtataacaccaaagctgttgtacatttcctactgcctgatttttttcatgtgtctgtgtttgtaatattgtatagtatcttgtgctaggtgaggaaattatttttaattttgataatttaatattcctagtgtgatcagcattgggagttgggtttcagtggggcatgtctatacttagagaaaaaaagtccaaatgaagattttcatgagtcagcccccccgcccgcccccaccccacacccacatcctctcttttccacacacaactatctgtttattttttgtagcagtggccgaaagtcctgcaaggtcataaatctttcagagtgacatcaccaactgtactgcatcttactggatttaggacttctgagatgcttgtgaagtatagatgtggttgtggtcttagattgacagcattagagaagactggttagaacatctggtctcgctggttagtgcctcgttggctgaggactaggtgtgcatttctcctagcttttcatcaggaaatcccaaagtttccaaagctttttgtttacagaataaaacttcaaataaaaccaattcattatttgtccagaaggaagcttggctgagctggccttttaacataggaatgtatttcgttggaaacattctgaaaaatctcagagaactgaacccttacaaactttgttttccctcataaccaaagcttcaggttagaagtttagaaaaatagaatggttgggtacatgatctaaatgtttaatgctaaaggtatatcgtaagggtagtgtttgtttttgaacgataatttagaagttctcatagaaagcgtataacataggtcttcagaaactataaaagaattttcatatagtattaaaatccatagactaaaatctgagaattttttaacatatgcaagtcagccaaacataagctaccaaaataaagagcaatgtgttctggctgttttatacttcaacaattttttccctaagtggtaagcaattactttaaaacatatttttaaaaacatcggtatcgggagctgcggtggctccggccggttgtcctggcacacaaggaggcgaggctatgcgttcgaggccaacctaggcaaaattgg

SEQ ID NO: 2605 - DNA, 3415 bp, Homo sapiens
ggtggtcggagcgccgactcccttctcgtcgtcgccattttgagctggtgactgtggccggctgggagtaggcggcagtgagtttccctgggagggcagcgcgcttggcgcttctcccctccccccgatctgcctccagtctcggacttggttgttgcgcgctccggctccggctgagctgggagagttggaggaggtggcggcgggcagaggtgatgtctgggagcccttccttgacagcccgggccgagaagagtccctgcaggaagcatcacccaggctggcagatcatggtagcagcagcgggggtggctgggaagtgaaacggagccagcggctgaggaggggccccagcagcccccgaaggccctatcaggacatggagtatgaaagacgtggtggtcgtggtgacaggactggccgctatggagccactgaccgctcgcaggatgatggtggggagaaccgcagccgagaccacgactaccgggacatggactaccgttcatatcctcgcgagtatggcagccaggagggcaagcatgactatgacgactcatctgaggagcagagtgcggaggattcctacgaggcctccccgggctccgagactcagcgtaggcggcggcggcggcacaggcacagccccaccggcccgccaggcttcccccgagacggcgactatcgggaccaggactatcggaccgagcaaggggaggaggaggaggaggaggaggatgaggaggaggaggagaaggccagtaacatcgtcatgctgaggatgctgccacaggcagccactgaggatgacatccgtggccagctgcagtcgcacggcgtgcaagcacgggaggttcggctgatgcggaacaaatcttcaggtcagagccggggcttcgccttcgtcgagtttagtcacttgcaggacgctacacgatggatggaagccaatcagcactccctcaacatcctgggccagaaggtgtcgatgcactacagtgaccccaagcccaagatcaatgaggactggctgtgcaataagtgtggcgtccagaacttcaaacgccgagagaagtgcttcaaatgtggcgtgcccaagtcagaggcagagcagaagctgcccctcggcacgaggctggatcagcagacactgccactgggtggccgggagctgagccagggcctgcttcccctgccgcagccctaccaggcccagggagtcctggcctcccaagccctgtcacagggctcggagccaagctcagagaacgccaatgacaccatcattttgcgcaacctgaacccacacagcaccatggattccatcctgggggccctggcaccctacgcggtgctgtcctcctccaacgtgcgcgtcataaaggacaagcagacccaactgaaccgcggctttgccttcatccagctctccaccatcgtggaggcagcccagctgctgcagatcctgcaggccctgcacccaccactcactatcgacggcaagaccatcaatgttgagtttgccaagggttctaagagggacatggcctccaatgaaggcagtcgcatcagtgctgcctctgtggccagcactgccattgctgcggcccagtgggccatctcacaggcctcccaaggtggggagggtacctgggccacctccgaggagccgccggtcgactacagctactaccaacaggatgagggctatggcaacagccagggcacagagtcttccctctatgcccatggctacctcaagggcaccaagggccctggcatcactggaaccaaaggggatcccactggagcaggtcccgaggcctccctagagcctggggccgactctgtgtcgatgcaggctttctctcgcgcccagcctggtgctgctcctggcatctaccaacaatcagccgaggcgagcagtagccagggcactgctgccaacagccagtcgtataccatcatgtcacccgctgtgctcaaatctgagctccagagccctacccatcctagttctgctctcccaccggctaccagccccactgcccaggaatcctacagccagtaccctgttcccgacgtctctacctaccagtacgatgagacctccggctactactatgacccccagaccggcctctactatgaccccaactcccagtattactacaatgctcagagccagcagtacctgtactgggatggggagaggcggacctatgttcccgccctggagcagtcggccgacggacataaggagacaggggcaccctcgaaggagggcaaagagaagaaggagaagcacaagaccaagacagctcaacagattgccaaggacatggaacgctgggcccgcagtctcaacaaacaaaaagaaaacttcaaaaatagcttccagcctatcagctccctgcgagatgacgagaggcgggagtcagccactgcagatgctggctatgccatcctcgagaagaagggagcactagccgagagacagcacaccagcatggatctcccgaaattggccagtgacgaccgcccaagccctccgcgaggactggtggcagcctacagcggggagagtgacagtgaggaggagcaggagcgtgggggccctgagcgggaggagaagctcaccgactggcagaagctggcctgtctgctctgccgacgccagttccccagcaaagaggcgctcatccggcaccagcagctctcagggctccacaagcaaaaccttgagattcaccggcgagcccacttgtcagaaaacgagctagaagcactagagaagaatgacatggagcaaatgaagtaccgggaccgtgcagctgaacgcagagaaaagtatggcatccccgagccgccagagcccaagaggaggaagtacggcggcatatccacagcctctgtagacttcgagcagcctactcgggacgggctgggcagtgacaacattggcagtcggatgctgcaggccatgggctggaaagagggcagcggcctgggccgcaagaagcagggcattgtaacgcctatcgaggcccaaacacgggtgcggggctccggcctgggtgcacggggcagctcctacggggtcacctcaaccgagtcctacaaggagacactgcacaagacaatggtgacccgcttcaacgaggcccagtgagcagcttcaagagcaacttctccacatgttgggtgtccatcctggggcagggaaggacagagtgttggatggctgggacggggccttgctcttgtcggccagcccactccccagccagagagggcttgaccaaatcaaattgaggtggtgacttttgttggaaaattgggctgggatcacgtcctgttttgtaataaaagctgaaaagtctgaaaaaaaaaaaaaaaaaaaaaaaaaaaaaaa

SEQ ID NO: 2606 - DNA, 3190 bp, Homo sapiens
ggtggtcggagcgccgactcccttctcgtcgtcgccattttgagctggtgactgtggccggctgggagtaggcggcagtgagtttccctgggagggcagcgcgcttggcgcttctcccctccccccgatctgcctccagtctcggacttggttgttgcgcgctccggctccggctgagctgggagagttggaggaggtggcggcgggcagaggtgatgtctgggagcccttccttgacagcccgggccgagaagagtccctgcaggaagcatcacccaggctggcagatcatggtagcagcagcgggggtggctgggaagtgaaacggagccagcggctgaggaggggccccagcagcccccgaaggccctatcaggacatggagtatgaaagacgtggtggtcgtggtgacaggactggccgctatggagccactgaccgctcgcaggatgatggtggggagaaccgcagccgagaccacgactaccgggacatggactaccgttcatatcctcgcgagtatggcagccaggagggcaagcatgactatgacgactcatctgaggagcagagtgcggagatccgtggccagctgcagtcgcacggcgtgcaagcacgggaggttcggctgatgcggaacaaatcttcaggtcagagccggggcttcgccttcgtcgagtttagtcacttgcaggacgctacacgatggatggaagccaatcagcactccctcaacatcctgggccagaaggtgtcgatgcactacagtgaccccaagcccaagatcaatgaggactggctgtgcaataagtgtggcgtccagaacttcaaacgccgagagaagtgcttcaaatgtggcgtgcccaagtcagaggcagagcagaagctgcccctcggcacgaggctggatcagcagacactgccactgggtggccgggagctgagccagggcctgcttcccctgccgcagccctaccaggcccagggagtcctggcctcccaagccctgtcacagggctcggagccaagctcagagaacgccaatgacaccatcattttgcgcaacctgaacccacacagcaccatggattccatcctgggggccctggcaccctacgcggtgctgtcctcctccaacgtgcgcgtcataaaggacaagcagacccaactgaaccgcggctttgccttcatccagctctccaccatcgaggcagcccagctgctgcagatcctgcaggccctgcacccaccactcactatcgacggcaagaccatcaatgttgagtttgccaagggttctaagagggacatggcctccaatgaaggcagtcgcatcagtgctgcctctgtggccagcactgccattgctgcggcccagtgggccatctcacaggcctcccaaggtggggagggtacctgggccacctccgaggagccgccggtcgactacagctactaccaacaggatgagggctatggcaacagccagggcacagagtcttccctctatgcccatggctacctcaagggcaccaagggccctggcatcactggaaccaaaggggatcccactggagcaggtcccgaggcctccctagagcctggggccgactctgtgtcgatgcaggctttctctcgcgcccagcctggtgctgctcctggcatctaccaacaatcagccgaggcgagcagtagccagggcactgctgccaacagccagtcgtataccatcatgtcacccgctgtgctcaaatctgagctccagagccctacccatcctagttctgctctcccaccggctaccagccccactgcccaggaatcctacagccagtaccctgttcccgacgtctctacctaccagtacgatgagacctccggctactactatgacccccagaccggcctctactatgaccccaactcccagtattactacaatgctcagagccagcagtacctgtactgggatggggagaggcggacctatgttcccgccctggagcagtcggccgacggacataaggagacaggggcaccctcgaaggagggcaaagagaagaaggagaagcacaagaccaagacagctcaacagattgccaaggacatggaacgctgggcccgcagtctcaacaaacaaaaagaaaacttcaaaaatagcttccagcctatcagctccctgcgagatgacgagaggcgggagtcagccactgcagatgctggctatgccatcctcgagaagaagggagcactagccgagagacagcacaccagcatggatctcccgaaattggccagtgacgaccgcccaagccctccgcgaggactggtggcagcctacagcggggagagtgacagtgaggaggagcaggagcgtgggggccctgagcgggaggagaagctcaccgactggcagaagctggcctgtctgctctgccgacgccagttccccagcaaagaggcgctcatccggcaccagcagctctcagggctccacaagcaaaaccttgagattcaccggcgagcccacttgtcagaaaacgagctagaagcactagagaagaatgacatggagcaaatgaagtaccgggaccgtgcagctgaacgcagagaaaagtatggcatccccgagccgccagagcccaagaggaggaagtacggcggcatatccacagcctctgtagacttcgagcagcctactcgggacgggctgggcagtgacaacattggcagtcggatgctgcaggccatgggctggaaagagggcagcggcctgggccgcaagaagcagggcattgtaacgcctatcgaggcccaaacacgggtgcggggctccggcctgggtgcacggggcagctcctacggggtcacctcaaccgagtcctacaaggagacactgcacaagacaatggtgacccgcttcaacgaggcccagtgagcagcttcaagagcaacttctccacatgttgggtgtccatcctggggcagggaaggacagagtgttggatggctgggacggggccttgctcttgtcggccagcccactccccagccagagagggcttgaccaaatcaaattgaggtggtgacttttgttggaaaattgggctgggatcacgtcctgttttgtaataaaagctgaaaagtctgcaaaaaaaaaaaaaaaaaaaaaaaaaaaaaaaaaaaaaaa

SEQ ID NO: 2607 - DNA, 3116 bp, Homo sapiens
ccggtgagtgtggctgcggggtcgcgcccaccctctacctgtgccgggggccggaacctggccccggggagggcgcggcctcggggagacggcgtgcaggcccagcactgttggtcaccgcaggcctgtcttcctattcaccgtgggcagcagagggatggctgctcagctgctgactgatgaggcactgactgggagactagacctgaaatgaaagagttggatccaaagaatgacatttcggaagacaagctctccgttgttggggaggccacggggggacccacgaggaatggtgccaggggtcctggctcagaaggagtgtgggaaccaggcagctggccagagaggccgcggggagatgcaggtgcagagtgggagccattgggaattccccaggggaacaaactcttagggggctcagtacccgcatgtcatgaactgaaggcatttgccaaccaaggctgtgtcctggtcccaccacggctggacgaccccacagaaaagggggcctgtccacccgtaaggcgtggcaagaacttctccagcacttcagacctcagtaagccccccatgccctgcgaggagaagaaaacctacgactgcagcgagtgtggcaaggcctttagccgaagctcgtccctgataaagcaccaaaggatccacacgggagaaaagccgtttgagtgtgacacctgtgggaagcacttcatcgagcgctcgtccctcaccatccaccagcgggtgcacacgggcgagaagccctatgcctgcggggactgcggcaaggccttcagccagcgcatgaacctcactgtgcaccagcgcacgcacacgggcgagaagccgtatgtgtgcgacgtgtgtggcaaggccttccggaagacttcctctctcacccagcacgagcggatccacacgggggagaagccctacgcgtgcggggactgcggcaaggccttcagccagaacatgcacctcatcgtgcaccagcgcacgcacaccggggagaagccgtacgtgtgccccgagtgcgggcgagccttcagccagaacatgcacctgaccgagcaccagcgcacgcacaccggggagaagccgtacgcctgcaaggagtgcggcaaggccttcaacaagagctcctctctcaccctgcaccagaggaaccacaccggcgagaagccctacgtgtgcggcgagtgcggcaaggccttcagccagagctcctacctcatccagcaccagcgcttccacatcggcgtgaagccgttcgagtgcagcgagtgcggcaaggccttcagcaagaactcctcgctcacgcagcaccagcgcatccacaccggcgagaagccctacgagtgctacatctgcaagaagcacttcacggggcgctcgtccctcatcgtgcaccagatcgtgcacaccggggagaagccctacgtgtgcggcgagtgcggcaaggccttcagccagagcgcctacctcatcgagcaccagcggatccacaccggcgagaagccgtacaggtgcggccagtgcgggaagtccttcatcaagaactcctccctcactgtgcaccagcggatccacacgggcgagaagccctaccgatgcggcgagtgcgggaagaccttcagccgcaacacgaacctgacgcgccacctgcggattcacacctgagcgcctctgtgcagggctctcactggcggtgcccaggacggacgccagatggctgcgcgctttgtcagcagtgctgtgagaagttctcccctggggtggggactcggggtcaggggagctcaggaatgtggtgttgtggaggggctggctgatcacacatgccccctccttactgagcctcagaaagcaagcccctcggtgtctgacgtatctggggacacttcaaggttcactgtagctgagccatggccgctggtaacagacatcagggttccagactagccctcttgagtaactgtcctagagctgggacaggtcacgcctgcctccacatctctgtttcttcagcgggaaagtggagctggtggaggggagggaggagacatctccctctttgtcagatacatcctggagtccagatgcagcttgtcaccatctgcattttctccgtgggttgggagcgtgagggccttcctatccctccacccaccgtttccctgcagtgcacgctggcagccaccaagctaggaagtggcaggagtttgccggttgtttgtgaggggaaaaatttttttttcagagttagcaaataacagtaactactgctttgaatgccaaagtttcttagagtggtctgttacgttttttaaaaataaaacttttaattaagggagactatgttattttaaacagtcttctgttttggccagttgtctggtcaaaatcggcttcagtgattgtgggaggggcaagaaggaaaagaaacagcagcaggtttgatattcagaaagaaatatgcatggattcaataagtatatacatctgagcacagattatttttatagtgatttttgcagctaaatgtgaaggcaactgtcttaagtcccttcctgctgctgtaacaaaagaccttagactgggtaatttataaacaatagaaatttgtcactcatggttctggatgctgggaagtccaagatcaaggctctggcagatttggtgtctgatggggtatgttcttcataggtagtgcttgtgtcttgatgtgtgtcttcacgtggttgtaaacagcagacttcctcaggccccttataagggtgctaatcccagtcacaagggccctgacctcatgacctcccaaaggtcctccctcttcatactgttacattggggatcaagtttccaatatgtgaatacagggaagcaccaacagaccatatcagtaacttcgagtgagtttcctaaggccgactgaagctctgtttacacataagagtgttccccaaagtgcactttctctggggccttttaggccatacttttaattttgttatttgatactactggttgctaatgttctggcatttccagttgttccacactccctgacactggtgtacacaaataaataatacagaaaaaaaaaaaaaaaaaaa

SEQ ID NO: 2608 - DNA, 3287 bp, Homo sapiens
cccgctcctccgcgccgccgccagccccgctgcgcgctctgctcttcgcagctccccggacccgcagccatggccgacatcaagacgggcatcttcgccaagaacgtccagaagcgactcaaccgcgcgcaggaaaaggtcctccaaaagctggggaaagctgatgagacaaaagacgaacagttcgaagaatatgtccagaacttcaaacggcaagaagcagagggtaccagacttcagcgagaactccgaggatatttagcagcaatcaaaggcatgcaggaggcctccatgaagctcacagagtcgctgcatgaagtctatgagcctgactggtatgggcgggaagatgtgaaaatggttggtgagaaatgtgatgtgctgtgggaagacttccatcaaaaactcgtggatgggtccttgctaacactggatacctacctggggcaatttcctgacataaagaatcgcatcgccaagcgcagcaggaagctagtggactatgacagtgcccgccaccatctggaagctctgcagagctccaagaggaaggatgagagtcgaatctctaaggcagaagaagaatttcagaaagcacagaaagtgtttgaagagtttaacgttgacttacaagaagagttaccatcattatggtcaagacgagttggattttatgttaatactttcaaaaacgtctccagccttgaagccaagtttcataaggaaattgcggtgctttgccacaaactgtatgaagtgatgacaaaactgggtgaccagcacgccgacaaggccttcaccatccaaggagcgcccagtgattcgggtcctctccgcattgcaaagacaccatcaccgcctgaggagccttcacccctcccgagcccgacagcaagtccaaatcatacattagcacctgcgtctcccgcaccagcacggcctcggtcaccttcacagacaaggaaagggcctcctgtcccacctctacctaaagtcaccccgacaaaggaactgcagcaggagaacatcatcagtttctttgaggacaactttgttccagaaatcagtgtgacaacaccttcccagaatgaagtccctgaggtgaagaaagaggagactttgctggatctggactttgatcctttcaagcccgaggtgacacctgcaggttctgctggagtgacccactcacccatgtctcagacattgccctgggacctatggacgacaagcactgatttggtacagccggcttctggtggttcatttaatggattcacacagccccaggatacttcattattcacaatgcagacagaccagagtatgatctgcaacttggctgaatctgaacaggctccacccacagagccaaaagcagaggagcctctggctgctgtcacacctgccgttggtctggaccttggaatggacactcgggctgaggagccagtggaggaggcagtgatcatacctggagctgatgctgatgcagctgttggaaccttggtgtcagcagctgagggggccccaggagaggaagcagaggcggagaaggccactgtccctgccggggaaggagtaagtttagaggaggccaaaattggaactgaaaccactgagggtgcagagagtgcccaacctgaagcagaggagctcgaagcaacagtgcctcaggagaaggtcattccttcggtggtcatagagcctgcctccaaccatgaagaggaaggagaaaacgaaataactataggtgcagagcccaaggagaccaccgaggacgcggctcctccgggccccaccagcgagacaccggagctggctacggagcagaagcctatccaggaccctcagcccacgccttctgcaccagccatgggggctgctgaccagctagcatctgcaagggaggcctctcaggaattgcctcctggctttctctacaaggtggaaacactgcatgattttgaggcagcaaattctgatgaacttaccttacaaaggggtgatgtggtgctggtggtcccctcagattcagaagctgatcaggatgcaggctggctggtgggagtgaaggaatcagactggcttcagtacagagaccttgccacctacaaaggcctctttccagagaacttcacccgacgcttagattagggcaacaagtactgcaagaaggagctcagttacggggtttttaaaccttcatgaaaacctgaagagttcacttttgttattatgctcttaatgatttacagactgatgccagacaaaccttgggaagatgtatcaatggagcatgtgtgcaaaaaaatgtaagaggaaaaaaagtaaattaaggaaaaaatcctcactcattcccatgttgtcaataacaggtttgtttgtgctttgtccaagctgtggagactcttgtacttgatcccctcccaccaattctaaagtagctttctccagatcagactttaatttctctgcatcaggtgtatcgtattgagtggctgccctgcagaagatgtgatgaattatcctgtagtacaagattatcttattcccctgcccaggtgtgagcacgtgctctcgctccctttcaggtttactatgtttaaaactaaactgctgcaaaagttctcaatgttcttttccaacacatctatatatatatggacacacagtcacgcaagctagttcccatgactcctggatctatgtgtatgcagaaggctacatatacatagttgcttctttcctttccattgtagctctttgcctctcaattgtcattgatacatgcattgctcttattctgtctggcattacaattgcagttttgcctaatggcaaaaccagccatcccattggcaaaagagtcaacagtatctgtgtttgtactgtgcagttttcaggatgagatgacagatagcacgactacactgaggcaccctcagagaaggcagggcctgatttatctagctgtccagccgctgtggctggaggtaggctagttgggatgggcagctaagcagtcttctcttctgcctttatgagattgggtagaaagatggggcatattcatctacccccaaaagaacactataaaaacagctcctctatatttccacctctttctatttatgcaactcatcttcacagattgttctaaagtaaaatagatggtgtatgctgtatccacaaatcatctgtaacaattatgttttcagtgctgtgtcattccaaataaacctttggtaatcttcaacgattaccctaaaaaaaaaaaaaaaaaa

SEQ ID NO: 2609 - DNA, 3161 bp, Homo sapiens
cccgctcctccgcgccgccgccagccccgctgcgcgctctgctcttcgcagctccccggacccgcagccatggccgacatcaagacgggcatcttcgccaagaacgtccagaagcgactcaaccgcgcgcaggaaaaggtcctccaaaagctggggaaagctgatgagacaaaagacgaacagttcgaagaatatgtccagaacttcaaacggcaagaagcagagggtaccagacttcagcgagaactccgaggatatttagcagcaatcaaaggcatgcaggaggcctccatgaagctcacagagtcgctgcatgaagtctatgagcctgactggtatgggcgggaagatgtgaaaatggttggtgagaaatgtgatgtgctgtgggaagacttccatcaaaaactcgtggatgggtccttgctaacactggatacctacctggggcaatttcctgacataaagaatcgcatcgccaagcgcagcaggaagctagtggactatgacagtgcccgccaccatctggaagctctgcagagctccaagaggaaggatgagagtcgaatctctaaggcagaagaagaatttcagaaagcacagaaagtgtttgaagagtttaacgttgacttacaagaagagttaccatcattatggtcaagacgagttggattttatgttaatactttcaaaaacgtctccagccttgaagccaagtttcataaggaaattgcggtgctttgccacaaactgtatgaagtgatgacaaaactgggtgaccagcacgccgacaaggccttcaccatccaaggagcgcccagtgattcgggtcctctccgcattgcaaagacaccatcaccgcctgaggagccttcacccctcccgagcccgacagcaagtccaaatcatacattagcacctgcgtctcccgcaccagcacggcctcggtcaccttcacagacaaggaaagggcctcctgtcccacctctacctaaagtcaccccgacaaaggaactgcagcaggagaacatcatcagtttctttgaggacaactttgttccagaaatcagtgtgacaacaccttcccagaatgaagtccctgaggtgaagaaagaggagactttgctggatctggactttgatcctttcaagcccgaggtgacacctgcaggttctgctggagtgacccactcacccatgtctcagacattgccctgggacctatggacgacaagcactgatttggtacagccggcttctggtggttcatttaatggattcacacagccccaggatacttcattattcacaatgcagacagaccagagtatgatctgcaacttgatcatacctggagctgatgctgatgcagctgttggaaccttggtgtcagcagctgagggggccccaggagaggaagcagaggcggagaaggccactgtccctgccggggaaggagtaagtttagaggaggccaaaattggaactgaaaccactgagggtgcagagagtgcccaacctgaagcagaggagctcgaagcaacagtgcctcaggagaaggtcattccttcggtggtcatagagcctgcctccaaccatgaagaggaaggagaaaacgaaataactataggtgcagagcccaaggagaccaccgaggacgcggctcctccgggccccaccagcgagacaccggagctggctacggagcagaagcctatccaggaccctcagcccacgccttctgcaccagccatgggggctgctgaccagctagcatctgcaagggaggcctctcaggaattgcctcctggctttctctacaaggtggaaacactgcatgattttgaggcagcaaattctgatgaacttaccttacaaaggggtgatgtggtgctggtggtcccctcagattcagaagctgatcaggatgcaggctggctggtgggagtgaaggaatcagactggcttcagtacagagaccttgccacctacaaaggcctctttccagagaacttcacccgacgcttagattagggcaacaagtactgcaagaaggagctcagttacggggtttttaaaccttcatgaaaacctgaagagttcacttttgttattatgctcttaatgatttacagactgatgccagacaaaccttgggaagatgtatcaatggagcatgtgtgcaaaaaaatgtaagaggaaaaaaagtaaattaaggaaaaaatcctcactcattcccatgttgtcaataacaggtttgtttgtgctttgtccaagctgtggagactcttgtacttgatcccctcccaccaattctaaagtagctttctccagatcagactttaatttctctgcatcaggtgtatcgtattgagtggctgccctgcagaagatgtgatgaattatcctgtagtacaagattatcttattcccctgcccaggtgtgagcacgtgctctcgctccctttcaggtttactatgtttaaaactaaactgctgcaaaagttctcaatgttcttttccaacacatctatatatatatggacacacagtcacgcaagctagttcccatgactcctggatctatgtgtatgcagaaggctacatatacatagttgcttctttcctttccattgtagctctttgcctctcaattgtcattgatacatgcattgctcttattctgtctggcattacaattgcagttttgcctaatggcaaaaccagccatcccattggcaaaagagtcaacagtatctgtgtttgtactgtgcagttttcaggatgagatgacagatagcacgactacactgaggcaccctcagagaaggcagggcctgatttatctagctgtccagccgctgtggctggaggtaggctagttgggatgggcagctaagcagtcttctcttctgcctttatgagattgggtagaaagatggggcatattcatctacccccaaaagaacactataaaaacagctcctctatatttccacctctttctatttatgcaactcatcttcacagattgttctaaagtaaaatagatggtgtatgctgtatccacaaatcatctgtaacaattatgttttcagtgctgtgtcattccaaataaacctttggtaatcttcaacgattaccctaaaaaaaaaaaaaaaaaa

SEQ ID NO: 2610 - DNA, 4116 bp, Homo sapiens
ggagaaggcgggcggaagttccacgccaagatactggattcggtgctgaggcggcggctgcggcacgggaaaggctcagtgactgaagctccaaaggccagcaggctggtggggacgtgaccgaagcgaggctctggttccctttcggtgggcgccatttgagcctcatctctggcttccccaggatgcgccggcagccggggagcggctccgggcgcgaggtctgaggatgatctttcctgtcgcccgctacgcgctccggtggctgcgacggcccgaagaccgtgccttttcccgcgccgccatggagatggccctccgaggcgtgcggaaagtcctctgtgtggccgaaaaaaacgacgcggccaaggggatcgccgacctgctgtcaaacggtcgcatgaggcggagagaaggactttcaaaattcaacaagatctatgaatttgattatcatctgtatggccagaatgttaccatggtaatgacttcagtttctggacatttactggctcatgatttccagatgcagtttcgaaaatggcagagctgcaaccctcttgtcctctttgaagcagaaattgaaaagtactgcccagagaattttgtagacatcaagaaaactttggaacgagagactcgccagtgccaggctctggtgatctggactgactgtgatagagaaggcgaaaacatcgggtttgagattatccacgtgtgtaaggctgtaaagcccaatctgcaggtgttgcgagcccgattctctgagatcacaccccatgccgtcaggacagcttgtgaaaacctgaccgagcctgatcagagggtgagcgatgctgtggatgtgaggcaggagctggacctgaggattggagctgcctttactaggttccagaccctgcggcttcagaggatttttcctgaggtgctggcagagcagctcatcagttacggcagctgccagttccccacactgggctttgtggtggagcggttcaaagccattcaggcttttgtaccagaaatcttccacagaattaaagtaactcatgaccacaaagatggtatcgtagaattcaactggaaaaggcatcgactctttaaccacacggcttgcctagttctctatcagttgtgtgtggaggatcccatggcaactgtggtagaggtcagatctaagcccaagagcaagtggcggcctcaagccttggacactgtggagcttgagaagctggcttctcgaaagttgagaataaatgctaaagaaaccatgaggattgctgagaagctctacactcaagggtacatcagctatccccgaacagaaacaaacatttttcccagagacttaaacctgacggtgttggtggaacagcagacccccgatccacgctggggggcctttgcccagagcattctagagcggggtggtcccaccccacgcaatgggaacaagtctgaccaagctcaccctcccattcaccccaccaaatacaccaacaacttacagggagatgaacagcgactgtacgagtttattgttcgccatttcctggcttgctgctcccaggatgctcaggggcaggagaccacagtggagatcgacatcgctcaggaacgctttgtggcccatggcctcatgattctggcccgaaactatctggatgtgtatccatatgatcactggagtgacaagatcctccctgtctatgagcaaggatcccactttcagcccagcaccgtggagatggtggacggggagaccagcccacccaagctgctcaccgaggccgacctcattgccctcatggagaagcatggcattggtacggatgccactcatgcggagcacatcgagaccatcaaagcccggatgtacgtgggcctcaccccagacaagcggttcctccctgggcacctgggcatgggacttgtggaaggttatgattccatgggctatgaaatgtctaagcctgacctccgggctgaactggaagctgatctgaagctgatctgtgatggcaaaaaggacaaatttgtggttctaaggcagcaagtgcagaaatacaagcaggttttcattgaagcggtggctaaagcaaagaaattggacgaggccttggcccagtactttgggaatgggacagagttggcccagcaagaagatatctacccagccatgccagagcccatcaggaagtgcccacagtgcaacaaggacatggtccttaagaccaagaagaatggcgggttctacctcagctgcatgggtttcccagagtgtcgctcagctgtgtggcttcctgactcggtgctggaggccagcagggacagcagtgtgtgtccagtttgtcagccacaccctgtgtacaggttaaagttaaagtttaagcgcggtagccttcccccgaccatgcctctggagtttgtttgctgcatcggcggatgcgacgacaccctgagggagatcctggacctgagattttcagggggcccccccagggctagccagccctctggccgcctgcaggctaaccagtccctgaacaggatggacaacagccagcacccccagcctgctgacagcagacagactgggtcctcaaaggctctggcccagaccctcccaccacccacggctgctggtgaaagcaattctgtgacctgcaactgtggccaggaggctgtgctgctcactgtccgtaaggagggccccaaccggggccggcagttctttaagtgcaacggaggtagctgcaacttcttcctgtgggcagacagccccaatccgggagcaggagggcctcctgccttggcatatagacccctgggcgcctccctgggatgcccaccaggcccagggatccacctaggtgggtttggcaaccctggtgatggcagtggtagtggcacatcctgcctttgcagccagccctccgtcacacggactgtgcagaaggatggacccaacaaggggcgccagttccacacatgtgccaagccgagagagcagcagtgtggctttttccagtgggtcgatgagaacaccgctccagggacttctggagccccgtcctggacaggagacagaggaagaaccctggagtcggaagccagaagcaaaaggccccgggccagttcctcagacatggggtccacagcaaagaaaccccggaaatgcagcctttgccaccagcctggacacacccgtcccttttgtcctcagaacagatgagctcagggtagggtagagaacgccactttctcagacctgtcccctttgtgtttagaaatgagttaaccaggaccaagtggccatttagtgtcctggaaacttagaggacagtgttggcctttggagtcgggccttcttgtgttaaggggcacaaggtccagatcactctggagcaggccagctctgctggacagtgaccctcttcccaggcctcaggagtgaccatagccactgctgaaaagtcacgcagctgctccctcggaccccccaaggatggttgctgttagcagaggattggtgcagtcccagctgaagcccactgtgtgccaaaggaagaagctcccagggctgcttccttcacctgcagaaagccccaagtgagccaccagcactcatggggcagtccctgtccaggctgcccagggcttctcatagacgtcctgagaaggacggtgtaatgcaaggaaatggctgtggtaacactgatccttcagaagaagcttcattccctcttaatctagttaagccaggacatccagaattcattgctttaataaagaacccaggccgggtgcagtggctcatgcctgtaatcccagcactttgggaggctgtggggggcggattgcctgagctcaggagttcgagaccagccagggcaacatggtgaaaccctgtctctactaaaatacaaaaaattagccaggtgtggcggtgtgcgcctgtagacccggctactcaggaggctgaggcaggagaattgcttgaacccgggaggcggaggttgcagttagctgagattgcgccactggacgacagagcgagactcagtctcaaaaaaaatttaaaaatttaaaaaaataaaaagaatccaaccccgg

SEQ ID NO: 2611 - DNA, 3028 bp, Homo sapiens
gaagaggttcggcggctgatggcggatcaggatcggaagcctgcgtaactttctcccttgatccgggagtctttccactggattcacaatgacatcctttcaagaagtcccattgcagacttccaactttgcccatgtcatctttcaaaatgtggccaagagttaccttcctaatgcacacctggaatgtcattacaccttaactccatatattcatccacatccaaaagattgggttggtatattcaaggttggatggagtactgctcgtgattattacacgtttttatggtcccctatgcctgaacattatgtggaaggatcaacagtcaattgtgtactagcattccaaggatattaccttccaaatgatgatggagaattttatcagttctgttacgttacccataagggtgaaattcgtggagcaagtacacctttccagtttcgagcttcttctccagttgaagagctgcttactatggaagatgaaggaaattctgacatgttagtggtgaccacaaaagcaggccttcttgagttgaaaattgagaaaaccatgaaagaaaaagaagaactgttaaagttaattgccgttctggaaaaagaaacagcacaacttcgagaacaagttgggagaatggaaagagaacttaaccatgagaaagaaagatgtgaccaactgcaagcagaacaaaagggtcttactgaagtaacacaaagcttaaaaatggaaaatgaagagtttaagaagaggttcagtgatgctacatccaaagcccatcagcttgaggaagatattgtgtcagtaacacataaagcaattgaaaaagaaaccgaattagacagtttaaaggacaaactcaagaaggcacaacatgaaagagaacaacttgaatgtcagttgaagacagagaaggatgaaaaggaactttataaggtacatttgaagaatacagaaatagaaaataccaagcttatgtcagaggtccagactttaaaaaatttagatgggaacaaagaaagcgtgattactcatttcaaagaagagattggcaggctgcagttatgtttggctgaaaaggaaaatctgcaaagaactttcctgcttacaacctcaagtaaagaagatacttgttttttaaaggagcaacttcgtaaagcagaggaacaggttcaggcaactcggcaagaagttgtctttctggctaaagaactcagtgatgctgtcaacgtacgagacagaacgatggcagacctgcatactgcacgcttggaaaacgagaaagtgaaaaagcagttagctgatgcagtggcagaacttaaactaaatgctatgaaaaaagatcaggacaagactgatacactggaacacgaactaagaagagaagttgaagatctgaaactccgtcttcagatggctgcagaccattataaagaaaaatttaaggaatgccaaaggctccaaaaacaaataaacaaactttcagatcaatcagctaataataataatgtcttcacaaagaaaacggggaatcagcagaaagtgaatgatgcttcagtaaacacagacccagccacttctgcctctactgtagatgtaaagccatcaccttctgcagcagaggcagattttgacatagtaacaaaggggcaagtctgtgaaatgaccaaagaaattgctgacaaaacagaaaagtataataaatgtaaacaactcttgcaggatgagaaagcaaaatgcaataaatatgctgatgaacttgcaaaaatggagctgaaatggaaagaacaagtgaaaattgctgaaaatgtaaaacttgaactagctgaagtacaggacaattataaagaacttaaaaggagtctagaaaatccagcagaaaggaaaatggaaggtcagaattcccagagtcctcaatgtttcaaaacatgctcagagcaaaatggttatgttctcacattgtcaaatgcacaaccagttctgcaatatggtaatccttatgcatctcaggaaacaagagatggagcagatggtgctttttacccagatgaaatacaaaggccacctgtcagagtcccctcttggggactggaagacaatgttgtctgcagccagcctgctcgaaactttagtcggcctgatggcttagaggactctgaggatagcaaagaagatgagaatgtgcctactgctcctgatcctccaagtcaacatttacgtgggcatgggacaggcttttgctttgattccagctttgatgttcacaagaagtgtcccctctgtgagttaatgtttcctcctaactatgatcagagcaaatttgaagaacatgttgaaagtcactggaaggtgtgcccgatgtgcagcgagcagttccctcctgactatgaccagcaggtgtttgaaaggcatgtgcagacccattttgatcagaatgttctaaattttgactagttactttttattatgagttaatatagtttagcagtaaaaaaaaaaaaaaaaaaccacacctaaaatagaccactgaggagaccatagagcggatgctttcatgcaccctttactgcactttctgaccaggagctactttgagtttggtgttactaggatcagggtcagtctttggcttatcaataaattttaatctctgttaatcttacctgctttaaaaaaaagttcttgtgtgttcgtatctttatttattccctagtttgcagaactgtctgaataaaggatacaaggattatttcaatgttactgcactgaaaaacgtgtatgtattagtgtgctagattatttagcagaatattcacaagtttctgttgaccttgttgattgagcatgactactaaatattatgtaataaaaagcatttgtcataacaaaaaaaaaaaaaaaaaaaaaaaaaaaaaaaaaaaaaaaaaaaaaaaaaaaaaaaaaaaaaaaaaaaaaaaaaaaaaaaaaaaaaaaaaaaaaaaaaaaaaaaaaaaaaaaaaaaaaaaaaaaaaaaaaaaaaaaaaa

SEQ ID NO: 2612 - DNA, 1621 bp, Homo sapiens
gccccggccccgccccgcgagcgccgagacttgttggccgcggagactgcgaccctcttctctcagtctgccttactaccatgccgctctacgagggcctggggagcggcggggagaagacggcggtcgtgatcgacctgggagaggcctttaccaagtgtggatttgctggagaaactggtccaagatgtataattcctagtgtgataaaaagagctgggatgcctaagcctgtcagagttgttcagtataatatcaatacagaagaattatattcctacctaaaggaattcatccacatactatatttcaggcatctattggtgaatcccagagaccgccgagttgtgattatcgaatcggtattatgtccttctcacttcagagagacactcactcgtgttcttttcaaatattttgaggttccatctgtcttgcttgctccaagtcatctaatggctcttctgacgcttggaattaattctgccatggtcctagattgtggatatagggaaagcctggtgttacccatatatgaaggaatcccagttctaaattgttggggagcactacccctaggaggaaaagctcttcacaaagagttggaaactcaactattggaacaatgtactgttgacacaagtgttgctaaagaacagagccttccctcagtgatgggttcagttccggaaggtgtcttagaggacattaaagcgcgtacttgctttgtaagtgatctgaagcgaggactaaaaatccaagcagcaaaatttaatattgatgggaataatgagcgtccctccccacccccaaatgttgactatccattagatggagagaagattttacatatccttggatcaatcagagattcagttgtggaaattctttttgaacaagataatgaagagcaatcagttgccactttaatattggattcccttatacagtgtccgatagacaccaggaagcaactagcagagaatttggtagtcataggtggcacttctatgttgccaggatttctccacagattgcttgcagaaataaggtatttggtagaaaaaccaaaatataaaaaagcacttggcactaagacatttcgaattcatactccacctgcaaaagctaattgtgtggcctggttgggaggggctatttttggagcattacaagatatacttgggagccgttctgtttcaaaggaatattataatcagacgggccgtatacctgattggtgttctctcaataacccacctttggaaatgatgtttgatgtcgggaaaactcaaccacctctgatgaagagagcattttccactgagaaatagaagtttgattaaaaatcaaccttgcttcatatcaaatatttaaccaattataagcaaattgtacaaagtatgtaggatgttttgttatagaggactatagtggaagtgaaagcattctgtgtttactctttgcattaatatataattcttttgactttgtttctcttgtgtagtggtaaaatggtagctggtgcttattgagatttgctgtatttatatcaataaagtatagtaaagcaagcagtttgattttggaaaaaaaaaaaaaaaaaaaaaaaaaaaaaaaa

SEQ ID NO: 2613 - DNA, 3782 bp, Homo sapiens
ttctgcccttcccccgcttaggggggcgggggtaggggaaaggaaaataatacaatttcaggggaagtcgccttcaggtctgctgcttttttattttttttttttaattaaaaaaaaaaaggacatagaaaacatcagtcttgaacttctcttcaagaacccgggctgcaaaggaaatctcctttgtttttgttatttatgtgctgtcaagttttgaagtggtgatctttagacagtgactgagtatggatcatttgaacgaggcaactcaggggaaagaacattcagaaatgtctaacaatgtgagtgatccgaagggtccaccagccaagattgcccgcctggagcagaacgggagcccgctaggaagaggaaggcttgggagtacaggtgcaaaaatgcagggagtgcctttaaaacactcgggccatctgatgaaaaccaaccttaggaaaggaaccatgctgccagttttctgtgtggtggaacattatgaaaacgccattgaatatgattgcaaggaggagcatgcagaatttgtgctggtgagaaaggatatgcttttcaaccagctgatcgaaatggcattgctgtctctaggttattcacatagctctgctgcccaggccaaagggctaatccaggttggaaagtggaatccagttccactgtcttacgtgacagatgcccctgatgctacagtagcagatatgcttcaagatgtgtatcatgtggtcacattgaaaattcagttacacagttgccccaaactagaagacttgcctcccgaacaatggtcgcacaccacagtgaggaatgctctgaaggacttactgaaagatatgaatcagagttcattggccaaggagtgccccctttcacagagtatgatttcttccattgtgaacagtacttactatgcaaatgtctcagcagcaaaatgtcaagaatttggaaggtggtacaaacatttcaagaagacaaaagatatgatggttgaaatggatagtctttctgagctatcccagcaaggcgccaatcatgtcaattttggccagcaaccagttccagggaacacagccgagcagcctccatcccctgcgcagctctcccatggcagccagccctctgtccggacacctcttccaaacctgcaccctgggctcgtatcaacacctatcagtcctcaattggtcaaccagcagctggtgatggctcagctgctgaaccagcagtatgcagtgaatagacttttagcccagcagtccttaaaccaacaatacttgaaccaccctccccctgtcagtagatctatgaataagcctttggagcaacaggtttcgaccaacacagaggtgtcttccgaaatctaccagtgggtacgcgatgaactgaaacgagcaggaatctcccaggcggtatttgcacgtgtggcttttaacagaactcagggcttgctttcagaaatcctccgaaaggaagaggaccccaagactgcatcccagtctttgctggtaaaccttcgggctatgcagaatttcttgcagttaccggaagctgaaagagaccgaatataccaggacgaaagggaaaggagcttgaatgctgcctcggccatgggtcctgcccccctcatcagcacaccacccagccgtcctccccaggtgaaaacagctactattgccactgaaaggaatgggaaaccagagaacaataccatgaacattaatgcttccatttatgatgagattcagcaggaaatgaagcgtgctaaagtgtctcaagcactgtttgcaaaggttgcagcaaccaaaagccagggatggttgtgcgagctgttacgctggaaagaagatccttctccagaaaacagaaccctgtgggagaacctctccatgatccgaaggttcctcagtcttcctcagccagaacgtgatgccatttatgaacaggagagcaacgcggtgcatcaccatggcgacaggccgccccacattatccatgttccagcagagcagattcagcaacagcagcagcaacagcaacagcagcagcagcagcagcaggcaccgccgcctccacagccacagcagcagccacagacaggccctcggctccccccacggcaacccacggtggcctctccagcagagtcagatgaggaaaaccgacagaagacccggccacgaacaaaaatttcagtggaagccttgggaatcctccagagtttcatacaagacgtgggcctgtaccctgacgaagaggccatccagactctgtctgcccagctcgaccttcccaagtacaccatcatcaagttctttcagaaccagcggtactatctcaagcaccacggcaaactgaaggacaattccggtttagaggtcgatgtggcagaatataaagaagaggagctgctgaaggatttggaagagagtgtccaagataaaaatactaacacccttttttcagtgaaactagaagaagagctgtcagtggaaggaaacacagacattaatactgatttgaaagactgagataaaagtatttgtttcgttcaacagtgccactggtatttactaacaaaatgaaaagtccaccttgtcttctctcagaaaacctttgttgttcattgtttggccaatgaatcttcaaaaacttgcacaaacagaaaagttggaaaaggataatacagactgcactaaatgttttcctctgttttacaaactgcttggcagccccaggtgaagcatcaaggattgtttggtattaaaatttgtgttcacgggatgcaccaaagtgtgtaccccgtaagcatgaaaccagtgttttttgttttttttttagttcttattccggagcctcaaacaagcattataccttctgtgattatgatttcctctcctataattatttctgtagcactccacactgatctttggaaacttgccccttatttaaaaaaaaaaaagaaaaaaaagagtttgttactctattgtatgttacaaaagaactatagactgtggaatgcagtttaaagatgacatatgccaacaaatgccttgtattatatggcactgccgtaattcaaatttgtttttattttggaaataaaagttcactgtacttttttttcattctcattgttacatgattttttaaaaaaaggaaaagaaaatgtgaaacacaatttagtcctcattatttatttgtagatcctgcagcatcatgttgtaattaattttttggaagtttccgttaaatgtaatattgcttctcttgttaccatactgattcttttctatttataaatgtattttgatgggcagtaaaacaaagtgtcttaaaagttttaaatagagaaaatgtgctttacacagttgcctataaaaagtgctctatgttatccaagcaattcatactataagcttcactcttattgttgtatgcaatttttactatcatgcaaataagcttaggtaaataaaactaatagatcaccttagaaaattatgcaattaatgtgaaaataattgatgtttgcaatgtgtcttcctttggtttacaatcaattttaaagctacatctgtataaaatttctgtataaaggtgtatttcttttttatgagtttatggctatgaaaacagctattttgttacagctggctgtttttataagtgtatcacaattttctttatgcagaaatgttctgactaggagtggttattgactgtaactacacaattaaaattgtttgtatcgtaaaaaaaaaaaaaaaaaa

SEQ ID NO: 2614 - DNA, 1952 bp, Homo sapiens
ggcggcggcactgcggtgaaagccgaggcagcgggcagacgagcagggggcgggcggacatcttgggatccggagagtggccgggccggcagagcagggggccgaggacaccaggtctgttctcagagcgatgggccgcggagactgatctgccgccatgattggaggcttattcatctataatcacaagggggaggtgctcatctcccgagtctaccgagatgacatcgggaggaacgcagtggatgcctttcgggtcaatgttatccatgcccggcagcaggtgcgcagccccgtcaccaacattgctcgcaccagcttcttccacgttaagcggtccaacatttggctggcagcagtcaccaagcagaatgtcaacgctgccatggtcttcgaattcctctataagatgtgtgacgtgatggctgcctactttggcaagatcagcgaggaaaacatcaagaacaattttgtgctcatatatgagctgctggatgagattctagactttggctacccacagaattccgagacaggcgcgctgaaaaccttcatcacgcagcagggcatcaagagtcagacaaaagaagagcagtcacagatcaccagccaggtaactgggcagattggctggcggcgagagggtatcaagtatcgtcggaatgagctcttcctggatgtgctggagagtgtgaacctgctcatgtccccacaagggcaggtgctgagtgcccatgtgtcgggccgggtggtgatgaagagctacctgagtggcatgcctgaatgcaagtttgggatgaatgacaagattgttattgaaaagcagggcaaaggcacagctgatgaaacaagcaagagcgggaagcaatcaattgccattgatgactgcaccttccaccagtgtgtgcgactcagcaagtttgactctgaacgcagcatcagctttatcccgccagatggagagtttgagcttatgaggtatcgcacaaccaaggacatcatccttcccttccgggtgatcccgctagtgcgagaagtgggacgcaccaaactggaggtcaaggtggtcatcaagtccaactttaaaccctcactgctggctcagaagatcgaggtgaggatcccaaccccactgaacacaagcggggtgcaggtgatctgcatgaaggggaaggccaagtacaaggccagcgagaatgccatcgtgtggaagatcaagcgcatggcaggcatgaaggaatcgcagatcagcgcagagattgagcttctgcctaccaacgacaagaagaaatgggctcgaccccccatttccatgaactttgaggtgccattcgcgccctctggcctcaaggtgcgctacttgaaggtgtttgaaccgaagctgaactacagcgaccatgatgtcatcaaatgggtgcgctacattggccgcagtggcatttatgaaactcgctgctagctgccactaggcagctagcccacctccccagccaccctcctccacaggtccaggtgccgctccctcccccaccacacatcagtgtctcctccctcctgctttgctgccttccctttgcaccagcccgagtctaggtctgggccaagcacattacaagtgggaccggtggagcagcccctgggctccctgggcaggggagttctgaggctcctgctctcccatccacctgtctgtcctggcctaatgccaggctctgagttctgtgaccaaagccaggtgggttccctttccttcccacccctgtggccacagctctggagtgggagggttggttgcccctcacctcagagctcccccaaaggccagtaatggatccccggcctcagtccctactctgctttgggatagtgtgagcttcattttgtacacgtgtgacttcgtccagttacaaacccaataaactctgtagagtggaaaaaaaaaaaaaaaaaaa

SEQ ID NO: 2615 - DNA, 1958 bp, Homo sapiens
ggcggcggcactgcggtgaaagccgaggcagcgggcagacgagcagggggcgggcggacatcttgggatccggagagtggccgggccggcagagcagggggccgaggacaccaggtctgttctcagagcgatgggccgcggagactgatctgccgccatgattggaggcttattcatctataatcacaagggggaggtgctcatctcccgagtctaccgagatgacatcgggaggaacgcagtggatgcctttcgggtcaatgttatccatgcccggcagcaggtgcgcagccccgtcaccaacattgctcgcaccagcttcttccacgttaagcggtccaacatttggctggcagcagtcaccaagcagaatgtcaacgctgccatggtcttcgaattcctctataagatgtgtgacgtgatggctgcctactttggcaagatcagcgaggaaaacatcaagaacaattttgtgctcatatatgagctgctggatgagattctagactttggctacccacagaattccgagacaggcgcgctgaaaaccttcatcacgcagcagggcatcaagagtcagcatcagacaaaagaagagcagtcacagatcaccagccaggtaactgggcagattggctggcggcgagagggtatcaagtatcgtcggaatgagctcttcctggatgtgctggagagtgtgaacctgctcatgtccccacaagggcaggtgctgagtgcccatgtgtcgggccgggtggtgatgaagagctacctgagtggcatgcctgaatgcaagtttgggatgaatgacaagattgttattgaaaagcagggcaaaggcacagctgatgaaacaagcaagagcgggaagcaatcaattgccattgatgactgcaccttccaccagtgtgtgcgactcagcaagtttgactctgaacgcagcatcagctttatcccgccagatggagagtttgagcttatgaggtatcgcacaaccaaggacatcatccttcccttccgggtgatcccgctagtgcgagaagtgggacgcaccaaactggaggtcaaggtggtcatcaagtccaactttaaaccctcactgctggctcagaagatcgaggtgaggatcccaaccccactgaacacaagcggggtgcaggtgatctgcatgaaggggaaggccaagtacaaggccagcgagaatgccatcgtgtggaagatcaagcgcatggcaggcatgaaggaatcgcagatcagcgcagagattgagcttctgcctaccaacgacaagaagaaatgggctcgaccccccatttccatgaactttgaggtgccattcgcgccctctggcctcaaggtgcgctacttgaaggtgtttgaaccgaagctgaactacagcgaccatgatgtcatcaaatgggtgcgctacattggccgcagtggcatttatgaaactcgctgctagctgccactaggcagctagcccacctccccagccaccctcctccacaggtccaggtgccgctccctcccccaccacacatcagtgtctcctccctcctgctttgctgccttccctttgcaccagcccgagtctaggtctgggccaagcacattacaagtgggaccggtggagcagcccctgggctccctgggcaggggagttctgaggctcctgctctcccatccacctgtctgtcctggcctaatgccaggctctgagttctgtgaccaaagccaggtgggttccctttccttcccacccctgtggccacagctctggagtgggagggttggttgcccctcacctcagagctcccccaaaggccagtaatggatccccggcctcagtccctactctgctttgggatagtgtgagcttcattttgtacacgtgtgacttcgtccagttacaaacccaataaactctgtagagtggaaaaaaaaaaaaaaaaaaa

SEQ ID NO: 2616 - DNA, 3252 bp, Homo sapiens
ctactccaacccctgggcgggcgggggtaccgcctgggcaagggccggggcgccgggccgagccacctcttcccctcccccgcttccctgtcgcgctccgctggctggacgcgctggaggagtggagcagcacccggccggccctgggggctgacagtcggcaaagtttggcccgaagaggaagtggtctcaaaccccggcaggtggcgaccaggccagaccaggggcgctcgctgcctgcgggcgggctgtaggcgagggcgcgccccagtgccgagacccggggcttcaggagccggccccgggagagaagagtgcggcggcggacggagaaaacaactccaaagttggcgaaaggcaccgcccctactcccgggctgccgccgcctccccgcccccagccctggcatccagagtacgggtcgagcccgggccatggagcccccctggggaggcggcaccagggagcctgggcgcccggggctccgccgcgaccccatcgggtagaccacagaagctccgggacccttccggcacctctggacagcccaggatgctgttggccaccctcctcctcctcctccttggaggcgctctggcccatccagaccggattatttttccaaatcatgcttgtgaggaccccccagcagtgctcttagaagtgcagggcaccttacagaggcccctggtccgggacagccgcacctcccctgccaactgcacctggctcatcctgggcagcaaggaacagactgtcaccatcaggttccagaagctacacctggcctgtggctcagagcgcttaaccctacgctcccctctccagccactgatctccctgtgtgaggcacctcccagccctctgcagctgcccgggggcaacgtcaccatcacttacagctatgctggggccagagcacccatgggccagggcttcctgctctcctacagccaagattggctgatgtgcctgcaggaagagtttcagtgcctgaaccaccgctgtgtatctgctgtccagcgctgtgatggggttgatgcctgtggcgatggctctgatgaagcaggttgcagctcagaccccttccctggcctgaccccaagacccgtcccctccctgccttgcaatgtcaccttggaggacttctatggggtcttctcctctcctggatatacacacctagcctcagtctcccacccccagtcctgccattggctgctggacccccatgatggccggcggctggccgtgcgcttcacagccctggacttgggctttggagatgcagtgcatgtgtatgacggccctgggccccctgagagctcccgactactgcgtagtctcacccacttcagcaatggcaaggctgtcactgtggagacactgtctggccaggctgttgtgtcctaccacacagttgcttggagcaatggtcgtggcttcaatgccacctaccatgtgcggggctattgcttgccttgggacagaccctgtggcttaggctctggcctgggagctggcgaaggcctaggtgagcgctgctacagtgaggcacagcgctgtgacggctcatgggactgtgctgacggcacagatgaggaggactgcccaggctgcccacctggacacttcccctgtggggctgctggcacctctggtgccacagcctgctacctgcctgctgaccgctgcaactaccagactttctgtgctgatggagcagatgagagacgctgtcggcattgccagcctggcaatttccgatgccgggacgagaagtgcgtgtatgagacgtgggtgtgcgatgggcagccagactgtgcggacggcagtgatgagtgggactgctcctatgttctgccccgcaaggtcattacagctgcagtcattggcagcctagtgtgcggcctgctcctggtcatcgccctgggctgcacctgcaagctctatgccattcgcacccaggagtacagcatctttgcccccctctcccggatggaggctgagattgtgcagcagcaggcacccccttcctacgggcagctcattgcccagggtgccatcccacctgtagaagactttcctacagagaatcctaatgataactcagtgctgggcaacctgcgttctctgctacagatcttacgccaggatatgactccaggaggtggcccaggtgcccgccgtcgtcagcggggccgcttgatgcgacgcctggtacgccgtctccgccgctggggcttgctccctcgaaccaacaccccggctcgggcctctgaggccagatcccaggtcacaccttctgctgctccccttgaggccctagatggtggcacaggtccagcccgtgagggcggggcagtgggtgggcaagatggggagcaggcacccccactgcccatcaaggctcccctcccatctgctagcacgtctccagcccccactactgtccctgaagccccagggccactgccctcactgcccctagagccatcactattgtctggagtggtgcaggccctgcgaggccgcctgttgcccagcctggggcccccaggaccaacccggagcccccctggaccccacacagcagtcctggccctggaagatgaggacgatgtgctactggtgccactggctgagccgggggtgtgggtagctgaggcagaggatgagccactgcttacctgaggggacctgggggctctactgaggcctctcccctgggggctctactcatagtggcacaaccttttagaggtgggtcagcctcccctccaccacttccttccctgtccctggatttcagggacttggtgggcctcccgttgaccctatgtagctgctataaagttaagtgtccctcaggcagggagagggctcacagagtctcctctgtacgtggccatggccagacaccccagtcccttcaccaccacctgctccccacgccaccaccatttgggtggctgtttttaaaaagtaaagttcttagaggatcataggtctggacactccatccttgccaaacctctacccaaaagtggccttaagcaccggaatgccaattaactagagaccctccagcccccaaggggaggatttgggcagaacctgaggttttgccatccacaatccctcctacagggcctggctcacaaaaagagtgcaacaaatgcttctattccatagctacggcattgctcagtaagttgaggtcaaaaataaaggaatcatacatctcaaaa

SEQ ID NO: 2617 - DNA, 4356 bp, Homo sapiens
gggagagcagaggcgcagctctgctggagagacctgaggcttgcagcgctgggcccggccgggtcgctgcggctgggctggaggtgaggcgaaagaagggcatcctctgatgggagtggaccggagtccgctaaagcgaagcattccagggtcaaggatgcattccaggaaagttctataaaaatataccatcaactccaacctgatatttgacctagccatggaaaacctcattggctcctcactggatcagaccataaaaatgatccaggaatgaaaatctaagataaattcccaccacttcaagatgttcttatacaagtcaacagtctagcagatcagccagtctctttcatcatcaagcagacatactcaaggtaccaacacagcaaaggcacaaaatgtctctatatcagtatttttcatggtatatgtgagacccattagtgaggcatgaaatcaattctgtgagtcacaatgaacatttgtctaaaaaacaaaataaaatgtaaaataccaaagtgttttgcatgaatcctttgcctgaattgtgcacattgcaaggaatgctgaggtcaatttcaatatgcgagaggggtatttgatggaggagatatgatgaatagaatgtatattggctaagaaatggttttcagtcattgattcctgggtgtcttgcttgattttcataatagcacggttaatgttctatagtcaagttttatattacaattacttgcaactagttgtgaagtctgaaatattcgattcaattgcaaactttgagtgtagtttttgaaaagatgttatttagactgtatatttttttcttcttttttgagttagtgccaattataacattttaatcaaactggaacaaattgctattaaaatggatcatttctttattaaaagaaagaggaatagtgaagtgaaatatacagaagcatgttcaagttcatctgttgaatctggaattgtgaatagtgacaatattgagaaaaatactgactccaatctgcaaacttcaacttcatttgagccacatttcaaaaagaaaaaagtaagtgcaagacgttataatgaagattacttaaaatatggctttatcaaatgtgaaaaaccctttgaaaatgacagacctcagtgtgttatttgtaataatattcttgcgaatgaaagcttaaaaccttcgaaattaaaaaggcacttagaaactcagcatgctgaacttattgataagcctcttgaatattttcaaagaaagaaaaaagacataaagttatcaacacaatttcttagttgttctactgctgttagtgagaaagccttattatcatcatatttagttgcatatcgtgtggcaaaagagaaaatagctaacacagctgctgaaaaaattattcttccagcatgtttggatatggtgcgtacaatatttgatgataaatcagctgataaattaaaaactatacctaatgataacacagtatctcttcgaatttgtactattgcagaacatttagaaacaatgcttattactcgtttacagtctggtatagattttgcaatccagcttgatgaaagcactgatattggaagctgcacaacacttttagtttatgtcagatatgcgtggcaagatgattttttggaggattttttgtgttttttaaatttaacctcacacctaagtggattagatatttttacagaattagaaaggcgcatagttggccaatataaattaaactggaaaaactgtaaaggaattacaagtgatggcacagcaaccatgactggaaaacatagcagagtaattaaaaaattactagaagttactaataatggtgctgtgtggaatcattgttttatacatcgtgaaggtttagcatccagagaaattccacagaatctcatggaggtattgaaaaatgcagtgaaagttgttaattttattaaaggaagctcattgaatagccggcttcttgaaacattttgttcagagattggaactaatcatacccacttactatatcataccaaaattcgttggttgtctcaagggaaaatactaagcagggtttatgagctcaggaatgagattcacttttttctcattgaaaaaaaatctcatttggcaagtatttttgaagatgatacttgggtaacaaaattggcatatttaactgatatttttagcattcttaatgaactgagtttaaaactacaggggaaaaacagtgatgtattccaacatgttgaacgtatccagggatttcgaaagacattattgttatggcaagtaagacttaaaagtaatcgtcctagctattacatgtttccaagatttttgcagcatattgaagagaatattattaatgaaaacattttgaaagaaataaaattagagatattgttgcatctcacttctctgtctcaaacttttaaccatttctttccagaagaaaaatttgaaacattaagggaaaacagttgggtaaaagatccatttgcttttcgacaccctgaatcaataattgagctaaacttggtgcctgaagaagagaatgaattattgcagcttagttcttcatatacattgaagaatgattatgaaaccttaagtttatcagcattttggatgaaggtaaaggaagactttccattgttaagtagaaagagtgtcctgctattgctaccattcacaacaactagtttgtgtgaactagggttttccatcttaacgcagttaaaaacaaaggaaagaaatgggctgaattgtgcagcagttatgcgggtagcattatcttcctgtgttccagactggaatgaacttatgaacaggcaagcacacccatcatagtaaataaaaatcttacctagcttttgtctttgtatttcttattttgtagtatttttctatgttatatttaaatggtactataatactgtgatacttttgttatgttttaatttttgttatatttaataaaattattttatgttcattgaacaaaaatttaatgaatttctgttagaggccaggaactattctagagacatttgggatacaaaagtgaacaaaacaggtaattccctagtagagtttatatcctggcaaggagaaattgacaataaacctaataaataaggtttataatatttagaagctattaagtgctatggaaagagtagtaagaaggaaggtcagggaagtactggggaaccaaaccatgaagggttctgtagaccattattgggcctctggcttttgtcagtggactagagaacagttgaagggtttaagcgaaggagagaaatgatctgagctaggttttaaaagacactctggtcactattttaaattcttagggtaagtctgaattaaatgttactttcccctcactgggcatggtggctcagacctgtaatccccgcactttggcaggccatggcagaaggctctgttgagcccaggagttcaagaccatcctgggcaacatagtgagaccttatttctactaaaaatattttaaaaataagtcaggtgtggtggtgcacacctatagtcccagctactcaggaggctgtggcaggagggtcgcttgacctcaggagtttgaagttgcagtcatctatgattgcaccactgcagtccagcctgagcaacagagtgaaaccctgtctcgagaaaattaaatgttacttccctaaaaaaaccttttctaaccaccctagggtaaatcctccattattcctttatttctttgttttccttgtagtatataatttgtaataattttgattactgattgtcattctgccaccctggagtatataatttttaattatctgattactgttattcttccatagtaggggaggtgatatccatttgcctgatacatagtatgtgttcaatacacatttgctaaagaataaatgaatcaataatacctaacatctctaatttgcagtcattcccaagagtaattattaaatatgtggcaaatttctttgcctttttacttttaaaaatctaattttgacataactgctgtaaccatccagaaacggcattgatgttgcttcacgttgctgatgcttaagcaatgtatattgtgtaatatacaatgtagtcttcaaactaatttcaacttctgcctttctgtgtactcccttatcccactgggtgatattatttggcatggtcattgtcattaaaatcatacaggatagtaattcctttccatctgctaccatgcctagccttatttaatttttcagattttctgttctattgaaggtaattgattttttctttttttttaatgcttgaaataaagtgttgaa

SEQ ID NO: 2618 - DNA, 4353 bp, Homo sapiens
aggcgcagctctgctggagagacctgaggcttgcagcgctgggcccggccgggtcgctgcggctgggctggaggaagcatctaaccaagattaagtcaaaggcatctaccaggtcctgaattctctcccagatgcacaccttttaaggtcaaggatgcattccaggaaagttctataaaaatataccatcaactccaacctgatatttgacctagccatggaaaacctcattggctcctcactggatcagaccataaaaatgatccaggaatgaaaatctaagataaattcccaccacttcaagatgttcttatacaagtcaacagtctagcagatcagccagtctctttcatcatcaagcagacatactcaaggtaccaacacagcaaaggcacaaaatgtctctatatcagtatttttcatggtatatgtgagacccattagtgaggcatgaaatcaattctgtgagtcacaatgaacatttgtctaaaaaacaaaataaaatgtaaaataccaaagtgttttgcatgaatcctttgcctgaattgtgcacattgcaaggaatgctgaggtcaatttcaatatgcgagaggggtatttgatggaggagatatgatgaatagaatgtatattggctaagaaatggttttcagtcattgattcctgggtgtcttgcttgattttcataatagcacggttaatgttctatagtcaagttttatattacaattacttgcaactagttgtgaagtctgaaatattcgattcaattgcaaactttgagtgtagtttttgaaaagatgttatttagactgtatatttttttcttcttttttgagttagtgccaattataacattttaatcaaactggaacaaattgctattaaaatggatcatttctttattaaaagaaagaggaatagtgaagtgaaatatacagaagcatgttcaagttcatctgttgaatctggaattgtgaatagtgacaatattgagaaaaatactgactccaatctgcaaacttcaacttcatttgagccacatttcaaaaagaaaaaagtaagtgcaagacgttataatgaagattacttaaaatatggctttatcaaatgtgaaaaaccctttgaaaatgacagacctcagtgtgttatttgtaataatattcttgcgaatgaaagcttaaaaccttcgaaattaaaaaggcacttagaaactcagcatgctgaacttattgataagcctcttgaatattttcaaagaaagaaaaaagacataaagttatcaacacaatttcttagttgttctactgctgttagtgagaaagccttattatcatcatatttagttgcatatcgtgtggcaaaagagaaaatagctaacacagctgctgaaaaaattattcttccagcatgtttggatatggtgcgtacaatatttgatgataaatcagctgataaattaaaaactatacctaatgataacacagtatctcttcgaatttgtactattgcagaacatttagaaacaatgcttattactcgtttacagtctggtatagattttgcaatccagcttgatgaaagcactgatattggaagctgcacaacacttttagtttatgtcagatatgcgtggcaagatgattttttggaggattttttgtgttttttaaatttaacctcacacctaagtggattagatatttttacagaattagaaaggcgcatagttggccaatataaattaaactggaaaaactgtaaaggaattacaagtgatggcacagcaaccatgactggaaaacatagcagagtaattaaaaaattactagaagttactaataatggtgctgtgtggaatcattgttttatacatcgtgaaggtttagcatccagagaaattccacagaatctcatggaggtattgaaaaatgcagtgaaagttgttaattttattaaaggaagctcattgaatagccggcttcttgaaacattttgttcagagattggaactaatcatacccacttactatatcataccaaaattcgttggttgtctcaagggaaaatactaagcagggtttatgagctcaggaatgagattcacttttttctcattgaaaaaaaatctcatttggcaagtatttttgaagatgatacttgggtaacaaaattggcatatttaactgatatttttagcattcttaatgaactgagtttaaaactacaggggaaaaacagtgatgtattccaacatgttgaacgtatccagggatttcgaaagacattattgttatggcaagtaagacttaaaagtaatcgtcctagctattacatgtttccaagatttttgcagcatattgaagagaatattattaatgaaaacattttgaaagaaataaaattagagatattgttgcatctcacttctctgtctcaaacttttaaccatttctttccagaagaaaaatttgaaacattaagggaaaacagttgggtaaaagatccatttgcttttcgacaccctgaatcaataattgagctaaacttggtgcctgaagaagagaatgaattattgcagcttagttcttcatatacattgaagaatgattatgaaaccttaagtttatcagcattttggatgaaggtaaaggaagactttccattgttaagtagaaagagtgtcctgctattgctaccattcacaacaactagtttgtgtgaactagggttttccatcttaacgcagttaaaaacaaaggaaagaaatgggctgaattgtgcagcagttatgcgggtagcattatcttcctgtgttccagactggaatgaacttatgaacaggcaagcacacccatcatagtaaataaaaatcttacctagcttttgtctttgtatttcttattttgtagtatttttctatgttatatttaaatggtactataatactgtgatacttttgttatgttttaatttttgttatatttaataaaattattttatgttcattgaacaaaaatttaatgaatttctgttagaggccaggaactattctagagacatttgggatacaaaagtgaacaaaacaggtaattccctagtagagtttatatcctggcaaggagaaattgacaataaacctaataaataaggtttataatatttagaagctattaagtgctatggaaagagtagtaagaaggaaggtcagggaagtactggggaaccaaaccatgaagggttctgtagaccattattgggcctctggcttttgtcagtggactagagaacagttgaagggtttaagcgaaggagagaaatgatctgagctaggttttaaaagacactctggtcactattttaaattcttagggtaagtctgaattaaatgttactttcccctcactgggcatggtggctcagacctgtaatccccgcactttggcaggccatggcagaaggctctgttgagcccaggagttcaagaccatcctgggcaacatagtgagaccttatttctactaaaaatattttaaaaataagtcaggtgtggtggtgcacacctatagtcccagctactcaggaggctgtggcaggagggtcgcttgacctcaggagtttgaagttgcagtcatctatgattgcaccactgcagtccagcctgagcaacagagtgaaaccctgtctcgagaaaattaaatgttacttccctaaaaaaaccttttctaaccaccctagggtaaatcctccattattcctttatttctttgttttccttgtagtatataatttgtaataattttgattactgattgtcattctgccaccctggagtatataatttttaattatctgattactgttattcttccatagtaggggaggtgatatccatttgcctgatacatagtatgtgttcaatacacatttgctaaagaataaatgaatcaataatacctaacatctctaatttgcagtcattcccaagagtaattattaaatatgtggcaaatttctttgcctttttacttttaaaaatctaattttgacataactgctgtaaccatccagaaacggcattgatgttgcttcacgttgctgatgcttaagcaatgtatattgtgtaatatacaatgtagtcttcaaactaatttcaacttctgcctttctgtgtactcccttatcccactgggtgatattatttggcatggtcattgtcattaaaatcatacaggatagtaattcctttccatctgctaccatgcctagccttatttaatttttcagattttctgttctattgaaggtaattgattttttctttttttttaatgcttgaaataaagtgttgaa

SEQ ID NO: 2619 - DNA, 4483 bp, Homo sapiens
ttgcggagggaagtgtggggagagcagaggcgcagctctgctggagagacctgaggcttgcagcgctgggcccggccgggtcgctgcggctgggctggaggtgaggcgaaagaagggcatcctctgatgggagtggaccggagtccgctaaagcgaagcattccaggccaaggttaactatttgtaacatgtcatctttcaaggaagcatctaaccaagattaagtcaaaggcatctaccaggtcctgaattctctcccagatgcacaccttttaaggtcaaggatgcattccaggaaagttctataaaaatataccatcaactccaacctgatatttgacctagccatggaaaacctcattggctcctcactggatcagaccataaaaatgatccaggaatgaaaatctaagataaattcccaccacttcaagatgttcttatacaagtcaacagtctagcagatcagccagtctctttcatcatcaagcagacatactcaaggtaccaacacagcaaaggcacaaaatgtctctatatcagtatttttcatggtatatgtgagacccattagtgaggcatgaaatcaattctgtgagtcacaatgaacatttgtctaaaaaacaaaataaaatgtaaaataccaaagtgttttgcatgaatcctttgcctgaattgtgcacattgcaaggaatgctgaggtcaatttcaatatgcgagaggggtatttgatggaggagatatgatgaatagaatgtatattggctaagaaatggttttcagtcattgattcctgggtgtcttgcttgattttcataatagcacggttaatgttctatagtcaagttttatattacaattacttgcaactagttgtgaagtctgaaatattcgattcaattgcaaactttgagtgtagtttttgaaaagatgttatttagactgtatatttttttcttcttttttgagttagtgccaattataacattttaatcaaactggaacaaattgctattaaaatggatcatttctttattaaaagaaagaggaatagtgaagtgaaatatacagaagcatgttcaagttcatctgttgaatctggaattgtgaatagtgacaatattgagaaaaatactgactccaatctgcaaacttcaacttcatttgagccacatttcaaaaagaaaaaagtaagtgcaagacgttataatgaagattacttaaaatatggctttatcaaatgtgaaaaaccctttgaaaatgacagacctcagtgtgttatttgtaataatattcttgcgaatgaaagcttaaaaccttcgaaattaaaaaggcacttagaaactcagcatgctgaacttattgataagcctcttgaatattttcaaagaaagaaaaaagacataaagttatcaacacaatttcttagttgttctactgctgttagtgagaaagccttattatcatcatatttagttgcatatcgtgtggcaaaagagaaaatagctaacacagctgctgaaaaaattattcttccagcatgtttggatatggtgcgtacaatatttgatgataaatcagctgataaattaaaaactatacctaatgataacacagtatctcttcgaatttgtactattgcagaacatttagaaacaatgcttattactcgtttacagtctggtatagattttgcaatccagcttgatgaaagcactgatattggaagctgcacaacacttttagtttatgtcagatatgcgtggcaagatgattttttggaggattttttgtgttttttaaatttaacctcacacctaagtggattagatatttttacagaattagaaaggcgcatagttggccaatataaattaaactggaaaaactgtaaaggaattacaagtgatggcacagcaaccatgactggaaaacatagcagagtaattaaaaaattactagaagttactaataatggtgctgtgtggaatcattgttttatacatcgtgaaggtttagcatccagagaaattccacagaatctcatggaggtattgaaaaatgcagtgaaagttgttaattttattaaaggaagctcattgaatagccggcttcttgaaacattttgttcagagattggaactaatcatacccacttactatatcataccaaaattcgttggttgtctcaagggaaaatactaagcagggtttatgagctcaggaatgagattcacttttttctcattgaaaaaaaatctcatttggcaagtatttttgaagatgatacttgggtaacaaaattggcatatttaactgatatttttagcattcttaatgaactgagtttaaaactacaggggaaaaacagtgatgtattccaacatgttgaacgtatccagggatttcgaaagacattattgttatggcaagtaagacttaaaagtaatcgtcctagctattacatgtttccaagatttttgcagcatattgaagagaatattattaatgaaaacattttgaaagaaataaaattagagatattgttgcatctcacttctctgtctcaaacttttaaccatttctttccagaagaaaaatttgaaacattaagggaaaacagttgggtaaaagatccatttgcttttcgacaccctgaatcaataattgagctaaacttggtgcctgaagaagagaatgaattattgcagcttagttcttcatatacattgaagaatgattatgaaaccttaagtttatcagcattttggatgaaggtaaaggaagactttccattgttaagtagaaagagtgtcctgctattgctaccattcacaacaactagtttgtgtgaactagggttttccatcttaacgcagttaaaaacaaaggaaagaaatgggctgaattgtgcagcagttatgcgggtagcattatcttcctgtgttccagactggaatgaacttatgaacaggcaagcacacccatcatagtaaataaaaatcttacctagcttttgtctttgtatttcttattttgtagtatttttctatgttatatttaaatggtactataatactgtgatacttttgttatgttttaatttttgttatatttaataaaattattttatgttcattgaacaaaaatttaatgaatttctgttagaggccaggaactattctagagacatttgggatacaaaagtgaacaaaacaggtaattccctagtagagtttatatcctggcaaggagaaattgacaataaacctaataaataaggtttataatatttagaagctattaagtgctatggaaagagtagtaagaaggaaggtcagggaagtactggggaaccaaaccatgaagggttctgtagaccattattgggcctctggcttttgtcagtggactagagaacagttgaagggtttaagcgaaggagagaaatgatctgagctaggttttaaaagacactctggtcactattttaaattcttagggtaagtctgaattaaatgttactttcccctcactgggcatggtggctcagacctgtaatccccgcactttggcaggccatggcagaaggctctgttgagcccaggagttcaagaccatcctgggcaacatagtgagaccttatttctactaaaaatattttaaaaataagtcaggtgtggtggtgcacacctatagtcccagctactcaggaggctgtggcaggagggtcgcttgacctcaggagtttgaagttgcagtcatctatgattgcaccactgcagtccagcctgagcaacagagtgaaaccctgtctcgagaaaattaaatgttacttccctaaaaaaaccttttctaaccaccctagggtaaatcctccattattcctttatttctttgttttccttgtagtatataatttgtaataattttgattactgattgtcattctgccaccctggagtatataatttttaattatctgattactgttattcttccatagtaggggaggtgatatccatttgcctgatacatagtatgtgttcaatacacatttgctaaagaataaatgaatcaataatacctaacatctctaatttgcagtcattcccaagagtaattattaaatatgtggcaaatttctttgcctttttacttttaaaaatctaattttgacataactgctgtaaccatccagaaacggcattgatgttgcttcacgttgctgatgcttaagcaatgtatattgtgtaatatacaatgtagtcttcaaactaatttcaacttctgcctttctgtgtactcccttatcccactgggtgatattatttggcatggtcattgtcattaaaatcatacaggatagtaattcctttccatctgctaccatgcctagccttatttaatttttcagattttctgttctattgaaggtaattgattttttctttttttttaatgcttgaaataaagtgttgaa

SEQ ID NO: 2620 - DNA, 4233 bp, Homo sapiens
tttcggctggaatggggaatttgtgaggtcaaggatgcattccaggaaagttctataaaaatataccatcaactccaacctgatatttgacctagccatggaaaacctcattggctcctcactggatcagaccataaaaatgatccaggaatgaaaatctaagataaattcccaccacttcaagatgttcttatacaagtcaacagtctagcagatcagccagtctctttcatcatcaagcagacatactcaaggtaccaacacagcaaaggcacaaaatgtctctatatcagtatttttcatggtatatgtgagacccattagtgaggcatgaaatcaattctgtgagtcacaatgaacatttgtctaaaaaacaaaataaaatgtaaaataccaaagtgttttgcatgaatcctttgcctgaattgtgcacattgcaaggaatgctgaggtcaatttcaatatgcgagaggggtatttgatggaggagatatgatgaatagaatgtatattggctaagaaatggttttcagtcattgattcctgggtgtcttgcttgattttcataatagcacggttaatgttctatagtcaagttttatattacaattacttgcaactagttgtgaagtctgaaatattcgattcaattgcaaactttgagtgtagtttttgaaaagatgttatttagactgtatatttttttcttcttttttgagttagtgccaattataacattttaatcaaactggaacaaattgctattaaaatggatcatttctttattaaaagaaagaggaatagtgaagtgaaatatacagaagcatgttcaagttcatctgttgaatctggaattgtgaatagtgacaatattgagaaaaatactgactccaatctgcaaacttcaacttcatttgagccacatttcaaaaagaaaaaagtaagtgcaagacgttataatgaagattacttaaaatatggctttatcaaatgtgaaaaaccctttgaaaatgacagacctcagtgtgttatttgtaataatattcttgcgaatgaaagcttaaaaccttcgaaattaaaaaggcacttagaaactcagcatgctgaacttattgataagcctcttgaatattttcaaagaaagaaaaaagacataaagttatcaacacaatttcttagttgttctactgctgttagtgagaaagccttattatcatcatatttagttgcatatcgtgtggcaaaagagaaaatagctaacacagctgctgaaaaaattattcttccagcatgtttggatatggtgcgtacaatatttgatgataaatcagctgataaattaaaaactatacctaatgataacacagtatctcttcgaatttgtactattgcagaacatttagaaacaatgcttattactcgtttacagtctggtatagattttgcaatccagcttgatgaaagcactgatattggaagctgcacaacacttttagtttatgtcagatatgcgtggcaagatgattttttggaggattttttgtgttttttaaatttaacctcacacctaagtggattagatatttttacagaattagaaaggcgcatagttggccaatataaattaaactggaaaaactgtaaaggaattacaagtgatggcacagcaaccatgactggaaaacatagcagagtaattaaaaaattactagaagttactaataatggtgctgtgtggaatcattgttttatacatcgtgaaggtttagcatccagagaaattccacagaatctcatggaggtattgaaaaatgcagtgaaagttgttaattttattaaaggaagctcattgaatagccggcttcttgaaacattttgttcagagattggaactaatcatacccacttactatatcataccaaaattcgttggttgtctcaagggaaaatactaagcagggtttatgagctcaggaatgagattcacttttttctcattgaaaaaaaatctcatttggcaagtatttttgaagatgatacttgggtaacaaaattggcatatttaactgatatttttagcattcttaatgaactgagtttaaaactacaggggaaaaacagtgatgtattccaacatgttgaacgtatccagggatttcgaaagacattattgttatggcaagtaagacttaaaagtaatcgtcctagctattacatgtttccaagatttttgcagcatattgaagagaatattattaatgaaaacattttgaaagaaataaaattagagatattgttgcatctcacttctctgtctcaaacttttaaccatttctttccagaagaaaaatttgaaacattaagggaaaacagttgggtaaaagatccatttgcttttcgacaccctgaatcaataattgagctaaacttggtgcctgaagaagagaatgaattattgcagcttagttcttcatatacattgaagaatgattatgaaaccttaagtttatcagcattttggatgaaggtaaaggaagactttccattgttaagtagaaagagtgtcctgctattgctaccattcacaacaactagtttgtgtgaactagggttttccatcttaacgcagttaaaaacaaaggaaagaaatgggctgaattgtgcagcagttatgcgggtagcattatcttcctgtgttccagactggaatgaacttatgaacaggcaagcacacccatcatagtaaataaaaatcttacctagcttttgtctttgtatttcttattttgtagtatttttctatgttatatttaaatggtactataatactgtgatacttttgttatgttttaatttttgttatatttaataaaattattttatgttcattgaacaaaaatttaatgaatttctgttagaggccaggaactattctagagacatttgggatacaaaagtgaacaaaacaggtaattccctagtagagtttatatcctggcaaggagaaattgacaataaacctaataaataaggtttataatatttagaagctattaagtgctatggaaagagtagtaagaaggaaggtcagggaagtactggggaaccaaaccatgaagggttctgtagaccattattgggcctctggcttttgtcagtggactagagaacagttgaagggtttaagcgaaggagagaaatgatctgagctaggttttaaaagacactctggtcactattttaaattcttagggtaagtctgaattaaatgttactttcccctcactgggcatggtggctcagacctgtaatccccgcactttggcaggccatggcagaaggctctgttgagcccaggagttcaagaccatcctgggcaacatagtgagaccttatttctactaaaaatattttaaaaataagtcaggtgtggtggtgcacacctatagtcccagctactcaggaggctgtggcaggagggtcgcttgacctcaggagtttgaagttgcagtcatctatgattgcaccactgcagtccagcctgagcaacagagtgaaaccctgtctcgagaaaattaaatgttacttccctaaaaaaaccttttctaaccaccctagggtaaatcctccattattcctttatttctttgttttccttgtagtatataatttgtaataattttgattactgattgtcattctgccaccctggagtatataatttttaattatctgattactgttattcttccatagtaggggaggtgatatccatttgcctgatacatagtatgtgttcaatacacatttgctaaagaataaatgaatcaataatacctaacatctctaatttgcagtcattcccaagagtaattattaaatatgtggcaaatttctttgcctttttacttttaaaaatctaattttgacataactgctgtaaccatccagaaacggcattgatgttgcttcacgttgctgatgcttaagcaatgtatattgtgtaatatacaatgtagtcttcaaactaatttcaacttctgcctttctgtgtactcccttatcccactgggtgatattatttggcatggtcattgtcattaaaatcatacaggatagtaattcctttccatctgctaccatgcctagccttatttaatttttcagattttctgttctattgaaggtaattgattttttctttttttttaatgcttgaaataaagtgttgaa

SEQ ID NO: 2621 - DNA, 3880 bp, Homo sapiens
gctggaatggggaatttgtgaggtaggccggaagtggtgttgcggagggaagtgtggggagagcagaggcgcagctctgctggagagacctgaggcttgcagcgctgggcccggccgggtcgctgcggctgggctggaggtcaaggatgcattccaggaaagttctataaaaatataccatcaactccaacctgatatttgacctagccatggaaaacctcattggctcctcactggatcagaccataaaaatgatccaggaatgaaaatctaagataaattcccaccacttcaagatgttcttatacaagtcaacagtctagcagatcagccagtctctttcatcatcaagcagacatactcaagttagtgccaattataacattttaatcaaactggaacaaattgctattaaaatggatcatttctttattaaaagaaagaggaatagtgaagtgaaatatacagaagcatgttcaagttcatctgttgaatctggaattgtgaatagtgacaatattgagaaaaatactgactccaatctgcaaacttcaacttcatttgagccacatttcaaaaagaaaaaagtaagtgcaagacgttataatgaagattacttaaaatatggctttatcaaatgtgaaaaaccctttgaaaatgacagacctcagtgtgttatttgtaataatattcttgcgaatgaaagcttaaaaccttcgaaattaaaaaggcacttagaaactcagcatgctgaacttattgataagcctcttgaatattttcaaagaaagaaaaaagacataaagttatcaacacaatttcttagttgttctactgctgttagtgagaaagccttattatcatcatatttagttgcatatcgtgtggcaaaagagaaaatagctaacacagctgctgaaaaaattattcttccagcatgtttggatatggtgcgtacaatatttgatgataaatcagctgataaattaaaaactatacctaatgataacacagtatctcttcgaatttgtactattgcagaacatttagaaacaatgcttattactcgtttacagtctggtatagattttgcaatccagcttgatgaaagcactgatattggaagctgcacaacacttttagtttatgtcagatatgcgtggcaagatgattttttggaggattttttgtgttttttaaatttaacctcacacctaagtggattagatatttttacagaattagaaaggcgcatagttggccaatataaattaaactggaaaaactgtaaaggaattacaagtgatggcacagcaaccatgactggaaaacatagcagagtaattaaaaaattactagaagttactaataatggtgctgtgtggaatcattgttttatacatcgtgaaggtttagcatccagagaaattccacagaatctcatggaggtattgaaaaatgcagtgaaagttgttaattttattaaaggaagctcattgaatagccggcttcttgaaacattttgttcagagattggaactaatcatacccacttactatatcataccaaaattcgttggttgtctcaagggaaaatactaagcagggtttatgagctcaggaatgagattcacttttttctcattgaaaaaaaatctcatttggcaagtatttttgaagatgatacttgggtaacaaaattggcatatttaactgatatttttagcattcttaatgaactgagtttaaaactacaggggaaaaacagtgatgtattccaacatgttgaacgtatccagggatttcgaaagacattattgttatggcaagtaagacttaaaagtaatcgtcctagctattacatgtttccaagatttttgcagcatattgaagagaatattattaatgaaaacattttgaaagaaataaaattagagatattgttgcatctcacttctctgtctcaaacttttaaccatttctttccagaagaaaaatttgaaacattaagggaaaacagttgggtaaaagatccatttgcttttcgacaccctgaatcaataattgagctaaacttggtgcctgaagaagagaatgaattattgcagcttagttcttcatatacattgaagaatgattatgaaaccttaagtttatcagcattttggatgaaggtaaaggaagactttccattgttaagtagaaagagtgtcctgctattgctaccattcacaacaactagtttgtgtgaactagggttttccatcttaacgcagttaaaaacaaaggaaagaaatgggctgaattgtgcagcagttatgcgggtagcattatcttcctgtgttccagactggaatgaacttatgaacaggcaagcacacccatcatagtaaataaaaatcttacctagcttttgtctttgtatttcttattttgtagtatttttctatgttatatttaaatggtactataatactgtgatacttttgttatgttttaatttttgttatatttaataaaattattttatgttcattgaacaaaaatttaatgaatttctgttagaggccaggaactattctagagacatttgggatacaaaagtgaacaaaacaggtaattccctagtagagtttatatcctggcaaggagaaattgacaataaacctaataaataaggtttataatatttagaagctattaagtgctatggaaagagtagtaagaaggaaggtcagggaagtactggggaaccaaaccatgaagggttctgtagaccattattgggcctctggcttttgtcagtggactagagaacagttgaagggtttaagcgaaggagagaaatgatctgagctaggttttaaaagacactctggtcactattttaaattcttagggtaagtctgaattaaatgttactttcccctcactgggcatggtggctcagacctgtaatccccgcactttggcaggccatggcagaaggctctgttgagcccaggagttcaagaccatcctgggcaacatagtgagaccttatttctactaaaaatattttaaaaataagtcaggtgtggtggtgcacacctatagtcccagctactcaggaggctgtggcaggagggtcgcttgacctcaggagtttgaagttgcagtcatctatgattgcaccactgcagtccagcctgagcaacagagtgaaaccctgtctcgagaaaattaaatgttacttccctaaaaaaaccttttctaaccaccctagggtaaatcctccattattcctttatttctttgttttccttgtagtatataatttgtaataattttgattactgattgtcattctgccaccctggagtatataatttttaattatctgattactgttattcttccatagtaggggaggtgatatccatttgcctgatacatagtatgtgttcaatacacatttgctaaagaataaatgaatcaataatacctaacatctctaatttgcagtcattcccaagagtaattattaaatatgtggcaaatttctttgcctttttacttttaaaaatctaattttgacataactgctgtaaccatccagaaacggcattgatgttgcttcacgttgctgatgcttaagcaatgtatattgtgtaatatacaatgtagtcttcaaactaatttcaacttctgcctttctgtgtactcccttatcccactgggtgatattatttggcatggtcattgtcattaaaatcatacaggatagtaattcctttccatctgctaccatgcctagccttatttaatttttcagattttctgttctattgaaggtaattgattttttctttttttttaatgcttgaaataaagtgttgaa

SEQ ID NO: 2622 - DNA, 4350 bp, Homo sapiens
tttcggctggaatggggaatttgtgaggtaggccggaagtggtgttgcggagggaagtgtggggagagcagaggcgcagctctgctggagagacctgaggcttgcagcgctgggcccggccgggtcgctgcggctgggctggaggtcaaggatgcattccaggaaagttctataaaaatataccatcaactccaacctgatatttgacctagccatggaaaacctcattggctcctcactggatcagaccataaaaatgatccaggaatgaaaatctaagataaattcccaccacttcaagatgttcttatacaagtcaacagtctagcagatcagccagtctctttcatcatcaagcagacatactcaaggtaccaacacagcaaaggcacaaaatgtctctatatcagtatttttcatggtatatgtgagacccattagtgaggcatgaaatcaattctgtgagtcacaatgaacatttgtctaaaaaacaaaataaaatgtaaaataccaaagtgttttgcatgaatcctttgcctgaattgtgcacattgcaaggaatgctgaggtcaatttcaatatgcgagaggggtatttgatggaggagatatgatgaatagaatgtatattggctaagaaatggttttcagtcattgattcctgggtgtcttgcttgattttcataatagcacggttaatgttctatagtcaagttttatattacaattacttgcaactagttgtgaagtctgaaatattcgattcaattgcaaactttgagtgtagtttttgaaaagatgttatttagactgtatatttttttcttcttttttgagttagtgccaattataacattttaatcaaactggaacaaattgctattaaaatggatcatttctttattaaaagaaagaggaatagtgaagtgaaatatacagaagcatgttcaagttcatctgttgaatctggaattgtgaatagtgacaatattgagaaaaatactgactccaatctgcaaacttcaacttcatttgagccacatttcaaaaagaaaaaagtaagtgcaagacgttataatgaagattacttaaaatatggctttatcaaatgtgaaaaaccctttgaaaatgacagacctcagtgtgttatttgtaataatattcttgcgaatgaaagcttaaaaccttcgaaattaaaaaggcacttagaaactcagcatgctgaacttattgataagcctcttgaatattttcaaagaaagaaaaaagacataaagttatcaacacaatttcttagttgttctactgctgttagtgagaaagccttattatcatcatatttagttgcatatcgtgtggcaaaagagaaaatagctaacacagctgctgaaaaaattattcttccagcatgtttggatatggtgcgtacaatatttgatgataaatcagctgataaattaaaaactatacctaatgataacacagtatctcttcgaatttgtactattgcagaacatttagaaacaatgcttattactcgtttacagtctggtatagattttgcaatccagcttgatgaaagcactgatattggaagctgcacaacacttttagtttatgtcagatatgcgtggcaagatgattttttggaggattttttgtgttttttaaatttaacctcacacctaagtggattagatatttttacagaattagaaaggcgcatagttggccaatataaattaaactggaaaaactgtaaaggaattacaagtgatggcacagcaaccatgactggaaaacatagcagagtaattaaaaaattactagaagttactaataatggtgctgtgtggaatcattgttttatacatcgtgaaggtttagcatccagagaaattccacagaatctcatggaggtattgaaaaatgcagtgaaagttgttaattttattaaaggaagctcattgaatagccggcttcttgaaacattttgttcagagattggaactaatcatacccacttactatatcataccaaaattcgttggttgtctcaagggaaaatactaagcagggtttatgagctcaggaatgagattcacttttttctcattgaaaaaaaatctcatttggcaagtatttttgaagatgatacttgggtaacaaaattggcatatttaactgatatttttagcattcttaatgaactgagtttaaaactacaggggaaaaacagtgatgtattccaacatgttgaacgtatccagggatttcgaaagacattattgttatggcaagtaagacttaaaagtaatcgtcctagctattacatgtttccaagatttttgcagcatattgaagagaatattattaatgaaaacattttgaaagaaataaaattagagatattgttgcatctcacttctctgtctcaaacttttaaccatttctttccagaagaaaaatttgaaacattaagggaaaacagttgggtaaaagatccatttgcttttcgacaccctgaatcaataattgagctaaacttggtgcctgaagaagagaatgaattattgcagcttagttcttcatatacattgaagaatgattatgaaaccttaagtttatcagcattttggatgaaggtaaaggaagactttccattgttaagtagaaagagtgtcctgctattgctaccattcacaacaactagtttgtgtgaactagggttttccatcttaacgcagttaaaaacaaaggaaagaaatgggctgaattgtgcagcagttatgcgggtagcattatcttcctgtgttccagactggaatgaacttatgaacaggcaagcacacccatcatagtaaataaaaatcttacctagcttttgtctttgtatttcttattttgtagtatttttctatgttatatttaaatggtactataatactgtgatacttttgttatgttttaatttttgttatatttaataaaattattttatgttcattgaacaaaaatttaatgaatttctgttagaggccaggaactattctagagacatttgggatacaaaagtgaacaaaacaggtaattccctagtagagtttatatcctggcaaggagaaattgacaataaacctaataaataaggtttataatatttagaagctattaagtgctatggaaagagtagtaagaaggaaggtcagggaagtactggggaaccaaaccatgaagggttctgtagaccattattgggcctctggcttttgtcagtggactagagaacagttgaagggtttaagcgaaggagagaaatgatctgagctaggttttaaaagacactctggtcactattttaaattcttagggtaagtctgaattaaatgttactttcccctcactgggcatggtggctcagacctgtaatccccgcactttggcaggccatggcagaaggctctgttgagcccaggagttcaagaccatcctgggcaacatagtgagaccttatttctactaaaaatattttaaaaataagtcaggtgtggtggtgcacacctatagtcccagctactcaggaggctgtggcaggagggtcgcttgacctcaggagtttgaagttgcagtcatctatgattgcaccactgcagtccagcctgagcaacagagtgaaaccctgtctcgagaaaattaaatgttacttccctaaaaaaaccttttctaaccaccctagggtaaatcctccattattcctttatttctttgttttccttgtagtatataatttgtaataattttgattactgattgtcattctgccaccctggagtatataatttttaattatctgattactgttattcttccatagtaggggaggtgatatccatttgcctgatacatagtatgtgttcaatacacatttgctaaagaataaatgaatcaataatacctaacatctctaatttgcagtcattcccaagagtaattattaaatatgtggcaaatttctttgcctttttacttttaaaaatctaattttgacataactgctgtaaccatccagaaacggcattgatgttgcttcacgttgctgatgcttaagcaatgtatattgtgtaatatacaatgtagtcttcaaactaatttcaacttctgcctttctgtgtactcccttatcccactgggtgatattatttggcatggtcattgtcattaaaatcatacaggatagtaattcctttccatctgctaccatgcctagccttatttaatttttcagattttctgttctattgaaggtaattgattttttctttttttttaatgcttgaaataaagtgttgaa

SEQ ID NO: 2623 - DNA, 6110 bp, Homo sapiens
tttgaacttctcccctaaaattcctctggcttctcattaaagccgctttcggagatataagtaaagaaagtcaaacaaaagactttgtagcatgttttgtttaacatgttttgtttagcactgtttttcttgagctatatatgataaatatctagggagaggtggcagaaggacaaaattgtagtagtttgaggtttcttgggggaaagttgaagcattaaaacatgttagcatccttatatgaacttttaactatggaaggaagagtcagtattccctttcaggcagctgtttatctggcttagactgcctcaaggctgtgtattgcccttcagcttttcttatgcattagaaagagatctagatgcatttgcctttagcagtgtagttctgaatacattgatgaccacccactgtgctgggacatgcaagaggtatgtaccataaactctttagtcctgctaatgtcctcgacagaggacataaaacctcctaagaaaagctttgtctctttccagccaaggttaactatttgtaacatgtcatctttcaaggaagcatctaaccaagattaagtcaaaggcatctaccaggtcctgaattctctcccagatgcacaccttttaaggtacaatcaggtaccatatgtaatctgtagctatttaaccatcgttaaagcatttaggactttgatttcctagaagaagtcatggtctgcaaaataattgtattaaaaggtataaaacctgatcaggaaaaagaggtttagggccaaactatacaactttgtaactagaccaataacacaaaataatagtgttttaaaatgtacccaggatttattttaatcagatatggtaagatatgcagatgtgaaaatgattgtcatgaaagaagaaatttttatactcatggatccctagaaacaggaagcatggcaccttacaccatgcaagggtgccatacctagaagcagcagggtcaatggggagaggaagtacaaggaaactgcaggaaagcctttatttggttttctgaggaaggaatgggcaaaactggataagcaggcttgaacaggtttaaaattggctagttgaaataattttggccgacttcgggcgtaggggatatccctagttgcctggtagctggtctggagtgattaggatagggcaatattggccaggagtataagaacccaagatgtctgtgttgggagttgggggattctggattggttagtttgcataggaattagctaaccctgggagaggtagtacctctccagtcatcaaggacccacctagataccaaatgattaacaatacaaaaataagaaagtacaattaatacaaacagtcataataaagatacagtattaacacagttaagacgtggaaattttaataaataaacactacagtaaatgtaggactgcacccctcccaaaaaatttgagataatttgatggaaaggtgtgtaaggaagggttgaaactactgttatggtcataagactgaaatatactatgatccaagagagcagtgcagcactaccaaggcaggcatgaccaagataggtgcggccaagcaaaaaggaagtatgtatggtgaataagctatactccttcatggcttgctgtattctgttttgttaatatactttccaagtcctgatgccaacttctgggttttactgtcactatttttctatttactaatctcagttgaagtggtttgccttacagaaataggcctaagccaatataagatagtgataaagagagctatagactgtttgcctcaccatctatgatcttggatatcataaaggcccccatagctggcagtaatactactttgtactgtgatgctttaatgtcttatctctggtcttattcccaggtcaaggatgcattccaggaaagttctataaaaatataccatcaactccaacctgatatttgacctagccatggaaaacctcattggctcctcactggatcagaccataaaaatgatccaggaatgaaaatctaagataaattcccaccacttcaagatgttcttatacaagtcaacagtctagcagatcagccagtctctttcatcatcaagcagacatactcaaggtaccaacacagcaaaggcacaaaatgtctctatatcagtatttttcatggtatatgtgagacccattagtgaggcatgaaatcaattctgtgagtcacaatgaacatttgtctaaaaaacaaaataaaatgtaaaataccaaagtgttttgcatgaatcctttgcctgaattgtgcacattgcaaggaatgctgaggtcaatttcaatatgcgagaggggtatttgatggaggagatatgatgaatagaatgtatattggctaagaaatggttttcagtcattgattcctgggtgtcttgcttgattttcataatagcacggttaatgttctatagtcaagttttatattacaattacttgcaactagttgtgaagtctgaaatattcgattcaattgcaaactttgagtgtagtttttgaaaagatgttatttagactgtatatttttttcttcttttttgagttagtgccaattataacattttaatcaaactggaacaaattgctattaaaatggatcatttctttattaaaagaaagaggaatagtgaagtgaaatatacagaagcatgttcaagttcatctgttgaatctggaattgtgaatagtgacaatattgagaaaaatactgactccaatctgcaaacttcaacttcatttgagccacatttcaaaaagaaaaaagtaagtgcaagacgttataatgaagattacttaaaatatggctttatcaaatgtgaaaaaccctttgaaaatgacagacctcagtgtgttatttgtaataatattcttgcgaatgaaagcttaaaaccttcgaaattaaaaaggcacttagaaactcagcatgctgaacttattgataagcctcttgaatattttcaaagaaagaaaaaagacataaagttatcaacacaatttcttagttgttctactgctgttagtgagaaagccttattatcatcatatttagttgcatatcgtgtggcaaaagagaaaatagctaacacagctgctgaaaaaattattcttccagcatgtttggatatggtgcgtacaatatttgatgataaatcagctgataaattaaaaactatacctaatgataacacagtatctcttcgaatttgtactattgcagaacatttagaaacaatgcttattactcgtttacagtctggtatagattttgcaatccagcttgatgaaagcactgatattggaagctgcacaacacttttagtttatgtcagatatgcgtggcaagatgattttttggaggattttttgtgttttttaaatttaacctcacacctaagtggattagatatttttacagaattagaaaggcgcatagttggccaatataaattaaactggaaaaactgtaaaggaattacaagtgatggcacagcaaccatgactggaaaacatagcagagtaattaaaaaattactagaagttactaataatggtgctgtgtggaatcattgttttatacatcgtgaaggtttagcatccagagaaattccacagaatctcatggaggtattgaaaaatgcagtgaaagttgttaattttattaaaggaagctcattgaatagccggcttcttgaaacattttgttcagagattggaactaatcatacccacttactatatcataccaaaattcgttggttgtctcaagggaaaatactaagcagggtttatgagctcaggaatgagattcacttttttctcattgaaaaaaaatctcatttggcaagtatttttgaagatgatacttgggtaacaaaattggcatatttaactgatatttttagcattcttaatgaactgagtttaaaactacaggggaaaaacagtgatgtattccaacatgttgaacgtatccagggatttcgaaagacattattgttatggcaagtaagacttaaaagtaatcgtcctagctattacatgtttccaagatttttgcagcatattgaagagaatattattaatgaaaacattttgaaagaaataaaattagagatattgttgcatctcacttctctgtctcaaacttttaaccatttctttccagaagaaaaatttgaaacattaagggaaaacagttgggtaaaagatccatttgcttttcgacaccctgaatcaataattgagctaaacttggtgcctgaagaagagaatgaattattgcagcttagttcttcatatacattgaagaatgattatgaaaccttaagtttatcagcattttggatgaaggtaaaggaagactttccattgttaagtagaaagagtgtcctgctattgctaccattcacaacaactagtttgtgtgaactagggttttccatcttaacgcagttaaaaacaaaggaaagaaatgggctgaattgtgcagcagttatgcgggtagcattatcttcctgtgttccagactggaatgaacttatgaacaggcaagcacacccatcatagtaaataaaaatcttacctagcttttgtctttgtatttcttattttgtagtatttttctatgttatatttaaatggtactataatactgtgatacttttgttatgttttaatttttgttatatttaataaaattattttatgttcattgaacaaaaatttaatgaatttctgttagaggccaggaactattctagagacatttgggatacaaaagtgaacaaaacaggtaattccctagtagagtttatatcctggcaaggagaaattgacaataaacctaataaataaggtttataatatttagaagctattaagtgctatggaaagagtagtaagaaggaaggtcagggaagtactggggaaccaaaccatgaagggttctgtagaccattattgggcctctggcttttgtcagtggactagagaacagttgaagggtttaagcgaaggagagaaatgatctgagctaggttttaaaagacactctggtcactattttaaattcttagggtaagtctgaattaaatgttactttcccctcactgggcatggtggctcagacctgtaatccccgcactttggcaggccatggcagaaggctctgttgagcccaggagttcaagaccatcctgggcaacatagtgagaccttatttctactaaaaatattttaaaaataagtcaggtgtggtggtgcacacctatagtcccagctactcaggaggctgtggcaggagggtcgcttgacctcaggagtttgaagttgcagtcatctatgattgcaccactgcagtccagcctgagcaacagagtgaaaccctgtctcgagaaaattaaatgttacttccctaaaaaaaccttttctaaccaccctagggtaaatcctccattattcctttatttctttgttttccttgtagtatataatttgtaataattttgattactgattgtcattctgccaccctggagtatataatttttaattatctgattactgttattcttccatagtaggggaggtgatatccatttgcctgatacatagtatgtgttcaatacacatttgctaaagaataaatgaatcaataatacctaacatctctaatttgcagtcattcccaagagtaattattaaatatgtggcaaatttctttgcctttttacttttaaaaatctaattttgacataactgctgtaaccatccagaaacggcattgatgttgcttcacgttgctgatgcttaagcaatgtatattgtgtaatatacaatgtagtcttcaaactaatttcaacttctgcctttctgtgtactcccttatcccactgggtgatattatttggcatggtcattgtcattaaaatcatacaggatagtaattcctttccatctgctaccatgcctagccttatttaatttttcagattttctgttctattgaaggtaattgattttttctttttttttaatgcttgaaataaagtgttgaa

SEQ ID NO: 2624 - DNA, 3900 bp, Homo sapiens
ccggaagtggtgttgcggagggaagtgtggggagagcagaggcgcagctctgctggagagacctgaggcttgcagcgctgggcccggccgggtcgctgcggctgggctggaggtgaggcgaaagaagggcatcctctgatgggagtggaccggagtccgctaaagcgaagcattccagggttcgttgcgggaaatacagtctggttttgccccccgtatgaattgagggaaggtcaaggatgcattccaggaaagttctataaaaatataccatcaactccaacctgatatttgacctagccatggaaaacctcattggctcctcactggatcagaccataaaaatgatccaggaatgaaaatctaagataaattcccaccacttcaagatgttcttatacaagtcaacagtctagcagatcagccagtctctttcatcatcaagcagacatactcaagaaagaggaatagtgaagtgaaatatacagaagcatgttcaagttcatctgttgaatctggaattgtgaatagtgacaatattgagaaaaatactgactccaatctgcaaacttcaacttcatttgagccacatttcaaaaagaaaaaagtaagtgcaagacgttataatgaagattacttaaaatatggctttatcaaatgtgaaaaaccctttgaaaatgacagacctcagtgtgttatttgtaataatattcttgcgaatgaaagcttaaaaccttcgaaattaaaaaggcacttagaaactcagcatgctgaacttattgataagcctcttgaatattttcaaagaaagaaaaaagacataaagttatcaacacaatttcttagttgttctactgctgttagtgagaaagccttattatcatcatatttagttgcatatcgtgtggcaaaagagaaaatagctaacacagctgctgaaaaaattattcttccagcatgtttggatatggtgcgtacaatatttgatgataaatcagctgataaattaaaaactatacctaatgataacacagtatctcttcgaatttgtactattgcagaacatttagaaacaatgcttattactcgtttacagtctggtatagattttgcaatccagcttgatgaaagcactgatattggaagctgcacaacacttttagtttatgtcagatatgcgtggcaagatgattttttggaggattttttgtgttttttaaatttaacctcacacctaagtggattagatatttttacagaattagaaaggcgcatagttggccaatataaattaaactggaaaaactgtaaaggaattacaagtgatggcacagcaaccatgactggaaaacatagcagagtaattaaaaaattactagaagttactaataatggtgctgtgtggaatcattgttttatacatcgtgaaggtttagcatccagagaaattccacagaatctcatggaggtattgaaaaatgcagtgaaagttgttaattttattaaaggaagctcattgaatagccggcttcttgaaacattttgttcagagattggaactaatcatacccacttactatatcataccaaaattcgttggttgtctcaagggaaaatactaagcagggtttatgagctcaggaatgagattcacttttttctcattgaaaaaaaatctcatttggcaagtatttttgaagatgatacttgggtaacaaaattggcatatttaactgatatttttagcattcttaatgaactgagtttaaaactacaggggaaaaacagtgatgtattccaacatgttgaacgtatccagggatttcgaaagacattattgttatggcaagtaagacttaaaagtaatcgtcctagctattacatgtttccaagatttttgcagcatattgaagagaatattattaatgaaaacattttgaaagaaataaaattagagatattgttgcatctcacttctctgtctcaaacttttaaccatttctttccagaagaaaaatttgaaacattaagggaaaacagttgggtaaaagatccatttgcttttcgacaccctgaatcaataattgagctaaacttggtgcctgaagaagagaatgaattattgcagcttagttcttcatatacattgaagaatgattatgaaaccttaagtttatcagcattttggatgaaggtaaaggaagactttccattgttaagtagaaagagtgtcctgctattgctaccattcacaacaactagtttgtgtgaactagggttttccatcttaacgcagttaaaaacaaaggaaagaaatgggctgaattgtgcagcagttatgcgggtagcattatcttcctgtgttccagactggaatgaacttatgaacaggcaagcacacccatcatagtaaataaaaatcttacctagcttttgtctttgtatttcttattttgtagtatttttctatgttatatttaaatggtactataatactgtgatacttttgttatgttttaatttttgttatatttaataaaattattttatgttcattgaacaaaaatttaatgaatttctgttagaggccaggaactattctagagacatttgggatacaaaagtgaacaaaacaggtaattccctagtagagtttatatcctggcaaggagaaattgacaataaacctaataaataaggtttataatatttagaagctattaagtgctatggaaagagtagtaagaaggaaggtcagggaagtactggggaaccaaaccatgaagggttctgtagaccattattgggcctctggcttttgtcagtggactagagaacagttgaagggtttaagcgaaggagagaaatgatctgagctaggttttaaaagacactctggtcactattttaaattcttagggtaagtctgaattaaatgttactttcccctcactgggcatggtggctcagacctgtaatccccgcactttggcaggccatggcagaaggctctgttgagcccaggagttcaagaccatcctgggcaacatagtgagaccttatttctactaaaaatattttaaaaataagtcaggtgtggtggtgcacacctatagtcccagctactcaggaggctgtggcaggagggtcgcttgacctcaggagtttgaagttgcagtcatctatgattgcaccactgcagtccagcctgagcaacagagtgaaaccctgtctcgagaaaattaaatgttacttccctaaaaaaaccttttctaaccaccctagggtaaatcctccattattcctttatttctttgttttccttgtagtatataatttgtaataattttgattactgattgtcattctgccaccctggagtatataatttttaattatctgattactgttattcttccatagtaggggaggtgatatccatttgcctgatacatagtatgtgttcaatacacatttgctaaagaataaatgaatcaataatacctaacatctctaatttgcagtcattcccaagagtaattattaaatatgtggcaaatttctttgcctttttacttttaaaaatctaattttgacataactgctgtaaccatccagaaacggcattgatgttgcttcacgttgctgatgcttaagcaatgtatattgtgtaatatacaatgtagtcttcaaactaatttcaacttctgcctttctgtgtactcccttatcccactgggtgatattatttggcatggtcattgtcattaaaatcatacaggatagtaattcctttccatctgctaccatgcctagccttatttaatttttcagattttctgttctattgaaggtaattgattttttctttttttttaatgcttgaaataaagtgttgaa

SEQ ID NO: 2625 - DNA, 3849 bp, Homo sapiens
gcgcagctctgctggagagacctgaggcttgcagcgctgggcccggccgggtcgctgcggctgggctggagccaaggttaactatttgtaacatgtcatctttcaaggaagcatctaaccaagattaagtcaaaggcatctaccaggtcctgaattctctcccagatgcacaccttttaaggtcaaggatgcattccaggaaagttctataaaaatataccatcaactccaacctgatatttgacctagccatggaaaacctcattggctcctcactggatcagaccataaaaatgatccaggaatgaaaatctaagataaattcccaccacttcaagatgttcttatacaagtcaacagtctagcagatcagccagtctctttcatcatcaagcagacatactcaagaaagaggaatagtgaagtgaaatatacagaagcatgttcaagttcatctgttgaatctggaattgtgaatagtgacaatattgagaaaaatactgactccaatctgcaaacttcaacttcatttgagccacatttcaaaaagaaaaaagtaagtgcaagacgttataatgaagattacttaaaatatggctttatcaaatgtgaaaaaccctttgaaaatgacagacctcagtgtgttatttgtaataatattcttgcgaatgaaagcttaaaaccttcgaaattaaaaaggcacttagaaactcagcatgctgaacttattgataagcctcttgaatattttcaaagaaagaaaaaagacataaagttatcaacacaatttcttagttgttctactgctgttagtgagaaagccttattatcatcatatttagttgcatatcgtgtggcaaaagagaaaatagctaacacagctgctgaaaaaattattcttccagcatgtttggatatggtgcgtacaatatttgatgataaatcagctgataaattaaaaactatacctaatgataacacagtatctcttcgaatttgtactattgcagaacatttagaaacaatgcttattactcgtttacagtctggtatagattttgcaatccagcttgatgaaagcactgatattggaagctgcacaacacttttagtttatgtcagatatgcgtggcaagatgattttttggaggattttttgtgttttttaaatttaacctcacacctaagtggattagatatttttacagaattagaaaggcgcatagttggccaatataaattaaactggaaaaactgtaaaggaattacaagtgatggcacagcaaccatgactggaaaacatagcagagtaattaaaaaattactagaagttactaataatggtgctgtgtggaatcattgttttatacatcgtgaaggtttagcatccagagaaattccacagaatctcatggaggtattgaaaaatgcagtgaaagttgttaattttattaaaggaagctcattgaatagccggcttcttgaaacattttgttcagagattggaactaatcatacccacttactatatcataccaaaattcgttggttgtctcaagggaaaatactaagcagggtttatgagctcaggaatgagattcacttttttctcattgaaaaaaaatctcatttggcaagtatttttgaagatgatacttgggtaacaaaattggcatatttaactgatatttttagcattcttaatgaactgagtttaaaactacaggggaaaaacagtgatgtattccaacatgttgaacgtatccagggatttcgaaagacattattgttatggcaagtaagacttaaaagtaatcgtcctagctattacatgtttccaagatttttgcagcatattgaagagaatattattaatgaaaacattttgaaagaaataaaattagagatattgttgcatctcacttctctgtctcaaacttttaaccatttctttccagaagaaaaatttgaaacattaagggaaaacagttgggtaaaagatccatttgcttttcgacaccctgaatcaataattgagctaaacttggtgcctgaagaagagaatgaattattgcagcttagttcttcatatacattgaagaatgattatgaaaccttaagtttatcagcattttggatgaaggtaaaggaagactttccattgttaagtagaaagagtgtcctgctattgctaccattcacaacaactagtttgtgtgaactagggttttccatcttaacgcagttaaaaacaaaggaaagaaatgggctgaattgtgcagcagttatgcgggtagcattatcttcctgtgttccagactggaatgaacttatgaacaggcaagcacacccatcatagtaaataaaaatcttacctagcttttgtctttgtatttcttattttgtagtatttttctatgttatatttaaatggtactataatactgtgatacttttgttatgttttaatttttgttatatttaataaaattattttatgttcattgaacaaaaatttaatgaatttctgttagaggccaggaactattctagagacatttgggatacaaaagtgaacaaaacaggtaattccctagtagagtttatatcctggcaaggagaaattgacaataaacctaataaataaggtttataatatttagaagctattaagtgctatggaaagagtagtaagaaggaaggtcagggaagtactggggaaccaaaccatgaagggttctgtagaccattattgggcctctggcttttgtcagtggactagagaacagttgaagggtttaagcgaaggagagaaatgatctgagctaggttttaaaagacactctggtcactattttaaattcttagggtaagtctgaattaaatgttactttcccctcactgggcatggtggctcagacctgtaatccccgcactttggcaggccatggcagaaggctctgttgagcccaggagttcaagaccatcctgggcaacatagtgagaccttatttctactaaaaatattttaaaaataagtcaggtgtggtggtgcacacctatagtcccagctactcaggaggctgtggcaggagggtcgcttgacctcaggagtttgaagttgcagtcatctatgattgcaccactgcagtccagcctgagcaacagagtgaaaccctgtctcgagaaaattaaatgttacttccctaaaaaaaccttttctaaccaccctagggtaaatcctccattattcctttatttctttgttttccttgtagtatataatttgtaataattttgattactgattgtcattctgccaccctggagtatataatttttaattatctgattactgttattcttccatagtaggggaggtgatatccatttgcctgatacatagtatgtgttcaatacacatttgctaaagaataaatgaatcaataatacctaacatctctaatttgcagtcattcccaagagtaattattaaatatgtggcaaatttctttgcctttttacttttaaaaatctaattttgacataactgctgtaaccatccagaaacggcattgatgttgcttcacgttgctgatgcttaagcaatgtatattgtgtaatatacaatgtagtcttcaaactaatttcaacttctgcctttctgtgtactcccttatcccactgggtgatattatttggcatggtcattgtcattaaaatcatacaggatagtaattcctttccatctgctaccatgcctagccttatttaatttttcagattttctgttctattgaaggtaattgattttttctttttttttaatgcttgaaataaagtgttgaa

SEQ ID NO: 2626 - DNA, 3725 bp, Homo sapiens
agaagggcatcctctgatgggagtggaccggagtccgctaaagcgaagcattccagggtcaaggatgcattccaggaaagttctataaaaatataccatcaactccaacctgatatttgacctagccatggaaaacctcattggctcctcactggatcagaccataaaaatgatccaggaatgaaaatctaagataaattcccaccacttcaagatgttcttatacaagtcaacagtctagcagatcagccagtctctttcatcatcaagcagacatactcaagaaagaggaatagtgaagtgaaatatacagaagcatgttcaagttcatctgttgaatctggaattgtgaatagtgacaatattgagaaaaatactgactccaatctgcaaacttcaacttcatttgagccacatttcaaaaagaaaaaagtaagtgcaagacgttataatgaagattacttaaaatatggctttatcaaatgtgaaaaaccctttgaaaatgacagacctcagtgtgttatttgtaataatattcttgcgaatgaaagcttaaaaccttcgaaattaaaaaggcacttagaaactcagcatgctgaacttattgataagcctcttgaatattttcaaagaaagaaaaaagacataaagttatcaacacaatttcttagttgttctactgctgttagtgagaaagccttattatcatcatatttagttgcatatcgtgtggcaaaagagaaaatagctaacacagctgctgaaaaaattattcttccagcatgtttggatatggtgcgtacaatatttgatgataaatcagctgataaattaaaaactatacctaatgataacacagtatctcttcgaatttgtactattgcagaacatttagaaacaatgcttattactcgtttacagtctggtatagattttgcaatccagcttgatgaaagcactgatattggaagctgcacaacacttttagtttatgtcagatatgcgtggcaagatgattttttggaggattttttgtgttttttaaatttaacctcacacctaagtggattagatatttttacagaattagaaaggcgcatagttggccaatataaattaaactggaaaaactgtaaaggaattacaagtgatggcacagcaaccatgactggaaaacatagcagagtaattaaaaaattactagaagttactaataatggtgctgtgtggaatcattgttttatacatcgtgaaggtttagcatccagagaaattccacagaatctcatggaggtattgaaaaatgcagtgaaagttgttaattttattaaaggaagctcattgaatagccggcttcttgaaacattttgttcagagattggaactaatcatacccacttactatatcataccaaaattcgttggttgtctcaagggaaaatactaagcagggtttatgagctcaggaatgagattcacttttttctcattgaaaaaaaatctcatttggcaagtatttttgaagatgatacttgggtaacaaaattggcatatttaactgatatttttagcattcttaatgaactgagtttaaaactacaggggaaaaacagtgatgtattccaacatgttgaacgtatccagggatttcgaaagacattattgttatggcaagtaagacttaaaagtaatcgtcctagctattacatgtttccaagatttttgcagcatattgaagagaatattattaatgaaaacattttgaaagaaataaaattagagatattgttgcatctcacttctctgtctcaaacttttaaccatttctttccagaagaaaaatttgaaacattaagggaaaacagttgggtaaaagatccatttgcttttcgacaccctgaatcaataattgagctaaacttggtgcctgaagaagagaatgaattattgcagcttagttcttcatatacattgaagaatgattatgaaaccttaagtttatcagcattttggatgaaggtaaaggaagactttccattgttaagtagaaagagtgtcctgctattgctaccattcacaacaactagtttgtgtgaactagggttttccatcttaacgcagttaaaaacaaaggaaagaaatgggctgaattgtgcagcagttatgcgggtagcattatcttcctgtgttccagactggaatgaacttatgaacaggcaagcacacccatcatagtaaataaaaatcttacctagcttttgtctttgtatttcttattttgtagtatttttctatgttatatttaaatggtactataatactgtgatacttttgttatgttttaatttttgttatatttaataaaattattttatgttcattgaacaaaaatttaatgaatttctgttagaggccaggaactattctagagacatttgggatacaaaagtgaacaaaacaggtaattccctagtagagtttatatcctggcaaggagaaattgacaataaacctaataaataaggtttataatatttagaagctattaagtgctatggaaagagtagtaagaaggaaggtcagggaagtactggggaaccaaaccatgaagggttctgtagaccattattgggcctctggcttttgtcagtggactagagaacagttgaagggtttaagcgaaggagagaaatgatctgagctaggttttaaaagacactctggtcactattttaaattcttagggtaagtctgaattaaatgttactttcccctcactgggcatggtggctcagacctgtaatccccgcactttggcaggccatggcagaaggctctgttgagcccaggagttcaagaccatcctgggcaacatagtgagaccttatttctactaaaaatattttaaaaataagtcaggtgtggtggtgcacacctatagtcccagctactcaggaggctgtggcaggagggtcgcttgacctcaggagtttgaagttgcagtcatctatgattgcaccactgcagtccagcctgagcaacagagtgaaaccctgtctcgagaaaattaaatgttacttccctaaaaaaaccttttctaaccaccctagggtaaatcctccattattcctttatttctttgttttccttgtagtatataatttgtaataattttgattactgattgtcattctgccaccctggagtatataatttttaattatctgattactgttattcttccatagtaggggaggtgatatccatttgcctgatacatagtatgtgttcaatacacatttgctaaagaataaatgaatcaataatacctaacatctctaatttgcagtcattcccaagagtaattattaaatatgtggcaaatttctttgcctttttacttttaaaaatctaattttgacataactgctgtaaccatccagaaacggcattgatgttgcttcacgttgctgatgcttaagcaatgtatattgtgtaatatacaatgtagtcttcaaactaatttcaacttctgcctttctgtgtactcccttatcccactgggtgatattatttggcatggtcattgtcattaaaatcatacaggatagtaattcctttccatctgctaccatgcctagccttatttaatttttcagattttctgttctattgaaggtaattgattttttctttttttttaatgcttgaaataaagtgttgaa

SEQ ID NO: 2627 - DNA, 3760 bp, Homo sapiens
ggctggaatggggaatttgtgaggtcaaggatgcattccaggaaagttctataaaaatataccatcaactccaacctgatatttgacctagccatggaaaacctcattggctcctcactggatcagaccataaaaatgatccaggaatgaaaatctaagataaattcccaccacttcaagatgttcttatacaagtcaacagtctagcagatcagccagtctctttcatcatcaagcagacatactcaagtgccaattataacattttaatcaaactggaacaaattgctattaaaatggatcatttctttattaaaagaaagaggaatagtgaagtgaaatatacagaagcatgttcaagttcatctgttgaatctggaattgtgaatagtgacaatattgagaaaaatactgactccaatctgcaaacttcaacttcatttgagccacatttcaaaaagaaaaaagtaagtgcaagacgttataatgaagattacttaaaatatggctttatcaaatgtgaaaaaccctttgaaaatgacagacctcagtgtgttatttgtaataatattcttgcgaatgaaagcttaaaaccttcgaaattaaaaaggcacttagaaactcagcatgctgaacttattgataagcctcttgaatattttcaaagaaagaaaaaagacataaagttatcaacacaatttcttagttgttctactgctgttagtgagaaagccttattatcatcatatttagttgcatatcgtgtggcaaaagagaaaatagctaacacagctgctgaaaaaattattcttccagcatgtttggatatggtgcgtacaatatttgatgataaatcagctgataaattaaaaactatacctaatgataacacagtatctcttcgaatttgtactattgcagaacatttagaaacaatgcttattactcgtttacagtctggtatagattttgcaatccagcttgatgaaagcactgatattggaagctgcacaacacttttagtttatgtcagatatgcgtggcaagatgattttttggaggattttttgtgttttttaaatttaacctcacacctaagtggattagatatttttacagaattagaaaggcgcatagttggccaatataaattaaactggaaaaactgtaaaggaattacaagtgatggcacagcaaccatgactggaaaacatagcagagtaattaaaaaattactagaagttactaataatggtgctgtgtggaatcattgttttatacatcgtgaaggtttagcatccagagaaattccacagaatctcatggaggtattgaaaaatgcagtgaaagttgttaattttattaaaggaagctcattgaatagccggcttcttgaaacattttgttcagagattggaactaatcatacccacttactatatcataccaaaattcgttggttgtctcaagggaaaatactaagcagggtttatgagctcaggaatgagattcacttttttctcattgaaaaaaaatctcatttggcaagtatttttgaagatgatacttgggtaacaaaattggcatatttaactgatatttttagcattcttaatgaactgagtttaaaactacaggggaaaaacagtgatgtattccaacatgttgaacgtatccagggatttcgaaagacattattgttatggcaagtaagacttaaaagtaatcgtcctagctattacatgtttccaagatttttgcagcatattgaagagaatattattaatgaaaacattttgaaagaaataaaattagagatattgttgcatctcacttctctgtctcaaacttttaaccatttctttccagaagaaaaatttgaaacattaagggaaaacagttgggtaaaagatccatttgcttttcgacaccctgaatcaataattgagctaaacttggtgcctgaagaagagaatgaattattgcagcttagttcttcatatacattgaagaatgattatgaaaccttaagtttatcagcattttggatgaaggtaaaggaagactttccattgttaagtagaaagagtgtcctgctattgctaccattcacaacaactagtttgtgtgaactagggttttccatcttaacgcagttaaaaacaaaggaaagaaatgggctgaattgtgcagcagttatgcgggtagcattatcttcctgtgttccagactggaatgaacttatgaacaggcaagcacacccatcatagtaaataaaaatcttacctagcttttgtctttgtatttcttattttgtagtatttttctatgttatatttaaatggtactataatactgtgatacttttgttatgttttaatttttgttatatttaataaaattattttatgttcattgaacaaaaatttaatgaatttctgttagaggccaggaactattctagagacatttgggatacaaaagtgaacaaaacaggtaattccctagtagagtttatatcctggcaaggagaaattgacaataaacctaataaataaggtttataatatttagaagctattaagtgctatggaaagagtagtaagaaggaaggtcagggaagtactggggaaccaaaccatgaagggttctgtagaccattattgggcctctggcttttgtcagtggactagagaacagttgaagggtttaagcgaaggagagaaatgatctgagctaggttttaaaagacactctggtcactattttaaattcttagggtaagtctgaattaaatgttactttcccctcactgggcatggtggctcagacctgtaatccccgcactttggcaggccatggcagaaggctctgttgagcccaggagttcaagaccatcctgggcaacatagtgagaccttatttctactaaaaatattttaaaaataagtcaggtgtggtggtgcacacctatagtcccagctactcaggaggctgtggcaggagggtcgcttgacctcaggagtttgaagttgcagtcatctatgattgcaccactgcagtccagcctgagcaacagagtgaaaccctgtctcgagaaaattaaatgttacttccctaaaaaaaccttttctaaccaccctagggtaaatcctccattattcctttatttctttgttttccttgtagtatataatttgtaataattttgattactgattgtcattctgccaccctggagtatataatttttaattatctgattactgttattcttccatagtaggggaggtgatatccatttgcctgatacatagtatgtgttcaatacacatttgctaaagaataaatgaatcaataatacctaacatctctaatttgcagtcattcccaagagtaattattaaatatgtggcaaatttctttgcctttttacttttaaaaatctaattttgacataactgctgtaaccatccagaaacggcattgatgttgcttcacgttgctgatgcttaagcaatgtatattgtgtaatatacaatgtagtcttcaaactaatttcaacttctgcctttctgtgtactcccttatcccactgggtgatattatttggcatggtcattgtcattaaaatcatacaggatagtaattcctttccatctgctaccatgcctagccttatttaatttttcagattttctgttctattgaaggtaattgattttttctttttttttaatgcttgaaataaagtgttgaa

SEQ ID NO: 2628 - DNA, 4438 bp, Homo sapiens
ccggaagtggtgttgcggagggaagtgtggggagagcagaggcgcagctctgctggagagacctgaggcttgcagcgctgggcccggccgggtcgctgcggctgggctggaggtgaggcgaaagaagggcatcctctgatgggagtggaccggagtccgctaaagcgaagcattccagggttcgttgcgggaaatacagtctggttttgccccccgtatgaattgagggaaggtcaaggatgcattccaggaaagttctataaaaatataccatcaactccaacctgatatttgacctagccatggaaaacctcattggctcctcactggatcagaccataaaaatgatccaggaatgaaaatctaagataaattcccaccacttcaagatgttcttatacaagtcaacagtctagcagatcagccagtctctttcatcatcaagcagacatactcaaggtaccaacacagcaaaggcacaaaatgtctctatatcagtatttttcatggtatatgtgagacccattagtgaggcatgaaatcaattctgtgagtcacaatgaacatttgtctaaaaaacaaaataaaatgtaaaataccaaagtgttttgcatgaatcctttgcctgaattgtgcacattgcaaggaatgctgaggtcaatttcaatatgcgagaggggtatttgatggaggagatatgatgaatagaatgtatattggctaagaaatggttttcagtcattgattcctgggtgtcttgcttgattttcataatagcacggttaatgttctatagtcaagttttatattacaattacttgcaactagttgtgaagtctgaaatattcgattcaattgcaaactttgagtgtagtttttgaaaagatgttatttagactgtatatttttttcttcttttttgagttagtgccaattataacattttaatcaaactggaacaaattgctattaaaatggatcatttctttattaaaagaaagaggaatagtgaagtgaaatatacagaagcatgttcaagttcatctgttgaatctggaattgtgaatagtgacaatattgagaaaaatactgactccaatctgcaaacttcaacttcatttgagccacatttcaaaaagaaaaaagtaagtgcaagacgttataatgaagattacttaaaatatggctttatcaaatgtgaaaaaccctttgaaaatgacagacctcagtgtgttatttgtaataatattcttgcgaatgaaagcttaaaaccttcgaaattaaaaaggcacttagaaactcagcatgctgaacttattgataagcctcttgaatattttcaaagaaagaaaaaagacataaagttatcaacacaatttcttagttgttctactgctgttagtgagaaagccttattatcatcatatttagttgcatatcgtgtggcaaaagagaaaatagctaacacagctgctgaaaaaattattcttccagcatgtttggatatggtgcgtacaatatttgatgataaatcagctgataaattaaaaactatacctaatgataacacagtatctcttcgaatttgtactattgcagaacatttagaaacaatgcttattactcgtttacagtctggtatagattttgcaatccagcttgatgaaagcactgatattggaagctgcacaacacttttagtttatgtcagatatgcgtggcaagatgattttttggaggattttttgtgttttttaaatttaacctcacacctaagtggattagatatttttacagaattagaaaggcgcatagttggccaatataaattaaactggaaaaactgtaaaggaattacaagtgatggcacagcaaccatgactggaaaacatagcagagtaattaaaaaattactagaagttactaataatggtgctgtgtggaatcattgttttatacatcgtgaaggtttagcatccagagaaattccacagaatctcatggaggtattgaaaaatgcagtgaaagttgttaattttattaaaggaagctcattgaatagccggcttcttgaaacattttgttcagagattggaactaatcatacccacttactatatcataccaaaattcgttggttgtctcaagggaaaatactaagcagggtttatgagctcaggaatgagattcacttttttctcattgaaaaaaaatctcatttggcaagtatttttgaagatgatacttgggtaacaaaattggcatatttaactgatatttttagcattcttaatgaactgagtttaaaactacaggggaaaaacagtgatgtattccaacatgttgaacgtatccagggatttcgaaagacattattgttatggcaagtaagacttaaaagtaatcgtcctagctattacatgtttccaagatttttgcagcatattgaagagaatattattaatgaaaacattttgaaagaaataaaattagagatattgttgcatctcacttctctgtctcaaacttttaaccatttctttccagaagaaaaatttgaaacattaagggaaaacagttgggtaaaagatccatttgcttttcgacaccctgaatcaataattgagctaaacttggtgcctgaagaagagaatgaattattgcagcttagttcttcatatacattgaagaatgattatgaaaccttaagtttatcagcattttggatgaaggtaaaggaagactttccattgttaagtagaaagagtgtcctgctattgctaccattcacaacaactagtttgtgtgaactagggttttccatcttaacgcagttaaaaacaaaggaaagaaatgggctgaattgtgcagcagttatgcgggtagcattatcttcctgtgttccagactggaatgaacttatgaacaggcaagcacacccatcatagtaaataaaaatcttacctagcttttgtctttgtatttcttattttgtagtatttttctatgttatatttaaatggtactataatactgtgatacttttgttatgttttaatttttgttatatttaataaaattattttatgttcattgaacaaaaatttaatgaatttctgttagaggccaggaactattctagagacatttgggatacaaaagtgaacaaaacaggtaattccctagtagagtttatatcctggcaaggagaaattgacaataaacctaataaataaggtttataatatttagaagctattaagtgctatggaaagagtagtaagaaggaaggtcagggaagtactggggaaccaaaccatgaagggttctgtagaccattattgggcctctggcttttgtcagtggactagagaacagttgaagggtttaagcgaaggagagaaatgatctgagctaggttttaaaagacactctggtcactattttaaattcttagggtaagtctgaattaaatgttactttcccctcactgggcatggtggctcagacctgtaatccccgcactttggcaggccatggcagaaggctctgttgagcccaggagttcaagaccatcctgggcaacatagtgagaccttatttctactaaaaatattttaaaaataagtcaggtgtggtggtgcacacctatagtcccagctactcaggaggctgtggcaggagggtcgcttgacctcaggagtttgaagttgcagtcatctatgattgcaccactgcagtccagcctgagcaacagagtgaaaccctgtctcgagaaaattaaatgttacttccctaaaaaaaccttttctaaccaccctagggtaaatcctccattattcctttatttctttgttttccttgtagtatataatttgtaataattttgattactgattgtcattctgccaccctggagtatataatttttaattatctgattactgttattcttccatagtaggggaggtgatatccatttgcctgatacatagtatgtgttcaatacacatttgctaaagaataaatgaatcaataatacctaacatctctaatttgcagtcattcccaagagtaattattaaatatgtggcaaatttctttgcctttttacttttaaaaatctaattttgacataactgctgtaaccatccagaaacggcattgatgttgcttcacgttgctgatgcttaagcaatgtatattgtgtaatatacaatgtagtcttcaaactaatttcaacttctgcctttctgtgtactcccttatcccactgggtgatattatttggcatggtcattgtcattaaaatcatacaggatagtaattcctttccatctgctaccatgcctagccttatttaatttttcagattttctgttctattgaaggtaattgattttttctttttttttaatgcttgaaataaagtgttgaa

SEQ ID NO: 2629 - DNA, 3807 bp, Homo sapiens
gctggaatggggaatttgtgaggtaggccggaagtggtgttgcggagggaagtgtggggagagcagaggcgcagctctgctggagagacctgaggcttgcagcgctgggcccggccgggtcgctgcggctgggctggaggtcaaggatgcattccaggaaagttctataaaaatataccatcaactccaacctgatatttgacctagccatggaaaacctcattggctcctcactggatcagaccataaaaatgatccaggaatgaaaatctaagataaattcccaccacttcaagatgttcttatacaagtcaacagtctagcagatcagccagtctctttcatcatcaagcagacatactcaagaaagaggaatagtgaagtgaaatatacagaagcatgttcaagttcatctgttgaatctggaattgtgaatagtgacaatattgagaaaaatactgactccaatctgcaaacttcaacttcatttgagccacatttcaaaaagaaaaaagtaagtgcaagacgttataatgaagattacttaaaatatggctttatcaaatgtgaaaaaccctttgaaaatgacagacctcagtgtgttatttgtaataatattcttgcgaatgaaagcttaaaaccttcgaaattaaaaaggcacttagaaactcagcatgctgaacttattgataagcctcttgaatattttcaaagaaagaaaaaagacataaagttatcaacacaatttcttagttgttctactgctgttagtgagaaagccttattatcatcatatttagttgcatatcgtgtggcaaaagagaaaatagctaacacagctgctgaaaaaattattcttccagcatgtttggatatggtgcgtacaatatttgatgataaatcagctgataaattaaaaactatacctaatgataacacagtatctcttcgaatttgtactattgcagaacatttagaaacaatgcttattactcgtttacagtctggtatagattttgcaatccagcttgatgaaagcactgatattggaagctgcacaacacttttagtttatgtcagatatgcgtggcaagatgattttttggaggattttttgtgttttttaaatttaacctcacacctaagtggattagatatttttacagaattagaaaggcgcatagttggccaatataaattaaactggaaaaactgtaaaggaattacaagtgatggcacagcaaccatgactggaaaacatagcagagtaattaaaaaattactagaagttactaataatggtgctgtgtggaatcattgttttatacatcgtgaaggtttagcatccagagaaattccacagaatctcatggaggtattgaaaaatgcagtgaaagttgttaattttattaaaggaagctcattgaatagccggcttcttgaaacattttgttcagagattggaactaatcatacccacttactatatcataccaaaattcgttggttgtctcaagggaaaatactaagcagggtttatgagctcaggaatgagattcacttttttctcattgaaaaaaaatctcatttggcaagtatttttgaagatgatacttgggtaacaaaattggcatatttaactgatatttttagcattcttaatgaactgagtttaaaactacaggggaaaaacagtgatgtattccaacatgttgaacgtatccagggatttcgaaagacattattgttatggcaagtaagacttaaaagtaatcgtcctagctattacatgtttccaagatttttgcagcatattgaagagaatattattaatgaaaacattttgaaagaaataaaattagagatattgttgcatctcacttctctgtctcaaacttttaaccatttctttccagaagaaaaatttgaaacattaagggaaaacagttgggtaaaagatccatttgcttttcgacaccctgaatcaataattgagctaaacttggtgcctgaagaagagaatgaattattgcagcttagttcttcatatacattgaagaatgattatgaaaccttaagtttatcagcattttggatgaaggtaaaggaagactttccattgttaagtagaaagagtgtcctgctattgctaccattcacaacaactagtttgtgtgaactagggttttccatcttaacgcagttaaaaacaaaggaaagaaatgggctgaattgtgcagcagttatgcgggtagcattatcttcctgtgttccagactggaatgaacttatgaacaggcaagcacacccatcatagtaaataaaaatcttacctagcttttgtctttgtatttcttattttgtagtatttttctatgttatatttaaatggtactataatactgtgatacttttgttatgttttaatttttgttatatttaataaaattattttatgttcattgaacaaaaatttaatgaatttctgttagaggccaggaactattctagagacatttgggatacaaaagtgaacaaaacaggtaattccctagtagagtttatatcctggcaaggagaaattgacaataaacctaataaataaggtttataatatttagaagctattaagtgctatggaaagagtagtaagaaggaaggtcagggaagtactggggaaccaaaccatgaagggttctgtagaccattattgggcctctggcttttgtcagtggactagagaacagttgaagggtttaagcgaaggagagaaatgatctgagctaggttttaaaagacactctggtcactattttaaattcttagggtaagtctgaattaaatgttactttcccctcactgggcatggtggctcagacctgtaatccccgcactttggcaggccatggcagaaggctctgttgagcccaggagttcaagaccatcctgggcaacatagtgagaccttatttctactaaaaatattttaaaaataagtcaggtgtggtggtgcacacctatagtcccagctactcaggaggctgtggcaggagggtcgcttgacctcaggagtttgaagttgcagtcatctatgattgcaccactgcagtccagcctgagcaacagagtgaaaccctgtctcgagaaaattaaatgttacttccctaaaaaaaccttttctaaccaccctagggtaaatcctccattattcctttatttctttgttttccttgtagtatataatttgtaataattttgattactgattgtcattctgccaccctggagtatataatttttaattatctgattactgttattcttccatagtaggggaggtgatatccatttgcctgatacatagtatgtgttcaatacacatttgctaaagaataaatgaatcaataatacctaacatctctaatttgcagtcattcccaagagtaattattaaatatgtggcaaatttctttgcctttttacttttaaaaatctaattttgacataactgctgtaaccatccagaaacggcattgatgttgcttcacgttgctgatgcttaagcaatgtatattgtgtaatatacaatgtagtcttcaaactaatttcaacttctgcctttctgtgtactcccttatcccactgggtgatattatttggcatggtcattgtcattaaaatcatacaggatagtaattcctttccatctgctaccatgcctagccttatttaatttttcagattttctgttctattgaaggtaattgattttttctttttttttaatgcttgaaataaagtgttgaa

SEQ ID NO: 2630 - DNA, 4350 bp, Homo sapiens
tttcggctggaatggggaatttgtgaggtaggccggaagtggtgttgcggagggaagtgtggggagagcagaggcgcagctctgctggagagacctgaggcttgcagcgctgggcccggccgggtcgctgcggctgggctggaggtcaaggatgcattccaggaaagttctataaaaatataccatcaactccaacctgatatttgacctagccatggaaaacctcattggctcctcactggatcagaccataaaaatgatccaggaatgaaaatctaagataaattcccaccacttcaagatgttcttatacaagtcaacagtctagcagatcagccagtctctttcatcatcaagcagacatactcaaggtaccaacacagcaaaggcacaaaatgtctctatatcagtatttttcatggtatatgtgagacccattagtgaggcatgaaatcaattctgtgagtcacaatgaacatttgtctaaaaaacaaaataaaatgtaaaataccaaagtgttttgcatgaatcctttgcctgaattgtgcacattgcaaggaatgctgaggtcaatttcaatatgcgagaggggtatttgatggaggagatatgatgaatagaatgtatattggctaagaaatggttttcagtcattgattcctgggtgtcttgcttgattttcataatagcacggttaatgttctatagtcaagttttatattacaattacttgcaactagttgtgaagtctgaaatattcgattcaattgcaaactttgagtgtagtttttgaaaagatgttatttagactgtatatttttttcttcttttttgagttagtgccaattataacattttaatcaaactggaacaaattgctattaaaatggatcatttctttattaaaagaaagaggaatagtgaagtgaaatatacagaagcatgttcaagttcatctgttgaatctggaattgtgaatagtgacaatattgagaaaaatactgactccaatctgcaaacttcaacttcatttgagccacatttcaaaaagaaaaaagtaagtgcaagacgttataatgaagattacttaaaatatggctttatcaaatgtgaaaaaccctttgaaaatgacagacctcagtgtgttatttgtaataatattcttgcgaatgaaagcttaaaaccttcgaaattaaaaaggcacttagaaactcagcatgctgaacttattgataagcctcttgaatattttcaaagaaagaaaaaagacataaagttatcaacacaatttcttagttgttctactgctgttagtgagaaagccttattatcatcatatttagttgcatatcgtgtggcaaaagagaaaatagctaacacagctgctgaaaaaattattcttccagcatgtttggatatggtgcgtacaatatttgatgataaatcagctgataaattaaaaactatacctaatgataacacagtatctcttcgaatttgtactattgcagaacatttagaaacaatgcttattactcgtttacagtctggtatagattttgcaatccagcttgatgaaagcactgatattggaagctgcacaacacttttagtttatgtcagatatgcgtggcaagatgattttttggaggattttttgtgttttttaaatttaacctcacacctaagtggattagatatttttacagaattagaaaggcgcatagttggccaatataaattaaactggaaaaactgtaaaggaattacaagtgatggcacagcaaccatgactggaaaacatagcagagtaattaaaaaattactagaagttactaataatggtgctgtgtggaatcattgttttatacatcgtgaaggtttagcatccagagaaattccacagaatctcatggaagtattgaaaaatgcagtgaaagttgttaattttattaaaggaagctcattgaatagccggcttcttgaaacattttgttcagagattggaactaatcatacccacttactatatcataccaaaattcgttggttgtctcaagggaaaatactaagcagggtttatgagctcaggaatgagattcacttttttctcattgaaaaaaaatctcatttggcaagtatttttgaagatgatacttgggtaacaaaattggcatatttaactgatatttttagcattcttaatgaactgagtttaaaactacaggggaaaaacagtgatgtattccaacatgttgaacgtatccagggatttcgaaagacattattgttatggcaagtaagacttaaaagtaatcgtcctagctattacatgtttccaagatttttgcagcatattgaagagaatattattaatgaaaacattttgaaagaaataaaattagagatattgttgcatctcacttctctgtctcaaacttttaaccatttctttccagaagaaaaatttgaaacattaagggaaaacagttgggtaaaagatccatttgcttttcgaaaccctgaatcaataattgagctaaacttggtgcctgaagaagagaatgaattattgcagcttagttcttcatatacattgaagaatgattatgaaaccttaagtttatcagcattttggatgaaggtaaaggaagactttccattgttaagtagaaagagtgtcctgctattgctaccattcacaacaactagtttgtgtgaactagggttttccatcttaacgcagttaaaaacaaaggaaagaaatgggctgaattgtgcagcagttatgcgggtagcattatcttcctgtgttccagactggaatgaacttatgaacaggcaagcacacccatcatagtaaataaaaatcttacctagcttttgtctttgtatttcttattttgtagtatttttctatgttatatttaaatggtactataatactgtgatacttttgttatgttttaatttttgttatatttaataaaattattttatgttcattgaacaaaaatttaatgaatttctgttagaggccaggaactattctagagacatttgggatacaaaagtgaacaaaacaggtaattccctagtagagtttatatcctggcaaggagaaattgacaataaacctaataaataaggtttataatatttagaagctattaagtgctatggaaagagtagtaagaaggaaggtcagggaagtactggggaaccaaaccatgaagggttctgtagaccattattgggcctctggcttttgtcagtggactagagaacagttgaagggtttaagcgaaggagagaaatgatctgagctaggttttaaaagacactctggtcactattttaaattcttagggtaagtctgaattaaatgttactttcccctcactgggcatggtggctcagacctgtaatccccgcactttggcaggccatggcagaaggctctgttgagcccaggagttcaagaccatcctgggcaacatagtgagaccttatttctactaaaaatattttaaaaataagtcaggtgtggtggtgcacacctatagtcccagctactcaggaggctgtggcaggagggtcgcttgacctcaggagtttgaagttgcagtcatctatgattgcaccactgcagtccagcctgagcaacagagtgaaaccctgtctcgagaaaattaaatgttacttccctaaaaaaaccttttctaaccaccctagggtaaatcctccattattcctttatttctttgttttccttgtagtatataatttgtaataattttgattactgattgtcattctgccaccctggagtatataatttttaattatctgattactgttattcttccatagtaggggaggtgatatccatttgcctgatacatagtatgtgttcaatacacatttgctaaagaataaatgaatcaataatacctaacatctctaatttgcagtcattcccaagagtaattattaaatatgtggcaaatttctttgcctttttacttttaaaaatctaattttgacataactgctgtaaccatccagaaacggcattgatgttgcttcacgttgctgatgcttaagcaatgtatattgtgtaatatacaatgtagtcttcaaactaatttcaacttctgcctttctgtgtactcccttatcccactgggtgatattatttggcatggtcattgtcattaaaatcatacaggatagtaattcctttccatctgctaccatgcctagccttatttaatttttcagattttctgttctattgaaggtaattgattttttctttttttttaatgcttgaaataaagcgttgaa

SEQ ID NO: 2631 - DNA, 6110 bp, Homo sapiens
tttgaacttctcccctaaaattcctctggcttctcattaaagccgctttcggagatataagtaaagaaagtcaaacaaaagactttgtagcatgttttgtttaacatgttttgtttagcactgtttttcttgagctatatatgataaatatctagggagaggtggcagaaggacaaaattgtagtagtttgaggtttcttgggggaaagttgaagcattaaaacatgttagcatccttatatgaacttttaactatggaaggaagagtcagtattccctttcaggcagctgtttatctggcttagactgcctcaaggctgtgtattgcccttcagcttttcttatgcattagaaagagatctagatgcatttgcctttagcagtgtagttctgaatacattgatgaccacccactgtgctgggacatgcaagaggtatgtaccataaactctttagtcctgctaatgtcctcgacagaggacataaaacctcctaagaaaagctttgtctctttccagccaaggttaactatttgtaacatgtcatctttcaaggaagcatctaaccaagattaagtcaaaggcatctaccaggtcctgaattctctcccagatgcacaccttttaaggtacaatcaggtaccatatgtaatctgtagctatttaaccatcgttaaagcatttaggactttgatttcctagaagaagtcatggtctgcaaaataattgtattaaaaggtataaaacctgatcaggaaaaagaggtttagggccaaactatacaactttgtaactagaccaataacacaaaataatagtgttttaaaatgtacccaggatttattttaatcagatatggtaagatatgcagatgtgaaaatgattgtcatgaaagaagaaatttttatactcatggatccctagaaacaggaagcatggcaccttacaccatgcaagggtgccatacctagaagcagcagggtcaatggggagaggaagtacaaggaaactgcaggaaagcctttatttggttttctgaggaaggaatgggcaaaactggataagcaggcttgaacaggtttaaaattggctagttgaaataattttggccgacttcgggcgtaggggatatccctagttgcctggtagctggtctggagtgattaggatagggcaatattggccaggagtataagaacccaagatgtctgtgttgggagttgggggattctggattggttagtttgcataggaattagctaaccctgggagaggtagtacctctccagtcatcaaggacccacctagataccaaatgattaacaatacaaaaataagaaagtacaattaatacaaacagtcataataaagatacagtattaacacagttaagacgtggaaattttaataaataaacactacagtaaatgtaggactgcacccctcccaaaaaatttgagataatttgatggaaaggtgtgtaaggaagggttgaaactactgttatggtcataagactgaaatatactatgatccaagagagcagtgcagcactaccaaggcaggcatgaccaagataggtgcggccaagcaaaaaggaagtatgtatggtgaataagctatactccttcatggcttgctgtattctgttttgttaatatactttccaagtcctgatgccaacttctgggttttactgtcactatttttctatttactaatctcagttgaagtggtttgccttacagaaataggcctaagccaatataagatagtgataaagagagctatagactgtttgcctcaccatctatgatcttggatatcataaaggcccccatagctggcagtaatactactttgtactgtgatgctttaatgtcttatctctggtcttattcccaggtcaaggatgcattccaggaaagttctataaaaatataccatcaactccaacctgatatttgacctagccatggaaaacctcattggctcctcactggatcagaccataaaaatgatccaggaatgaaaatctaagataaattcccaccacttcaagatgttcttatacaagtcaacagtctagcagatcagccagtctctttcatcatcaagcagacatactcaaggtaccaacacagcaaaggcacaaaatgtctctatatcagtatttttcatggtatatgtgagacccattagtgaggcatgaaatcaattctgtgagtcacaatgaacatttgtctaaaaaacaaaataaaatgtaaaataccaaagtgttttgcatgaatcctttgcctgaattgtgcacattgcaaggaatgctgaggtcaatttcaatatgcgagaggggtatttgatggaggagatatgatgaatagaatgtatattggctaagaaatggttttcagtcattgattcctgggtgtcttgcttgattttcataatagcacggttaatgttctatagtcaagttttatattacaattacttgcaactagttgtgaagtctgaaatattcgattcaattgcaaactttgagtgtagtttttgaaaagatgttatttagactgtatatttttttcttcttttttgagttagtgccaattataacattttaatcaaactggaacaaattgctattaaaatggatcatttctttattaaaagaaagaggaatagtgaagtgaaatatacagaagcatgttcaagttcatctgttgaatctggaattgtgaatagtgacaatattgagaaaaatactgactccaatctgcaaacttcaacttcatttgagccacatttcaaaaagaaaaaagtaagtgcaagacgttataatgaagattacttaaaatatggctttatcaaatgtgaaaaaccctttgaaaatgacagacctcagtgtgttatttgtaataatattcttgcgaatgaaagcttaaaaccttcgaaattaaaaaggcacttagaaactcagcatgctgaacttattgataagcctcttgaatattttcaaagaaagaaaaaagacataaagttatcaacacaatttcttagttgttctactgctgttagtgagaaagccttattatcatcatatttagttgcatatcgtgtggcaaaagagaaaatagctaacacagctgctgaaaaaattattcttccagcatgtttggatatggtgcgtacaatatttgatgataaatcagctgataaattaaaaactatacctaatgataacacagtatctcttcgaatttgtactattgcagaacatttagaaacaatgcttattactcgtttacagtctggtatagattttgcaatccagcttgatgaaagcactgatattggaagctgcacaacacttttagtttatgtcagatatgcgtggcaagatgattttttggaggattttttgtgttttttaaatttaacctcacacctaagtggattagatatttttacagaattagaaaggcgcatagttggccaatataaattaaactggaaaaactgtaaaggaattacaagtgatggcacagcaaccatgactggaaaacatagcagagtaattaaaaaattactagaagttactaataatggtgctgtgtggaatcattgttttatacatcgtgaaggtttagcatccagagaaattccacagaatctcatggaagtattgaaaaatgcagtgaaagttgttaattttattaaaggaagctcattgaatagccggcttcttgaaacattttgttcagagattggaactaatcatacccacttactatatcataccaaaattcgttggttgtctcaagggaaaatactaagcagggtttatgagctcaggaatgagattcacttttttctcattgaaaaaaaatctcatttggcaagtatttttgaagatgatacttgggtaacaaaattggcatatttaactgatatttttagcattcttaatgaactgagtttaaaactacaggggaaaaacagtgatgtattccaacatgttgaacgtatccagggatttcgaaagacattattgttatggcaagtaagacttaaaagtaatcgtcctagctattacatgtttccaagatttttgcagcatattgaagagaatattattaatgaaaacattttgaaagaaataaaattagagatattgttgcatctcacttctctgtctcaaacttttaaccatttctttccagaagaaaaatttgaaacattaagggaaaacagttgggtaaaagatccatttgcttttcgaaaccctgaatcaataattgagctaaacttggtgcctgaagaagagaatgaattattgcagcttagttcttcatatacattgaagaatgattatgaaaccttaagtttatcagcattttggatgaaggtaaaggaagactttccattgttaagtagaaagagtgtcctgctattgctaccattcacaacaactagtttgtgtgaactagggttttccatcttaacgcagttaaaaacaaaggaaagaaatgggctgaattgtgcagcagttatgcgggtagcattatcttcctgtgttccagactggaatgaacttatgaacaggcaagcacacccatcatagtaaataaaaatcttacctagcttttgtctttgtatttcttattttgtagtatttttctatgttatatttaaatggtactataatactgtgatacttttgttatgttttaatttttgttatatttaataaaattattttatgttcattgaacaaaaatttaatgaatttctgttagaggccaggaactattctagagacatttgggatacaaaagtgaacaaaacaggtaattccctagtagagtttatatcctggcaaggagaaattgacaataaacctaataaataaggtttataatatttagaagctattaagtgctatggaaagagtagtaagaaggaaggtcagggaagtactggggaaccaaaccatgaagggttctgtagaccattattgggcctctggcttttgtcagtggactagagaacagttgaagggtttaagcgaaggagagaaatgatctgagctaggttttaaaagacactctggtcactattttaaattcttagggtaagtctgaattaaatgttactttcccctcactgggcatggtggctcagacctgtaatccccgcactttggcaggccatggcagaaggctctgttgagcccaggagttcaagaccatcctgggcaacatagtgagaccttatttctactaaaaatattttaaaaataagtcaggtgtggtggtgcacacctatagtcccagctactcaggaggctgtggcaggagggtcgcttgacctcaggagtttgaagttgcagtcatctatgattgcaccactgcagtccagcctgagcaacagagtgaaaccctgtctcgagaaaattaaatgttacttccctaaaaaaaccttttctaaccaccctagggtaaatcctccattattcctttatttctttgttttccttgtagtatataatttgtaataattttgattactgattgtcattctgccaccctggagtatataatttttaattatctgattactgttattcttccatagtaggggaggtgatatccatttgcctgatacatagtatgtgttcaatacacatttgctaaagaataaatgaatcaataatacctaacatctctaatttgcagtcattcccaagagtaattattaaatatgtggcaaatttctttgcctttttacttttaaaaatctaattttgacataactgctgtaaccatccagaaacggcattgatgttgcttcacgttgctgatgcttaagcaatgtatattgtgtaatatacaatgtagtcttcaaactaatttcaacttctgcctttctgtgtactcccttatcccactgggtgatattatttggcatggtcattgtcattaaaatcatacaggatagtaattcctttccatctgctaccatgcctagccttatttaatttttcagattttctgttctattgaaggtaattgattttttctttttttttaatgcttgaaataaagcgttgaa

SEQ ID NO: 2632 - DNA, 4483 bp, Homo sapiens
ttgcggagggaagtgtggggagagcagaggcgcagctctgctggagagacctgaggcttgcagcgctgggcccggccgggtcgctgcggctgggctggaggtgaggcgaaagaagggcatcctctgatgggagtggaccggagtccgctaaagcgaagcattccaggccaaggttaactatttgtaacatgtcatctttcaaggaagcatctaaccaagattaagtcaaaggcatctaccaggtcctgaattctctcccagatgcacaccttttaaggtcaaggatgcattccaggaaagttctataaaaatataccatcaactccaacctgatatttgacctagccatggaaaacctcattggctcctcactggatcagaccataaaaatgatccaggaatgaaaatctaagataaattcccaccacttcaagatgttcttatacaagtcaacagtctagcagatcagccagtctctttcatcatcaagcagacatactcaaggtaccaacacagcaaaggcacaaaatgtctctatatcagtatttttcatggtatatgtgagacccattagtgaggcatgaaatcaattctgtgagtcacaatgaacatttgtctaaaaaacaaaataaaatgtaaaataccaaagtgttttgcatgaatcctttgcctgaattgtgcacattgcaaggaatgctgaggtcaatttcaatatgcgagaggggtatttgatggaggagatatgatgaatagaatgtatattggctaagaaatggttttcagtcattgattcctgggtgtcttgcttgattttcataatagcacggttaatgttctatagtcaagttttatattacaattacttgcaactagttgtgaagtctgaaatattcgattcaattgcaaactttgagtgtagtttttgaaaagatgttatttagactgtatatttttttcttcttttttgagttagtgccaattataacattttaatcaaactggaacaaattgctattaaaatggatcatttctttattaaaagaaagaggaatagtgaagtgaaatatacagaagcatgttcaagttcatctgttgaatctggaattgtgaatagtgacaatattgagaaaaatactgactccaatctgcaaacttcaacttcatttgagccacatttcaaaaagaaaaaagtaagtgcaagacgttataatgaagattacttaaaatatggctttatcaaatgtgaaaaaccctttgaaaatgacagacctcagtgtgttatttgtaataatattcttgcgaatgaaagcttaaaaccttcgaaattaaaaaggcacttagaaactcagcatgctgaacttattgataagcctcttgaatattttcaaagaaagaaaaaagacataaagttatcaacacaatttcttagttgttctactgctgttagtgagaaagccttattatcatcatatttagttgcatatcgtgtggcaaaagagaaaatagctaacacagctgctgaaaaaattattcttccagcatgtttggatatggtgcgtacaatatttgatgataaatcagctgataaattaaaaactatacctaatgataacacagtatctcttcgaatttgtactattgcagaacatttagaaacaatgcttattactcgtttacagtctggtatagattttgcaatccagcttgatgaaagcactgatattggaagctgcacaacacttttagtttatgtcagatatgcgtggcaagatgattttttggaggattttttgtgttttttaaatttaacctcacacctaagtggattagatatttttacagaattagaaaggcgcatagttggccaatataaattaaactggaaaaactgtaaaggaattacaagtgatggcacagcaaccatgactggaaaacatagcagagtaattaaaaaattactagaagttactaataatggtgctgtgtggaatcattgttttatacatcgtgaaggtttagcatccagagaaattccacagaatctcatggaagtattgaaaaatgcagtgaaagttgttaattttattaaaggaagctcattgaatagccggcttcttgaaacattttgttcagagattggaactaatcatacccacttactatatcataccaaaattcgttggttgtctcaagggaaaatactaagcagggtttatgagctcaggaatgagattcacttttttctcattgaaaaaaaatctcatttggcaagtatttttgaagatgatacttgggtaacaaaattggcatatttaactgatatttttagcattcttaatgaactgagtttaaaactacaggggaaaaacagtgatgtattccaacatgttgaacgtatccagggatttcgaaagacattattgttatggcaagtaagacttaaaagtaatcgtcctagctattacatgtttccaagatttttgcagcatattgaagagaatattattaatgaaaacattttgaaagaaataaaattagagatattgttgcatctcacttctctgtctcaaacttttaaccatttctttccagaagaaaaatttgaaacattaagggaaaacagttgggtaaaagatccatttgcttttcgaaaccctgaatcaataattgagctaaacttggtgcctgaagaagagaatgaattattgcagcttagttcttcatatacattgaagaatgattatgaaaccttaagtttatcagcattttggatgaaggtaaaggaagactttccattgttaagtagaaagagtgtcctgctattgctaccattcacaacaactagtttgtgtgaactagggttttccatcttaacgcagttaaaaacaaaggaaagaaatgggctgaattgtgcagcagttatgcgggtagcattatcttcctgtgttccagactggaatgaacttatgaacaggcaagcacacccatcatagtaaataaaaatcttacctagcttttgtctttgtatttcttattttgtagtatttttctatgttatatttaaatggtactataatactgtgatacttttgttatgttttaatttttgttatatttaataaaattattttatgttcattgaacaaaaatttaatgaatttctgttagaggccaggaactattctagagacatttgggatacaaaagtgaacaaaacaggtaattccctagtagagtttatatcctggcaaggagaaattgacaataaacctaataaataaggtttataatatttagaagctattaagtgctatggaaagagtagtaagaaggaaggtcagggaagtactggggaaccaaaccatgaagggttctgtagaccattattgggcctctggcttttgtcagtggactagagaacagttgaagggtttaagcgaaggagagaaatgatctgagctaggttttaaaagacactctggtcactattttaaattcttagggtaagtctgaattaaatgttactttcccctcactgggcatggtggctcagacctgtaatccccgcactttggcaggccatggcagaaggctctgttgagcccaggagttcaagaccatcctgggcaacatagtgagaccttatttctactaaaaatattttaaaaataagtcaggtgtggtggtgcacacctatagtcccagctactcaggaggctgtggcaggagggtcgcttgacctcaggagtttgaagttgcagtcatctatgattgcaccactgcagtccagcctgagcaacagagtgaaaccctgtctcgagaaaattaaatgttacttccctaaaaaaaccttttctaaccaccctagggtaaatcctccattattcctttatttctttgttttccttgtagtatataatttgtaataattttgattactgattgtcattctgccaccctggagtatataatttttaattatctgattactgttattcttccatagtaggggaggtgatatccatttgcctgatacatagtatgtgttcaatacacatttgctaaagaataaatgaatcaataatacctaacatctctaatttgcagtcattcccaagagtaattattaaatatgtggcaaatttctttgcctttttacttttaaaaatctaattttgacataactgctgtaaccatccagaaacggcattgatgttgcttcacgttgctgatgcttaagcaatgtatattgtgtaatatacaatgtagtcttcaaactaatttcaacttctgcctttctgtgtactcccttatcccactgggtgatattatttggcatggtcattgtcattaaaatcatacaggatagtaattcctttccatctgctaccatgcctagccttatttaatttttcagattttctgttctattgaaggtaattgattttttctttttttttaatgcttgaaataaagcgttgaa

SEQ ID NO: 2633 - DNA, 3900 bp, Homo sapiens
ccggaagtggtgttgcggagggaagtgtggggagagcagaggcgcagctctgctggagagacctgaggcttgcagcgctgggcccggccgggtcgctgcggctgggctggaggtgaggcgaaagaagggcatcctctgatgggagtggaccggagtccgctaaagcgaagcattccagggttcgttgcgggaaatacagtctggttttgccccccgtatgaattgagggaaggtcaaggatgcattccaggaaagttctataaaaatataccatcaactccaacctgatatttgacctagccatggaaaacctcattggctcctcactggatcagaccataaaaatgatccaggaatgaaaatctaagataaattcccaccacttcaagatgttcttatacaagtcaacagtctagcagatcagccagtctctttcatcatcaagcagacatactcaagaaagaggaatagtgaagtgaaatatacagaagcatgttcaagttcatctgttgaatctggaattgtgaatagtgacaatattgagaaaaatactgactccaatctgcaaacttcaacttcatttgagccacatttcaaaaagaaaaaagtaagtgcaagacgttataatgaagattacttaaaatatggctttatcaaatgtgaaaaaccctttgaaaatgacagacctcagtgtgttatttgtaataatattcttgcgaatgaaagcttaaaaccttcgaaattaaaaaggcacttagaaactcagcatgctgaacttattgataagcctcttgaatattttcaaagaaagaaaaaagacataaagttatcaacacaatttcttagttgttctactgctgttagtgagaaagccttattatcatcatatttagttgcatatcgtgtggcaaaagagaaaatagctaacacagctgctgaaaaaattattcttccagcatgtttggatatggtgcgtacaatatttgatgataaatcagctgataaattaaaaactatacctaatgataacacagtatctcttcgaatttgtactattgcagaacatttagaaacaatgcttattactcgtttacagtctggtatagattttgcaatccagcttgatgaaagcactgatattggaagctgcacaacacttttagtttatgtcagatatgcgtggcaagatgattttttggaggattttttgtgttttttaaatttaacctcacacctaagtggattagatatttttacagaattagaaaggcgcatagttggccaatataaattaaactggaaaaactgtaaaggaattacaagtgatggcacagcaaccatgactggaaaacatagcagagtaattaaaaaattactagaagttactaataatggtgctgtgtggaatcattgttttatacatcgtgaaggtttagcatccagagaaattccacagaatctcatggaagtattgaaaaatgcagtgaaagttgttaattttattaaaggaagctcattgaatagccggcttcttgaaacattttgttcagagattggaactaatcatacccacttactatatcataccaaaattcgttggttgtctcaagggaaaatactaagcagggtttatgagctcaggaatgagattcacttttttctcattgaaaaaaaatctcatttggcaagtatttttgaagatgatacttgggtaacaaaattggcatatttaactgatatttttagcattcttaatgaactgagtttaaaactacaggggaaaaacagtgatgtattccaacatgttgaacgtatccagggatttcgaaagacattattgttatggcaagtaagacttaaaagtaatcgtcctagctattacatgtttccaagatttttgcagcatattgaagagaatattattaatgaaaacattttgaaagaaataaaattagagatattgttgcatctcacttctctgtctcaaacttttaaccatttctttccagaagaaaaatttgaaacattaagggaaaacagttgggtaaaagatccatttgcttttcgaaaccctgaatcaataattgagctaaacttggtgcctgaagaagagaatgaattattgcagcttagttcttcatatacattgaagaatgattatgaaaccttaagtttatcagcattttggatgaaggtaaaggaagactttccattgttaagtagaaagagtgtcctgctattgctaccattcacaacaactagtttgtgtgaactagggttttccatcttaacgcagttaaaaacaaaggaaagaaatgggctgaattgtgcagcagttatgcgggtagcattatcttcctgtgttccagactggaatgaacttatgaacaggcaagcacacccatcatagtaaataaaaatcttacctagcttttgtctttgtatttcttattttgtagtatttttctatgttatatttaaatggtactataatactgtgatacttttgttatgttttaatttttgttatatttaataaaattattttatgttcattgaacaaaaatttaatgaatttctgttagaggccaggaactattctagagacatttgggatacaaaagtgaacaaaacaggtaattccctagtagagtttatatcctggcaaggagaaattgacaataaacctaataaataaggtttataatatttagaagctattaagtgctatggaaagagtagtaagaaggaaggtcagggaagtactggggaaccaaaccatgaagggttctgtagaccattattgggcctctggcttttgtcagtggactagagaacagttgaagggtttaagcgaaggagagaaatgatctgagctaggttttaaaagacactctggtcactattttaaattcttagggtaagtctgaattaaatgttactttcccctcactgggcatggtggctcagacctgtaatccccgcactttggcaggccatggcagaaggctctgttgagcccaggagttcaagaccatcctgggcaacatagtgagaccttatttctactaaaaatattttaaaaataagtcaggtgtggtggtgcacacctatagtcccagctactcaggaggctgtggcaggagggtcgcttgacctcaggagtttgaagttgcagtcatctatgattgcaccactgcagtccagcctgagcaacagagtgaaaccctgtctcgagaaaattaaatgttacttccctaaaaaaaccttttctaaccaccctagggtaaatcctccattattcctttatttctttgttttccttgtagtatataatttgtaataattttgattactgattgtcattctgccaccctggagtatataatttttaattatctgattactgttattcttccatagtaggggaggtgatatccatttgcctgatacatagtatgtgttcaatacacatttgctaaagaataaatgaatcaataatacctaacatctctaatttgcagtcattcccaagagtaattattaaatatgtggcaaatttctttgcctttttacttttaaaaatctaattttgacataactgctgtaaccatccagaaacggcattgatgttgcttcacgttgctgatgcttaagcaatgtatattgtgtaatatacaatgtagtcttcaaactaatttcaacttctgcctttctgtgtactcccttatcccactgggtgatattatttggcatggtcattgtcattaaaatcatacaggatagtaattcctttccatctgctaccatgcctagccttatttaatttttcagattttctgttctattgaaggtaattgattttttctttttttttaatgcttgaaataaagcgttgaa

SEQ ID NO: 2634 - DNA, 3880 bp, Homo sapiens
gctggaatggggaatttgtgaggtaggccggaagtggtgttgcggagggaagtgtggggagagcagaggcgcagctctgctggagagacctgaggcttgcagcgctgggcccggccgggtcgctgcggctgggctggaggtcaaggatgcattccaggaaagttctataaaaatataccatcaactccaacctgatatttgacctagccatggaaaacctcattggctcctcactggatcagaccataaaaatgatccaggaatgaaaatctaagataaattcccaccacttcaagatgttcttatacaagtcaacagtctagcagatcagccagtctctttcatcatcaagcagacatactcaagttagtgccaattataacattttaatcaaactggaacaaattgctattaaaatggatcatttctttattaaaagaaagaggaatagtgaagtgaaatatacagaagcatgttcaagttcatctgttgaatctggaattgtgaatagtgacaatattgagaaaaatactgactccaatctgcaaacttcaacttcatttgagccacatttcaaaaagaaaaaagtaagtgcaagacgttataatgaagattacttaaaatatggctttatcaaatgtgaaaaaccctttgaaaatgacagacctcagtgtgttatttgtaataatattcttgcgaatgaaagcttaaaaccttcgaaattaaaaaggcacttagaaactcagcatgctgaacttattgataagcctcttgaatattttcaaagaaagaaaaaagacataaagttatcaacacaatttcttagttgttctactgctgttagtgagaaagccttattatcatcatatttagttgcatatcgtgtggcaaaagagaaaatagctaacacagctgctgaaaaaattattcttccagcatgtttggatatggtgcgtacaatatttgatgataaatcagctgataaattaaaaactatacctaatgataacacagtatctcttcgaatttgtactattgcagaacatttagaaacaatgcttattactcgtttacagtctggtatagattttgcaatccagcttgatgaaagcactgatattggaagctgcacaacacttttagtttatgtcagatatgcgtggcaagatgattttttggaggattttttgtgttttttaaatttaacctcacacctaagtggattagatatttttacagaattagaaaggcgcatagttggccaatataaattaaactggaaaaactgtaaaggaattacaagtgatggcacagcaaccatgactggaaaacatagcagagtaattaaaaaattactagaagttactaataatggtgctgtgtggaatcattgttttatacatcgtgaaggtttagcatccagagaaattccacagaatctcatggaagtattgaaaaatgcagtgaaagttgttaattttattaaaggaagctcattgaatagccggcttcttgaaacattttgttcagagattggaactaatcatacccacttactatatcataccaaaattcgttggttgtctcaagggaaaatactaagcagggtttatgagctcaggaatgagattcacttttttctcattgaaaaaaaatctcatttggcaagtatttttgaagatgatacttgggtaacaaaattggcatatttaactgatatttttagcattcttaatgaactgagtttaaaactacaggggaaaaacagtgatgtattccaacatgttgaacgtatccagggatttcgaaagacattattgttatggcaagtaagacttaaaagtaatcgtcctagctattacatgtttccaagatttttgcagcatattgaagagaatattattaatgaaaacattttgaaagaaataaaattagagatattgttgcatctcacttctctgtctcaaacttttaaccatttctttccagaagaaaaatttgaaacattaagggaaaacagttgggtaaaagatccatttgcttttcgaaaccctgaatcaataattgagctaaacttggtgcctgaagaagagaatgaattattgcagcttagttcttcatatacattgaagaatgattatgaaaccttaagtttatcagcattttggatgaaggtaaaggaagactttccattgttaagtagaaagagtgtcctgctattgctaccattcacaacaactagtttgtgtgaactagggttttccatcttaacgcagttaaaaacaaaggaaagaaatgggctgaattgtgcagcagttatgcgggtagcattatcttcctgtgttccagactggaatgaacttatgaacaggcaagcacacccatcatagtaaataaaaatcttacctagcttttgtctttgtatttcttattttgtagtatttttctatgttatatttaaatggtactataatactgtgatacttttgttatgttttaatttttgttatatttaataaaattattttatgttcattgaacaaaaatttaatgaatttctgttagaggccaggaactattctagagacatttgggatacaaaagtgaacaaaacaggtaattccctagtagagtttatatcctggcaaggagaaattgacaataaacctaataaataaggtttataatatttagaagctattaagtgctatggaaagagtagtaagaaggaaggtcagggaagtactggggaaccaaaccatgaagggttctgtagaccattattgggcctctggcttttgtcagtggactagagaacagttgaagggtttaagcgaaggagagaaatgatctgagctaggttttaaaagacactctggtcactattttaaattcttagggtaagtctgaattaaatgttactttcccctcactgggcatggtggctcagacctgtaatccccgcactttggcaggccatggcagaaggctctgttgagcccaggagttcaagaccatcctgggcaacatagtgagaccttatttctactaaaaatattttaaaaataagtcaggtgtggtggtgcacacctatagtcccagctactcaggaggctgtggcaggagggtcgcttgacctcaggagtttgaagttgcagtcatctatgattgcaccactgcagtccagcctgagcaacagagtgaaaccctgtctcgagaaaattaaatgttacttccctaaaaaaaccttttctaaccaccctagggtaaatcctccattattcctttatttctttgttttccttgtagtatataatttgtaataattttgattactgattgtcattctgccaccctggagtatataatttttaattatctgattactgttattcttccatagtaggggaggtgatatccatttgcctgatacatagtatgtgttcaatacacatttgctaaagaataaatgaatcaataatacctaacatctctaatttgcagtcattcccaagagtaattattaaatatgtggcaaatttctttgcctttttacttttaaaaatctaattttgacataactgctgtaaccatccagaaacggcattgatgttgcttcacgttgctgatgcttaagcaatgtatattgtgtaatatacaatgtagtcttcaaactaatttcaacttctgcctttctgtgtactcccttatcccactgggtgatattatttggcatggtcattgtcattaaaatcatacaggatagtaattcctttccatctgctaccatgcctagccttatttaatttttcagattttctgttctattgaaggtaattgattttttctttttttttaatgcttgaaataaagcgttgaa

SEQ ID NO: 2635 - DNA, 4356 bp, Homo sapiens
gggagagcagaggcgcagctctgctggagagacctgaggcttgcagcgctgggcccggccgggtcgctgcggctgggctggaggtgaggcgaaagaagggcatcctctgatgggagtggaccggagtccgctaaagcgaagcattccagggtcaaggatgcattccaggaaagttctataaaaatataccatcaactccaacctgatatttgacctagccatggaaaacctcattggctcctcactggatcagaccataaaaatgatccaggaatgaaaatctaagataaattcccaccacttcaagatgttcttatacaagtcaacagtctagcagatcagccagtctctttcatcatcaagcagacatactcaaggtaccaacacagcaaaggcacaaaatgtctctatatcagtatttttcatggtatatgtgagacccattagtgaggcatgaaatcaattctgtgagtcacaatgaacatttgtctaaaaaacaaaataaaatgtaaaataccaaagtgttttgcatgaatcctttgcctgaattgtgcacattgcaaggaatgctgaggtcaatttcaatatgcgagaggggtatttgatggaggagatatgatgaatagaatgtatattggctaagaaatggttttcagtcattgattcctgggtgtcttgcttgattttcataatagcacggttaatgttctatagtcaagttttatattacaattacttgcaactagttgtgaagtctgaaatattcgattcaattgcaaactttgagtgtagtttttgaaaagatgttatttagactgtatatttttttcttcttttttgagttagtgccaattataacattttaatcaaactggaacaaattgctattaaaatggatcatttctttattaaaagaaagaggaatagtgaagtgaaatatacagaagcatgttcaagttcatctgttgaatctggaattgtgaatagtgacaatattgagaaaaatactgactccaatctgcaaacttcaacttcatttgagccacatttcaaaaagaaaaaagtaagtgcaagacgttataatgaagattacttaaaatatggctttatcaaatgtgaaaaaccctttgaaaatgacagacctcagtgtgttatttgtaataatattcttgcgaatgaaagcttaaaaccttcgaaattaaaaaggcacttagaaactcagcatgctgaacttattgataagcctcttgaatattttcaaagaaagaaaaaagacataaagttatcaacacaatttcttagttgttctactgctgttagtgagaaagccttattatcatcatatttagttgcatatcgtgtggcaaaagagaaaatagctaacacagctgctgaaaaaattattcttccagcatgtttggatatggtgcgtacaatatttgatgataaatcagctgataaattaaaaactatacctaatgataacacagtatctcttcgaatttgtactattgcagaacatttagaaacaatgcttattactcgtttacagtctggtatagattttgcaatccagcttgatgaaagcactgatattggaagctgcacaacacttttagtttatgtcagatatgcgtggcaagatgattttttggaggattttttgtgttttttaaatttaacctcacacctaagtggattagatatttttacagaattagaaaggcgcatagttggccaatataaattaaactggaaaaactgtaaaggaattacaagtgatggcacagcaaccatgactggaaaacatagcagagtaattaaaaaattactagaagttactaataatggtgctgtgtggaatcattgttttatacatcgtgaaggtttagcatccagagaaattccacagaatctcatggaagtattgaaaaatgcagtgaaagttgttaattttattaaaggaagctcattgaatagccggcttcttgaaacattttgttcagagattggaactaatcatacccacttactatatcataccaaaattcgttggttgtctcaagggaaaatactaagcagggtttatgagctcaggaatgagattcacttttttctcattgaaaaaaaatctcatttggcaagtatttttgaagatgatacttgggtaacaaaattggcatatttaactgatatttttagcattcttaatgaactgagtttaaaactacaggggaaaaacagtgatgtattccaacatgttgaacgtatccagggatttcgaaagacattattgttatggcaagtaagacttaaaagtaatcgtcctagctattacatgtttccaagatttttgcagcatattgaagagaatattattaatgaaaacattttgaaagaaataaaattagagatattgttgcatctcacttctctgtctcaaacttttaaccatttctttccagaagaaaaatttgaaacattaagggaaaacagttgggtaaaagatccatttgcttttcgaaaccctgaatcaataattgagctaaacttggtgcctgaagaagagaatgaattattgcagcttagttcttcatatacattgaagaatgattatgaaaccttaagtttatcagcattttggatgaaggtaaaggaagactttccattgttaagtagaaagagtgtcctgctattgctaccattcacaacaactagtttgtgtgaactagggttttccatcttaacgcagttaaaaacaaaggaaagaaatgggctgaattgtgcagcagttatgcgggtagcattatcttcctgtgttccagactggaatgaacttatgaacaggcaagcacacccatcatagtaaataaaaatcttacctagcttttgtctttgtatttcttattttgtagtatttttctatgttatatttaaatggtactataatactgtgatacttttgttatgttttaatttttgttatatttaataaaattattttatgttcattgaacaaaaatttaatgaatttctgttagaggccaggaactattctagagacatttgggatacaaaagtgaacaaaacaggtaattccctagtagagtttatatcctggcaaggagaaattgacaataaacctaataaataaggtttataatatttagaagctattaagtgctatggaaagagtagtaagaaggaaggtcagggaagtactggggaaccaaaccatgaagggttctgtagaccattattgggcctctggcttttgtcagtggactagagaacagttgaagggtttaagcgaaggagagaaatgatctgagctaggttttaaaagacactctggtcactattttaaattcttagggtaagtctgaattaaatgttactttcccctcactgggcatggtggctcagacctgtaatccccgcactttggcaggccatggcagaaggctctgttgagcccaggagttcaagaccatcctgggcaacatagtgagaccttatttctactaaaaatattttaaaaataagtcaggtgtggtggtgcacacctatagtcccagctactcaggaggctgtggcaggagggtcgcttgacctcaggagtttgaagttgcagtcatctatgattgcaccactgcagtccagcctgagcaacagagtgaaaccctgtctcgagaaaattaaatgttacttccctaaaaaaaccttttctaaccaccctagggtaaatcctccattattcctttatttctttgttttccttgtagtatataatttgtaataattttgattactgattgtcattctgccaccctggagtatataatttttaattatctgattactgttattcttccatagtaggggaggtgatatccatttgcctgatacatagtatgtgttcaatacacatttgctaaagaataaatgaatcaataatacctaacatctctaatttgcagtcattcccaagagtaattattaaatatgtggcaaatttctttgcctttttacttttaaaaatctaattttgacataactgctgtaaccatccagaaacggcattgatgttgcttcacgttgctgatgcttaagcaatgtatattgtgtaatatacaatgtagtcttcaaactaatttcaacttctgcctttctgtgtactcccttatcccactgggtgatattatttggcatggtcattgtcattaaaatcatacaggatagtaattcctttccatctgctaccatgcctagccttatttaatttttcagattttctgttctattgaaggtaattgattttttctttttttttaatgcttgaaataaagcgttgaa

SEQ ID NO: 2636 - DNA, 4438 bp, Homo sapiens
ccggaagtggtgttgcggagggaagtgtggggagagcagaggcgcagctctgctggagagacctgaggcttgcagcgctgggcccggccgggtcgctgcggctgggctggaggtgaggcgaaagaagggcatcctctgatgggagtggaccggagtccgctaaagcgaagcattccagggttcgttgcgggaaatacagtctggttttgccccccgtatgaattgagggaaggtcaaggatgcattccaggaaagttctataaaaatataccatcaactccaacctgatatttgacctagccatggaaaacctcattggctcctcactggatcagaccataaaaatgatccaggaatgaaaatctaagataaattcccaccacttcaagatgttcttatacaagtcaacagtctagcagatcagccagtctctttcatcatcaagcagacatactcaaggtaccaacacagcaaaggcacaaaatgtctctatatcagtatttttcatggtatatgtgagacccattagtgaggcatgaaatcaattctgtgagtcacaatgaacatttgtctaaaaaacaaaataaaatgtaaaataccaaagtgttttgcatgaatcctttgcctgaattgtgcacattgcaaggaatgctgaggtcaatttcaatatgcgagaggggtatttgatggaggagatatgatgaatagaatgtatattggctaagaaatggttttcagtcattgattcctgggtgtcttgcttgattttcataatagcacggttaatgttctatagtcaagttttatattacaattacttgcaactagttgtgaagtctgaaatattcgattcaattgcaaactttgagtgtagtttttgaaaagatgttatttagactgtatatttttttcttcttttttgagttagtgccaattataacattttaatcaaactggaacaaattgctattaaaatggatcatttctttattaaaagaaagaggaatagtgaagtgaaatatacagaagcatgttcaagttcatctgttgaatctggaattgtgaatagtgacaatattgagaaaaatactgactccaatctgcaaacttcaacttcatttgagccacatttcaaaaagaaaaaagtaagtgcaagacgttataatgaagattacttaaaatatggctttatcaaatgtgaaaaaccctttgaaaatgacagacctcagtgtgttatttgtaataatattcttgcgaatgaaagcttaaaaccttcgaaattaaaaaggcacttagaaactcagcatgctgaacttattgataagcctcttgaatattttcaaagaaagaaaaaagacataaagttatcaacacaatttcttagttgttctactgctgttagtgagaaagccttattatcatcatatttagttgcatatcgtgtggcaaaagagaaaatagctaacacagctgctgaaaaaattattcttccagcatgtttggatatggtgcgtacaatatttgatgataaatcagctgataaattaaaaactatacctaatgataacacagtatctcttcgaatttgtactattgcagaacatttagaaacaatgcttattactcgtttacagtctggtatagattttgcaatccagcttgatgaaagcactgatattggaagctgcacaacacttttagtttatgtcagatatgcgtggcaagatgattttttggaggattttttgtgttttttaaatttaacctcacacctaagtggattagatatttttacagaattagaaaggcgcatagttggccaatataaattaaactggaaaaactgtaaaggaattacaagtgatggcacagcaaccatgactggaaaacatagcagagtaattaaaaaattactagaagttactaataatggtgctgtgtggaatcattgttttatacatcgtgaaggtttagcatccagagaaattccacagaatctcatggaagtattgaaaaatgcagtgaaagttgttaattttattaaaggaagctcattgaatagccggcttcttgaaacattttgttcagagattggaactaatcatacccacttactatatcataccaaaattcgttggttgtctcaagggaaaatactaagcagggtttatgagctcaggaatgagattcacttttttctcattgaaaaaaaatctcatttggcaagtatttttgaagatgatacttgggtaacaaaattggcatatttaactgatatttttagcattcttaatgaactgagtttaaaactacaggggaaaaacagtgatgtattccaacatgttgaacgtatccagggatttcgaaagacattattgttatggcaagtaagacttaaaagtaatcgtcctagctattacatgtttccaagatttttgcagcatattgaagagaatattattaatgaaaacattttgaaagaaataaaattagagatattgttgcatctcacttctctgtctcaaacttttaaccatttctttccagaagaaaaatttgaaacattaagggaaaacagttgggtaaaagatccatttgcttttcgaaaccctgaatcaataattgagctaaacttggtgcctgaagaagagaatgaattattgcagcttagttcttcatatacattgaagaatgattatgaaaccttaagtttatcagcattttggatgaaggtaaaggaagactttccattgttaagtagaaagagtgtcctgctattgctaccattcacaacaactagtttgtgtgaactagggttttccatcttaacgcagttaaaaacaaaggaaagaaatgggctgaattgtgcagcagttatgcgggtagcattatcttcctgtgttccagactggaatgaacttatgaacaggcaagcacacccatcatagtaaataaaaatcttacctagcttttgtctttgtatttcttattttgtagtatttttctatgttatatttaaatggtactataatactgtgatacttttgttatgttttaatttttgttatatttaataaaattattttatgttcattgaacaaaaatttaatgaatttctgttagaggccaggaactattctagagacatttgggatacaaaagtgaacaaaacaggtaattccctagtagagtttatatcctggcaaggagaaattgacaataaacctaataaataaggtttataatatttagaagctattaagtgctatggaaagagtagtaagaaggaaggtcagggaagtactggggaaccaaaccatgaagggttctgtagaccattattgggcctctggcttttgtcagtggactagagaacagttgaagggtttaagcgaaggagagaaatgatctgagctaggttttaaaagacactctggtcactattttaaattcttagggtaagtctgaattaaatgttactttcccctcactgggcatggtggctcagacctgtaatccccgcactttggcaggccatggcagaaggctctgttgagcccaggagttcaagaccatcctgggcaacatagtgagaccttatttctactaaaaatattttaaaaataagtcaggtgtggtggtgcacacctatagtcccagctactcaggaggctgtggcaggagggtcgcttgacctcaggagtttgaagttgcagtcatctatgattgcaccactgcagtccagcctgagcaacagagtgaaaccctgtctcgagaaaattaaatgttacttccctaaaaaaaccttttctaaccaccctagggtaaatcctccattattcctttatttctttgttttccttgtagtatataatttgtaataattttgattactgattgtcattctgccaccctggagtatataatttttaattatctgattactgttattcttccatagtaggggaggtgatatccatttgcctgatacatagtatgtgttcaatacacatttgctaaagaataaatgaatcaataatacctaacatctctaatttgcagtcattcccaagagtaattattaaatatgtggcaaatttctttgcctttttacttttaaaaatctaattttgacataactgctgtaaccatccagaaacggcattgatgttgcttcacgttgctgatgcttaagcaatgtatattgtgtaatatacaatgtagtcttcaaactaatttcaacttctgcctttctgtgtactcccttatcccactgggtgatattatttggcatggtcattgtcattaaaatcatacaggatagtaattcctttccatctgctaccatgcctagccttatttaatttttcagattttctgttctattgaaggtaattgattttttctttttttttaatgcttgaaataaagcgttgaa

SEQ ID NO: 2637 - DNA, 4353 bp, Homo sapiens
aggcgcagctctgctggagagacctgaggcttgcagcgctgggcccggccgggtcgctgcggctgggctggaggaagcatctaaccaagattaagtcaaaggcatctaccaggtcctgaattctctcccagatgcacaccttttaaggtcaaggatgcattccaggaaagttctataaaaatataccatcaactccaacctgatatttgacctagccatggaaaacctcattggctcctcactggatcagaccataaaaatgatccaggaatgaaaatctaagataaattcccaccacttcaagatgttcttatacaagtcaacagtctagcagatcagccagtctctttcatcatcaagcagacatactcaaggtaccaacacagcaaaggcacaaaatgtctctatatcagtatttttcatggtatatgtgagacccattagtgaggcatgaaatcaattctgtgagtcacaatgaacatttgtctaaaaaacaaaataaaatgtaaaataccaaagtgttttgcatgaatcctttgcctgaattgtgcacattgcaaggaatgctgaggtcaatttcaatatgcgagaggggtatttgatggaggagatatgatgaatagaatgtatattggctaagaaatggttttcagtcattgattcctgggtgtcttgcttgattttcataatagcacggttaatgttctatagtcaagttttatattacaattacttgcaactagttgtgaagtctgaaatattcgattcaattgcaaactttgagtgtagtttttgaaaagatgttatttagactgtatatttttttcttcttttttgagttagtgccaattataacattttaatcaaactggaacaaattgctattaaaatggatcatttctttattaaaagaaagaggaatagtgaagtgaaatatacagaagcatgttcaagttcatctgttgaatctggaattgtgaatagtgacaatattgagaaaaatactgactccaatctgcaaacttcaacttcatttgagccacatttcaaaaagaaaaaagtaagtgcaagacgttataatgaagattacttaaaatatggctttatcaaatgtgaaaaaccctttgaaaatgacagacctcagtgtgttatttgtaataatattcttgcgaatgaaagcttaaaaccttcgaaattaaaaaggcacttagaaactcagcatgctgaacttattgataagcctcttgaatattttcaaagaaagaaaaaagacataaagttatcaacacaatttcttagttgttctactgctgttagtgagaaagccttattatcatcatatttagttgcatatcgtgtggcaaaagagaaaatagctaacacagctgctgaaaaaattattcttccagcatgtttggatatggtgcgtacaatatttgatgataaatcagctgataaattaaaaactatacctaatgataacacagtatctcttcgaatttgtactattgcagaacatttagaaacaatgcttattactcgtttacagtctggtatagattttgcaatccagcttgatgaaagcactgatattggaagctgcacaacacttttagtttatgtcagatatgcgtggcaagatgattttttggaggattttttgtgttttttaaatttaacctcacacctaagtggattagatatttttacagaattagaaaggcgcatagttggccaatataaattaaactggaaaaactgtaaaggaattacaagtgatggcacagcaaccatgactggaaaacatagcagagtaattaaaaaattactagaagttactaataatggtgctgtgtggaatcattgttttatacatcgtgaaggtttagcatccagagaaattccacagaatctcatggaagtattgaaaaatgcagtgaaagttgttaattttattaaaggaagctcattgaatagccggcttcttgaaacattttgttcagagattggaactaatcatacccacttactatatcataccaaaattcgttggttgtctcaagggaaaatactaagcagggtttatgagctcaggaatgagattcacttttttctcattgaaaaaaaatctcatttggcaagtatttttgaagatgatacttgggtaacaaaattggcatatttaactgatatttttagcattcttaatgaactgagtttaaaactacaggggaaaaacagtgatgtattccaacatgttgaacgtatccagggatttcgaaagacattattgttatggcaagtaagacttaaaagtaatcgtcctagctattacatgtttccaagatttttgcagcatattgaagagaatattattaatgaaaacattttgaaagaaataaaattagagatattgttgcatctcacttctctgtctcaaacttttaaccatttctttccagaagaaaaatttgaaacattaagggaaaacagttgggtaaaagatccatttgcttttcgaaaccctgaatcaataattgagctaaacttggtgcctgaagaagagaatgaattattgcagcttagttcttcatatacattgaagaatgattatgaaaccttaagtttatcagcattttggatgaaggtaaaggaagactttccattgttaagtagaaagagtgtcctgctattgctaccattcacaacaactagtttgtgtgaactagggttttccatcttaacgcagttaaaaacaaaggaaagaaatgggctgaattgtgcagcagttatgcgggtagcattatcttcctgtgttccagactggaatgaacttatgaacaggcaagcacacccatcatagtaaataaaaatcttacctagcttttgtctttgtatttcttattttgtagtatttttctatgttatatttaaatggtactataatactgtgatacttttgttatgttttaatttttgttatatttaataaaattattttatgttcattgaacaaaaatttaatgaatttctgttagaggccaggaactattctagagacatttgggatacaaaagtgaacaaaacaggtaattccctagtagagtttatatcctggcaaggagaaattgacaataaacctaataaataaggtttataatatttagaagctattaagtgctatggaaagagtagtaagaaggaaggtcagggaagtactggggaaccaaaccatgaagggttctgtagaccattattgggcctctggcttttgtcagtggactagagaacagttgaagggtttaagcgaaggagagaaatgatctgagctaggttttaaaagacactctggtcactattttaaattcttagggtaagtctgaattaaatgttactttcccctcactgggcatggtggctcagacctgtaatccccgcactttggcaggccatggcagaaggctctgttgagcccaggagttcaagaccatcctgggcaacatagtgagaccttatttctactaaaaatattttaaaaataagtcaggtgtggtggtgcacacctatagtcccagctactcaggaggctgtggcaggagggtcgcttgacctcaggagtttgaagttgcagtcatctatgattgcaccactgcagtccagcctgagcaacagagtgaaaccctgtctcgagaaaattaaatgttacttccctaaaaaaaccttttctaaccaccctagggtaaatcctccattattcctttatttctttgttttccttgtagtatataatttgtaataattttgattactgattgtcattctgccaccctggagtatataatttttaattatctgattactgttattcttccatagtaggggaggtgatatccatttgcctgatacatagtatgtgttcaatacacatttgctaaagaataaatgaatcaataatacctaacatctctaatttgcagtcattcccaagagtaattattaaatatgtggcaaatttctttgcctttttacttttaaaaatctaattttgacataactgctgtaaccatccagaaacggcattgatgttgcttcacgttgctgatgcttaagcaatgtatattgtgtaatatacaatgtagtcttcaaactaatttcaacttctgcctttctgtgtactcccttatcccactgggtgatattatttggcatggtcattgtcattaaaatcatacaggatagtaattcctttccatctgctaccatgcctagccttatttaatttttcagattttctgttctattgaaggtaattgattttttctttttttttaatgcttgaaataaagcgttgaa

SEQ ID NO: 2638 - DNA, 4231 bp, Homo sapiens
tcggctggaatggggaatttgtgaggtcaaggatgcattccaggaaagttctataaaaatataccatcaactccaacctgatatttgacctagccatggaaaacctcattggctcctcactggatcagaccataaaaatgatccaggaatgaaaatctaagataaattcccaccacttcaagatgttcttatacaagtcaacagtctagcagatcagccagtctctttcatcatcaagcagacatactcaaggtaccaacacagcaaaggcacaaaatgtctctatatcagtatttttcatggtatatgtgagacccattagtgaggcatgaaatcaattctgtgagtcacaatgaacatttgtctaaaaaacaaaataaaatgtaaaataccaaagtgttttgcatgaatcctttgcctgaattgtgcacattgcaaggaatgctgaggtcaatttcaatatgcgagaggggtatttgatggaggagatatgatgaatagaatgtatattggctaagaaatggttttcagtcattgattcctgggtgtcttgcttgattttcataatagcacggttaatgttctatagtcaagttttatattacaattacttgcaactagttgtgaagtctgaaatattcgattcaattgcaaactttgagtgtagtttttgaaaagatgttatttagactgtatatttttttcttcttttttgagttagtgccaattataacattttaatcaaactggaacaaattgctattaaaatggatcatttctttattaaaagaaagaggaatagtgaagtgaaatatacagaagcatgttcaagttcatctgttgaatctggaattgtgaatagtgacaatattgagaaaaatactgactccaatctgcaaacttcaacttcatttgagccacatttcaaaaagaaaaaagtaagtgcaagacgttataatgaagattacttaaaatatggctttatcaaatgtgaaaaaccctttgaaaatgacagacctcagtgtgttatttgtaataatattcttgcgaatgaaagcttaaaaccttcgaaattaaaaaggcacttagaaactcagcatgctgaacttattgataagcctcttgaatattttcaaagaaagaaaaaagacataaagttatcaacacaatttcttagttgttctactgctgttagtgagaaagccttattatcatcatatttagttgcatatcgtgtggcaaaagagaaaatagctaacacagctgctgaaaaaattattcttccagcatgtttggatatggtgcgtacaatatttgatgataaatcagctgataaattaaaaactatacctaatgataacacagtatctcttcgaatttgtactattgcagaacatttagaaacaatgcttattactcgtttacagtctggtatagattttgcaatccagcttgatgaaagcactgatattggaagctgcacaacacttttagtttatgtcagatatgcgtggcaagatgattttttggaggattttttgtgttttttaaatttaacctcacacctaagtggattagatatttttacagaattagaaaggcgcatagttggccaatataaattaaactggaaaaactgtaaaggaattacaagtgatggcacagcaaccatgactggaaaacatagcagagtaattaaaaaattactagaagttactaataatggtgctgtgtggaatcattgttttatacatcgtgaaggtttagcatccagagaaattccacagaatctcatggaagtattgaaaaatgcagtgaaagttgttaattttattaaaggaagctcattgaatagccggcttcttgaaacattttgttcagagattggaactaatcatacccacttactatatcataccaaaattcgttggttgtctcaagggaaaatactaagcagggtttatgagctcaggaatgagattcacttttttctcattgaaaaaaaatctcatttggcaagtatttttgaagatgatacttgggtaacaaaattggcatatttaactgatatttttagcattcttaatgaactgagtttaaaactacaggggaaaaacagtgatgtattccaacatgttgaacgtatccagggatttcgaaagacattattgttatggcaagtaagacttaaaagtaatcgtcctagctattacatgtttccaagatttttgcagcatattgaagagaatattattaatgaaaacattttgaaagaaataaaattagagatattgttgcatctcacttctctgtctcaaacttttaaccatttctttccagaagaaaaatttgaaacattaagggaaaacagttgggtaaaagatccatttgcttttcgaaaccctgaatcaataattgagctaaacttggtgcctgaagaagagaatgaattattgcagcttagttcttcatatacattgaagaatgattatgaaaccttaagtttatcagcattttggatgaaggtaaaggaagactttccattgttaagtagaaagagtgtcctgctattgctaccattcacaacaactagtttgtgtgaactagggttttccatcttaacgcagttaaaaacaaaggaaagaaatgggctgaattgtgcagcagttatgcgggtagcattatcttcctgtgttccagactggaatgaacttatgaacaggcaagcacacccatcatagtaaataaaaatcttacctagcttttgtctttgtatttcttattttgtagtatttttctatgttatatttaaatggtactataatactgtgatacttttgttatgttttaatttttgttatatttaataaaattattttatgttcattgaacaaaaatttaatgaatttctgttagaggccaggaactattctagagacatttgggatacaaaagtgaacaaaacaggtaattccctagtagagtttatatcctggcaaggagaaattgacaataaacctaataaataaggtttataatatttagaagctattaagtgctatggaaagagtagtaagaaggaaggtcagggaagtactggggaaccaaaccatgaagggttctgtagaccattattgggcctctggcttttgtcagtggactagagaacagttgaagggtttaagcgaaggagagaaatgatctgagctaggttttaaaagacactctggtcactattttaaattcttagggtaagtctgaattaaatgttactttcccctcactgggcatggtggctcagacctgtaatccccgcactttggcaggccatggcagaaggctctgttgagcccaggagttcaagaccatcctgggcaacatagtgagaccttatttctactaaaaatattttaaaaataagtcaggtgtggtggtgcacacctatagtcccagctactcaggaggctgtggcaggagggtcgcttgacctcaggagtttgaagttgcagtcatctatgattgcaccactgcagtccagcctgagcaacagagtgaaaccctgtctcgagaaaattaaatgttacttccctaaaaaaaccttttctaaccaccctagggtaaatcctccattattcctttatttctttgttttccttgtagtatataatttgtaataattttgattactgattgtcattctgccaccctggagtatataatttttaattatctgattactgttattcttccatagtaggggaggtgatatccatttgcctgatacatagtatgtgttcaatacacatttgctaaagaataaatgaatcaataatacctaacatctctaatttgcagtcattcccaagagtaattattaaatatgtggcaaatttctttgcctttttacttttaaaaatctaattttgacataactgctgtaaccatccagaaacggcattgatgttgcttcacgttgctgatgcttaagcaatgtatattgtgtaatatacaatgtagtcttcaaactaatttcaacttctgcctttctgtgtactcccttatcccactgggtgatattatttggcatggtcattgtcattaaaatcatacaggatagtaattcctttccatctgctaccatgcctagccttatttaatttttcagattttctgttctattgaaggtaattgattttttctttttttttaatgcttgaaataaagcgttgaa

SEQ ID NO: 2639 - DNA, 3807 bp, Homo sapiens
gctggaatggggaatttgtgaggtaggccggaagtggtgttgcggagggaagtgtggggagagcagaggcgcagctctgctggagagacctgaggcttgcagcgctgggcccggccgggtcgctgcggctgggctggaggtcaaggatgcattccaggaaagttctataaaaatataccatcaactccaacctgatatttgacctagccatggaaaacctcattggctcctcactggatcagaccataaaaatgatccaggaatgaaaatctaagataaattcccaccacttcaagatgttcttatacaagtcaacagtctagcagatcagccagtctctttcatcatcaagcagacatactcaagaaagaggaatagtgaagtgaaatatacagaagcatgttcaagttcatctgttgaatctggaattgtgaatagtgacaatattgagaaaaatactgactccaatctgcaaacttcaacttcatttgagccacatttcaaaaagaaaaaagtaagtgcaagacgttataatgaagattacttaaaatatggctttatcaaatgtgaaaaaccctttgaaaatgacagacctcagtgtgttatttgtaataatattcttgcgaatgaaagcttaaaaccttcgaaattaaaaaggcacttagaaactcagcatgctgaacttattgataagcctcttgaatattttcaaagaaagaaaaaagacataaagttatcaacacaatttcttagttgttctactgctgttagtgagaaagccttattatcatcatatttagttgcatatcgtgtggcaaaagagaaaatagctaacacagctgctgaaaaaattattcttccagcatgtttggatatggtgcgtacaatatttgatgataaatcagctgataaattaaaaactatacctaatgataacacagtatctcttcgaatttgtactattgcagaacatttagaaacaatgcttattactcgtttacagtctggtatagattttgcaatccagcttgatgaaagcactgatattggaagctgcacaacacttttagtttatgtcagatatgcgtggcaagatgattttttggaggattttttgtgttttttaaatttaacctcacacctaagtggattagatatttttacagaattagaaaggcgcatagttggccaatataaattaaactggaaaaactgtaaaggaattacaagtgatggcacagcaaccatgactggaaaacatagcagagtaattaaaaaattactagaagttactaataatggtgctgtgtggaatcattgttttatacatcgtgaaggtttagcatccagagaaattccacagaatctcatggaagtattgaaaaatgcagtgaaagttgttaattttattaaaggaagctcattgaatagccggcttcttgaaacattttgttcagagattggaactaatcatacccacttactatatcataccaaaattcgttggttgtctcaagggaaaatactaagcagggtttatgagctcaggaatgagattcacttttttctcattgaaaaaaaatctcatttggcaagtatttttgaagatgatacttgggtaacaaaattggcatatttaactgatatttttagcattcttaatgaactgagtttaaaactacaggggaaaaacagtgatgtattccaacatgttgaacgtatccagggatttcgaaagacattattgttatggcaagtaagacttaaaagtaatcgtcctagctattacatgtttccaagatttttgcagcatattgaagagaatattattaatgaaaacattttgaaagaaataaaattagagatattgttgcatctcacttctctgtctcaaacttttaaccatttctttccagaagaaaaatttgaaacattaagggaaaacagttgggtaaaagatccatttgcttttcgaaaccctgaatcaataattgagctaaacttggtgcctgaagaagagaatgaattattgcagcttagttcttcatatacattgaagaatgattatgaaaccttaagtttatcagcattttggatgaaggtaaaggaagactttccattgttaagtagaaagagtgtcctgctattgctaccattcacaacaactagtttgtgtgaactagggttttccatcttaacgcagttaaaaacaaaggaaagaaatgggctgaattgtgcagcagttatgcgggtagcattatcttcctgtgttccagactggaatgaacttatgaacaggcaagcacacccatcatagtaaataaaaatcttacctagcttttgtctttgtatttcttattttgtagtatttttctatgttatatttaaatggtactataatactgtgatacttttgttatgttttaatttttgttatatttaataaaattattttatgttcattgaacaaaaatttaatgaatttctgttagaggccaggaactattctagagacatttgggatacaaaagtgaacaaaacaggtaattccctagtagagtttatatcctggcaaggagaaattgacaataaacctaataaataaggtttataatatttagaagctattaagtgctatggaaagagtagtaagaaggaaggtcagggaagtactggggaaccaaaccatgaagggttctgtagaccattattgggcctctggcttttgtcagtggactagagaacagttgaagggtttaagcgaaggagagaaatgatctgagctaggttttaaaagacactctggtcactattttaaattcttagggtaagtctgaattaaatgttactttcccctcactgggcatggtggctcagacctgtaatccccgcactttggcaggccatggcagaaggctctgttgagcccaggagttcaagaccatcctgggcaacatagtgagaccttatttctactaaaaatattttaaaaataagtcaggtgtggtggtgcacacctatagtcccagctactcaggaggctgtggcaggagggtcgcttgacctcaggagtttgaagttgcagtcatctatgattgcaccactgcagtccagcctgagcaacagagtgaaaccctgtctcgagaaaattaaatgttacttccctaaaaaaaccttttctaaccaccctagggtaaatcctccattattcctttatttctttgttttccttgtagtatataatttgtaataattttgattactgattgtcattctgccaccctggagtatataatttttaattatctgattactgttattcttccatagtaggggaggtgatatccatttgcctgatacatagtatgtgttcaatacacatttgctaaagaataaatgaatcaataatacctaacatctctaatttgcagtcattcccaagagtaattattaaatatgtggcaaatttctttgcctttttacttttaaaaatctaattttgacataactgctgtaaccatccagaaacggcattgatgttgcttcacgttgctgatgcttaagcaatgtatattgtgtaatatacaatgtagtcttcaaactaatttcaacttctgcctttctgtgtactcccttatcccactgggtgatattatttggcatggtcattgtcattaaaatcatacaggatagtaattcctttccatctgctaccatgcctagccttatttaatttttcagattttctgttctattgaaggtaattgattttttctttttttttaatgcttgaaataaagcgttgaa

SEQ ID NO: 2640 - DNA, 3849 bp, Homo sapiens
gcgcagctctgctggagagacctgaggcttgcagcgctgggcccggccgggtcgctgcggctgggctggagccaaggttaactatttgtaacatgtcatctttcaaggaagcatctaaccaagattaagtcaaaggcatctaccaggtcctgaattctctcccagatgcacaccttttaaggtcaaggatgcattccaggaaagttctataaaaatataccatcaactccaacctgatatttgacctagccatggaaaacctcattggctcctcactggatcagaccataaaaatgatccaggaatgaaaatctaagataaattcccaccacttcaagatgttcttatacaagtcaacagtctagcagatcagccagtctctttcatcatcaagcagacatactcaagaaagaggaatagtgaagtgaaatatacagaagcatgttcaagttcatctgttgaatctggaattgtgaatagtgacaatattgagaaaaatactgactccaatctgcaaacttcaacttcatttgagccacatttcaaaaagaaaaaagtaagtgcaagacgttataatgaagattacttaaaatatggctttatcaaatgtgaaaaaccctttgaaaatgacagacctcagtgtgttatttgtaataatattcttgcgaatgaaagcttaaaaccttcgaaattaaaaaggcacttagaaactcagcatgctgaacttattgataagcctcttgaatattttcaaagaaagaaaaaagacataaagttatcaacacaatttcttagttgttctactgctgttagtgagaaagccttattatcatcatatttagttgcatatcgtgtggcaaaagagaaaatagctaacacagctgctgaaaaaattattcttccagcatgtttggatatggtgcgtacaatatttgatgataaatcagctgataaattaaaaactatacctaatgataacacagtatctcttcgaatttgtactattgcagaacatttagaaacaatgcttattactcgtttacagtctggtatagattttgcaatccagcttgatgaaagcactgatattggaagctgcacaacacttttagtttatgtcagatatgcgtggcaagatgattttttggaggattttttgtgttttttaaatttaacctcacacctaagtggattagatatttttacagaattagaaaggcgcatagttggccaatataaattaaactggaaaaactgtaaaggaattacaagtgatggcacagcaaccatgactggaaaacatagcagagtaattaaaaaattactagaagttactaataatggtgctgtgtggaatcattgttttatacatcgtgaaggtttagcatccagagaaattccacagaatctcatggaagtattgaaaaatgcagtgaaagttgttaattttattaaaggaagctcattgaatagccggcttcttgaaacattttgttcagagattggaactaatcatacccacttactatatcataccaaaattcgttggttgtctcaagggaaaatactaagcagggtttatgagctcaggaatgagattcacttttttctcattgaaaaaaaatctcatttggcaagtatttttgaagatgatacttgggtaacaaaattggcatatttaactgatatttttagcattcttaatgaactgagtttaaaactacaggggaaaaacagtgatgtattccaacatgttgaacgtatccagggatttcgaaagacattattgttatggcaagtaagacttaaaagtaatcgtcctagctattacatgtttccaagatttttgcagcatattgaagagaatattattaatgaaaacattttgaaagaaataaaattagagatattgttgcatctcacttctctgtctcaaacttttaaccatttctttccagaagaaaaatttgaaacattaagggaaaacagttgggtaaaagatccatttgcttttcgaaaccctgaatcaataattgagctaaacttggtgcctgaagaagagaatgaattattgcagcttagttcttcatatacattgaagaatgattatgaaaccttaagtttatcagcattttggatgaaggtaaaggaagactttccattgttaagtagaaagagtgtcctgctattgctaccattcacaacaactagtttgtgtgaactagggttttccatcttaacgcagttaaaaacaaaggaaagaaatgggctgaattgtgcagcagttatgcgggtagcattatcttcctgtgttccagactggaatgaacttatgaacaggcaagcacacccatcatagtaaataaaaatcttacctagcttttgtctttgtatttcttattttgtagtatttttctatgttatatttaaatggtactataatactgtgatacttttgttatgttttaatttttgttatatttaataaaattattttatgttcattgaacaaaaatttaatgaatttctgttagaggccaggaactattctagagacatttgggatacaaaagtgaacaaaacaggtaattccctagtagagtttatatcctggcaaggagaaattgacaataaacctaataaataaggtttataatatttagaagctattaagtgctatggaaagagtagtaagaaggaaggtcagggaagtactggggaaccaaaccatgaagggttctgtagaccattattgggcctctggcttttgtcagtggactagagaacagttgaagggtttaagcgaaggagagaaatgatctgagctaggttttaaaagacactctggtcactattttaaattcttagggtaagtctgaattaaatgttactttcccctcactgggcatggtggctcagacctgtaatccccgcactttggcaggccatggcagaaggctctgttgagcccaggagttcaagaccatcctgggcaacatagtgagaccttatttctactaaaaatattttaaaaataagtcaggtgtggtggtgcacacctatagtcccagctactcaggaggctgtggcaggagggtcgcttgacctcaggagtttgaagttgcagtcatctatgattgcaccactgcagtccagcctgagcaacagagtgaaaccctgtctcgagaaaattaaatgttacttccctaaaaaaaccttttctaaccaccctagggtaaatcctccattattcctttatttctttgttttccttgtagtatataatttgtaataattttgattactgattgtcattctgccaccctggagtatataatttttaattatctgattactgttattcttccatagtaggggaggtgatatccatttgcctgatacatagtatgtgttcaatacacatttgctaaagaataaatgaatcaataatacctaacatctctaatttgcagtcattcccaagagtaattattaaatatgtggcaaatttctttgcctttttacttttaaaaatctaattttgacataactgctgtaaccatccagaaacggcattgatgttgcttcacgttgctgatgcttaagcaatgtatattgtgtaatatacaatgtagtcttcaaactaatttcaacttctgcctttctgtgtactcccttatcccactgggtgatattatttggcatggtcattgtcattaaaatcatacaggatagtaattcctttccatctgctaccatgcctagccttatttaatttttcagattttctgttctattgaaggtaattgattttttctttttttttaatgcttgaaataaagcgttgaa

SEQ ID NO: 2641 - DNA, 3725 bp, Homo sapiens
agaagggcatcctctgatgggagtggaccggagtccgctaaagcgaagcattccagggtcaaggatgcattccaggaaagttctataaaaatataccatcaactccaacctgatatttgacctagccatggaaaacctcattggctcctcactggatcagaccataaaaatgatccaggaatgaaaatctaagataaattcccaccacttcaagatgttcttatacaagtcaacagtctagcagatcagccagtctctttcatcatcaagcagacatactcaagaaagaggaatagtgaagtgaaatatacagaagcatgttcaagttcatctgttgaatctggaattgtgaatagtgacaatattgagaaaaatactgactccaatctgcaaacttcaacttcatttgagccacatttcaaaaagaaaaaagtaagtgcaagacgttataatgaagattacttaaaatatggctttatcaaatgtgaaaaaccctttgaaaatgacagacctcagtgtgttatttgtaataatattcttgcgaatgaaagcttaaaaccttcgaaattaaaaaggcacttagaaactcagcatgctgaacttattgataagcctcttgaatattttcaaagaaagaaaaaagacataaagttatcaacacaatttcttagttgttctactgctgttagtgagaaagccttattatcatcatatttagttgcatatcgtgtggcaaaagagaaaatagctaacacagctgctgaaaaaattattcttccagcatgtttggatatggtgcgtacaatatttgatgataaatcagctgataaattaaaaactatacctaatgataacacagtatctcttcgaatttgtactattgcagaacatttagaaacaatgcttattactcgtttacagtctggtatagattttgcaatccagcttgatgaaagcactgatattggaagctgcacaacacttttagtttatgtcagatatgcgtggcaagatgattttttggaggattttttgtgttttttaaatttaacctcacacctaagtggattagatatttttacagaattagaaaggcgcatagttggccaatataaattaaactggaaaaactgtaaaggaattacaagtgatggcacagcaaccatgactggaaaacatagcagagtaattaaaaaattactagaagttactaataatggtgctgtgtggaatcattgttttatacatcgtgaaggtttagcatccagagaaattccacagaatctcatggaagtattgaaaaatgcagtgaaagttgttaattttattaaaggaagctcattgaatagccggcttcttgaaacattttgttcagagattggaactaatcatacccacttactatatcataccaaaattcgttggttgtctcaagggaaaatactaagcagggtttatgagctcaggaatgagattcacttttttctcattgaaaaaaaatctcatttggcaagtatttttgaagatgatacttgggtaacaaaattggcatatttaactgatatttttagcattcttaatgaactgagtttaaaactacaggggaaaaacagtgatgtattccaacatgttgaacgtatccagggatttcgaaagacattattgttatggcaagtaagacttaaaagtaatcgtcctagctattacatgtttccaagatttttgcagcatattgaagagaatattattaatgaaaacattttgaaagaaataaaattagagatattgttgcatctcacttctctgtctcaaacttttaaccatttctttccagaagaaaaatttgaaacattaagggaaaacagttgggtaaaagatccatttgcttttcgaaaccctgaatcaataattgagctaaacttggtgcctgaagaagagaatgaattattgcagcttagttcttcatatacattgaagaatgattatgaaaccttaagtttatcagcattttggatgaaggtaaaggaagactttccattgttaagtagaaagagtgtcctgctattgctaccattcacaacaactagtttgtgtgaactagggttttccatcttaacgcagttaaaaacaaaggaaagaaatgggctgaattgtgcagcagttatgcgggtagcattatcttcctgtgttccagactggaatgaacttatgaacaggcaagcacacccatcatagtaaataaaaatcttacctagcttttgtctttgtatttcttattttgtagtatttttctatgttatatttaaatggtactataatactgtgatacttttgttatgttttaatttttgttatatttaataaaattattttatgttcattgaacaaaaatttaatgaatttctgttagaggccaggaactattctagagacatttgggatacaaaagtgaacaaaacaggtaattccctagtagagtttatatcctggcaaggagaaattgacaataaacctaataaataaggtttataatatttagaagctattaagtgctatggaaagagtagtaagaaggaaggtcagggaagtactggggaaccaaaccatgaagggttctgtagaccattattgggcctctggcttttgtcagtggactagagaacagttgaagggtttaagcgaaggagagaaatgatctgagctaggttttaaaagacactctggtcactattttaaattcttagggtaagtctgaattaaatgttactttcccctcactgggcatggtggctcagacctgtaatccccgcactttggcaggccatggcagaaggctctgttgagcccaggagttcaagaccatcctgggcaacatagtgagaccttatttctactaaaaatattttaaaaataagtcaggtgtggtggtgcacacctatagtcccagctactcaggaggctgtggcaggagggtcgcttgacctcaggagtttgaagttgcagtcatctatgattgcaccactgcagtccagcctgagcaacagagtgaaaccctgtctcgagaaaattaaatgttacttccctaaaaaaaccttttctaaccaccctagggtaaatcctccattattcctttatttctttgttttccttgtagtatataatttgtaataattttgattactgattgtcattctgccaccctggagtatataatttttaattatctgattactgttattcttccatagtaggggaggtgatatccatttgcctgatacatagtatgtgttcaatacacatttgctaaagaataaatgaatcaataatacctaacatctctaatttgcagtcattcccaagagtaattattaaatatgtggcaaatttctttgcctttttacttttaaaaatctaattttgacataactgctgtaaccatccagaaacggcattgatgttgcttcacgttgctgatgcttaagcaatgtatattgtgtaatatacaatgtagtcttcaaactaatttcaacttctgcctttctgtgtactcccttatcccactgggtgatattatttggcatggtcattgtcattaaaatcatacaggatagtaattcctttccatctgctaccatgcctagccttatttaatttttcagattttctgttctattgaaggtaattgattttttctttttttttaatgcttgaaataaagcgttgaa

SEQ ID NO: 2642 - DNA, 3760 bp, Homo sapiens
ggctggaatggggaatttgtgaggtcaaggatgcattccaggaaagttctataaaaatataccatcaactccaacctgatatttgacctagccatggaaaacctcattggctcctcactggatcagaccataaaaatgatccaggaatgaaaatctaagataaattcccaccacttcaagatgttcttatacaagtcaacagtctagcagatcagccagtctctttcatcatcaagcagacatactcaagtgccaattataacattttaatcaaactggaacaaattgctattaaaatggatcatttctttattaaaagaaagaggaatagtgaagtgaaatatacagaagcatgttcaagttcatctgttgaatctggaattgtgaatagtgacaatattgagaaaaatactgactccaatctgcaaacttcaacttcatttgagccacatttcaaaaagaaaaaagtaagtgcaagacgttataatgaagattacttaaaatatggctttatcaaatgtgaaaaaccctttgaaaatgacagacctcagtgtgttatttgtaataatattcttgcgaatgaaagcttaaaaccttcgaaattaaaaaggcacttagaaactcagcatgctgaacttattgataagcctcttgaatattttcaaagaaagaaaaaagacataaagttatcaacacaatttcttagttgttctactgctgttagtgagaaagccttattatcatcatatttagttgcatatcgtgtggcaaaagagaaaatagctaacacagctgctgaaaaaattattcttccagcatgtttggatatggtgcgtacaatatttgatgataaatcagctgataaattaaaaactatacctaatgataacacagtatctcttcgaatttgtactattgcagaacatttagaaacaatgcttattactcgtttacagtctggtatagattttgcaatccagcttgatgaaagcactgatattggaagctgcacaacacttttagtttatgtcagatatgcgtggcaagatgattttttggaggattttttgtgttttttaaatttaacctcacacctaagtggattagatatttttacagaattagaaaggcgcatagttggccaatataaattaaactggaaaaactgtaaaggaattacaagtgatggcacagcaaccatgactggaaaacatagcagagtaattaaaaaattactagaagttactaataatggtgctgtgtggaatcattgttttatacatcgtgaaggtttagcatccagagaaattccacagaatctcatggaagtattgaaaaatgcagtgaaagttgttaattttattaaaggaagctcattgaatagccggcttcttgaaacattttgttcagagattggaactaatcatacccacttactatatcataccaaaattcgttggttgtctcaagggaaaatactaagcagggtttatgagctcaggaatgagattcacttttttctcattgaaaaaaaatctcatttggcaagtatttttgaagatgatacttgggtaacaaaattggcatatttaactgatatttttagcattcttaatgaactgagtttaaaactacaggggaaaaacagtgatgtattccaacatgttgaacgtatccagggatttcgaaagacattattgttatggcaagtaagacttaaaagtaatcgtcctagctattacatgtttccaagatttttgcagcatattgaagagaatattattaatgaaaacattttgaaagaaataaaattagagatattgttgcatctcacttctctgtctcaaacttttaaccatttctttccagaagaaaaatttgaaacattaagggaaaacagttgggtaaaagatccatttgcttttcgaaaccctgaatcaataattgagctaaacttggtgcctgaagaagagaatgaattattgcagcttagttcttcatatacattgaagaatgattatgaaaccttaagtttatcagcattttggatgaaggtaaaggaagactttccattgttaagtagaaagagtgtcctgctattgctaccattcacaacaactagtttgtgtgaactagggttttccatcttaacgcagttaaaaacaaaggaaagaaatgggctgaattgtgcagcagttatgcgggtagcattatcttcctgtgttccagactggaatgaacttatgaacaggcaagcacacccatcatagtaaataaaaatcttacctagcttttgtctttgtatttcttattttgtagtatttttctatgttatatttaaatggtactataatactgtgatacttttgttatgttttaatttttgttatatttaataaaattattttatgttcattgaacaaaaatttaatgaatttctgttagaggccaggaactattctagagacatttgggatacaaaagtgaacaaaacaggtaattccctagtagagtttatatcctggcaaggagaaattgacaataaacctaataaataaggtttataatatttagaagctattaagtgctatggaaagagtagtaagaaggaaggtcagggaagtactggggaaccaaaccatgaagggttctgtagaccattattgggcctctggcttttgtcagtggactagagaacagttgaagggtttaagcgaaggagagaaatgatctgagctaggttttaaaagacactctggtcactattttaaattcttagggtaagtctgaattaaatgttactttcccctcactgggcatggtggctcagacctgtaatccccgcactttggcaggccatggcagaaggctctgttgagcccaggagttcaagaccatcctgggcaacatagtgagaccttatttctactaaaaatattttaaaaataagtcaggtgtggtggtgcacacctatagtcccagctactcaggaggctgtggcaggagggtcgcttgacctcaggagtttgaagttgcagtcatctatgattgcaccactgcagtccagcctgagcaacagagtgaaaccctgtctcgagaaaattaaatgttacttccctaaaaaaaccttttctaaccaccctagggtaaatcctccattattcctttatttctttgttttccttgtagtatataatttgtaataattttgattactgattgtcattctgccaccctggagtatataatttttaattatctgattactgttattcttccatagtaggggaggtgatatccatttgcctgatacatagtatgtgttcaatacacatttgctaaagaataaatgaatcaataatacctaacatctctaatttgcagtcattcccaagagtaattattaaatatgtggcaaatttctttgcctttttacttttaaaaatctaattttgacataactgctgtaaccatccagaaacggcattgatgttgcttcacgttgctgatgcttaagcaatgtatattgtgtaatatacaatgtagtcttcaaactaatttcaacttctgcctttctgtgtactcccttatcccactgggtgatattatttggcatggtcattgtcattaaaatcatacaggatagtaattcctttccatctgctaccatgcctagccttatttaatttttcagattttctgttctattgaaggtaattgattttttctttttttttaatgcttgaaataaagcgttgaa

SEQ ID NO: 2643 - DNA, 3629 bp, Homo sapiens
ctggagaggatctacccgggtccctgcctggccagtggggaaacaccggtcccccaggcaccttcacctaaccagagcggggatttccaccgcccctcatgccgccctttggaggaaagtgaaagtgaaaggaggaagaggaggcttcatggctgaggaggtcgcagcgccatgaagtccctgtctctgctcctcgctgtggctttgggcctggcgaccgccgtctcagcaggacccgcggtgatcgagtgttggttcgtggaggatgcgagcggaaagggcctggccaagagacccggtgcactgctgttgcgccagggaccgggggaaccgccgccccggccggacctcgaccctgagctctatctcagtgtacacgaccccgcgggcgccctccaggctgccttcaggcggtatccccggggcgcccccgcaccacactgcgagatgagccgcttcgtgcctctccccgcctctgcgaaatgggccagcggcctgacccccgcgcagaactgcccgcgggccctggatggggcttggctgatggtcagcatatccagcccagtcctcagcctctccagcctcttgcgaccacagccagagcctcagcaggagcctgttctcatcaccatggcaacagtggtactgactgtcctcacccacacccctgcccctcgagtgagactgggacaagatgctctgctggacttgagctttgcctacatgccccccacctccgaggccgcctcatctctggctccgggtccccctccctttgggctagagtggcgacgccagcacctgggtaagggacatctgctcctggctgcaactcctgggctgaatggccagatgccagcagcccaagaaggggccgtggcatttgctgcttgggatgatgatgagccatggggcccatggaccggaaatgggaccttctggctgcctacagttcaaccctttcaggagggcacctatctggccaccatacacctgccatacctgcaaggacaggtcaccctggagcttgctgtgtacaaaccccccaaagtgtccctgatgccagcaacccttgcacgggccgccccaggggaggcacccccggaattgctctgccttgtgtcccacttctacccttctgggggcctggaggtggagtgggaactccggggtggcccagggggccgctctcagaaggccgaggggcagaggtggctctcggccctgcgccaccattccgatggctctgtcagcctctctgggcacttgcagccgcccccagtcaccactgagcagcatggggcacgctatgcctgtcgaattcaccatcccagcctgcctgcctcggggcgcagcgctgaggtcaccctggaggtagcaggtctttcagggccctcccttgaggacagcgtaggccttttcctgtctgcctttcttctgcttgggctcttcaaggcactgggctgggctgctgtctacctgtccacctgcaaggattcaaagaagaaagcagagtgagggcactcactgccatcctgtggaagccaccatcatctctggcccaagcttctgtagtagctccctaaaataataccctatcatctgctcctaatccctccaatctctctccactgagtggctggaatgcttttttttttttctttcacttatataagggataatttttcttttttttttttttttgagacggagtctcactcttccgcccaggctgcagtgcagtggcatgatcttggcttactgcaacctccgcctcctgggttcaagcaattctgtggcttcagcctccggagtagctgggattacaggcacatgccaccacacccagtgaatttttgtatttttagtagagacggggtttcaccatgttggccaggctggtcttgaattcctgacctcaggtgatctgcccacctcagcctcccaaagtgctgggattacaggcgtgagccaccacaccaggcccgagaaatgcttttttaaaaaacacacatcttatggcattcaccttcttggagctctaggacagtggttctcaaaatttttttctctcaggacctcttaaaaatcatcaaggaccccaaaaagcttttgggtatgtgggttatagctatcaatatttatggtactagaacttaaaagtgagaaaaatttaaaacacgagaatacataggcacacattctattcatcgtgggaaccatggtgtcaatacatatcatgtagcttctgaaaaactccactgtacacttatagaatgaagaaggcaaaaaacttttttttttttttttttgagacggagtctcgctctgtcgcccaggctggagtgcagtggcgcgatctcggctcactgcaagctccgcctctcgggttcacgccattctcctgcctcagcctcccaagtagctcggactacaggcgtcctccaccatgcctggctaatattttgtattttttagtagagacggggtttcaccgtgttagccaggatggtctcgatctcctaacctggtgatccgcccgcctcggcctcccaaagtattgggattacccgcgtgagccaccgcgcccggctgcaaataatctttctttttttctgagacagagtctcgctctgttgcccaggctggagtgcagtggcacgatctcggctcacggcacgctccgcctcccgggttcacgccattctcctgcctcagcttcccgagtagctgggactacaggggcccgccaccacgcccggctaactttttgtgtttttagtagagacggggtttcaccgtgttagccaggatggtctcgatctcctgaccttgtgatctgcccgcctcggcctcccaaagtgctgggattacaggcgtgagccaccgcgcccggcggcgaaacacgatattgtactaacatcttaattttgttataaaatctcacaaaccccctgacatagtctcagagatctgtagggccgaggttacatttggagaacccgtactctagggccaaatccattcttcttgccctggctcacttgtcccccccaccgccccgcgctggagccactgcctagttcttcagccctagatggtgctcgccagacctcctctcaatgctcatcacacacagggctattcctttcctccaatgaaccaaacgcctcccgcccacctccaggtcccagtcctctgttccctttgcctggtccacccttgccctccctgggtcgcagacgaggtcggcctcgtcattccccgcagaccgccgcgcgtccctcttgtgcggttcaccacagttgtatttaagtgatcgtgtgagtcgtcgttaaatgcctgtctccccgcggatcatgggctcctcgaggacagggactggcctgtctgtccactgctgtaaccccgcgccggcatagggacctaaggcccactggagggcgctcatcaagtagctgctggatgttgacgaaggaagcggcggcgcagctcagggatctccgagtcaggacggtcggccagacccacggggtaacgggtctaatcgtgtaggaataaagctgtattccagtgcttccaaaaaaaaaaaaaaaaaaaaaaaaaaaaaaaaaaaaaaaaaaaaaaaa

SEQ ID NO: 2644 - DNA, 2404 bp, Homo sapiens
ctggagaggatctacccgggtccctgcctggccagtggggaaacaccggtcccccaggcaccttcacctaaccagagcggggatttccaccgcccctcatgccgccctttggaggaaagtgaaagtgaaaggaggaagaggaggcttcatggctgaggaggtcgcagcgccatgaagtccctgtctctgctcctcgctgtggctttgggcctggcgaccgccgtctcagcaggacccgcggtgatcgagtgttggttcgtggaggatgcgagcggaaagggcctggccaagagacccggtgcactgctgttgcgccagggaccgggggaaccgccgccccggccggacctcgaccctgagctctatctcagtgtacacgaccccgcgggcgccctccaggctgccttcaggcggtatccccggggcgcccccgcaccacactgcgagatgagccgcttcgtgcctctccccgcctctgcgaaatgggccagcggcctgacccccgcgcagaactgcccgcgggccctggatggggcttggctgatggtcagcatatccagcccagtcctcagcctctccagcctcttgcgaccacagccagagcctcagcaggagcctgttctcatcaccatggcaacagtggtactgactgtcctcacccacacccctgcccctcgagtgagactgggacaagatgctctgctggacttgagctttgcctacatgccccccacctccgaggccgcctcatctctggctccgggtccccctccctttgggctagagtggcgacgccagcacctgggtaagggacatctgctcctggctgcaactcctgggctgaatggccagatgccagcagcccaagaaggggccgtggcatttgctgcttgggatgatgatgagccatggggcccatggaccggaaatgggaccttctggctgcctacagttcaaccctttcaggagggcacctatctggccaccatacacctgccatacctgcaaggacaggtcaccctggagcttgctgtgtacagtgagttgggggacagaggtctccaggggtagagggtgggcactggattgtggggaccgtaatagggggagggatgatggataagagggtgcctgggcaagtaagtagagatagaaagaggttcctgggagttagaggggtaatgggaggctagaagtttcctggaaatttgaggggctttgacatgggtatttctgtgacgcaccaatggagagacagtgggttccctatttcaggagaagaaacctaaccttctttagttctgaggaagccagcaggcaaactgagggtctcttagggaggacagtatggactgatttccctatgctcatttcgtcctctttccccagaaccccccaaagtgtccctgatgccagcaacccttgcacgggccgccccaggggaggcacccccggaattgctctgccttgtgtcccacttctacccttctgggggcctggaggtggagtgggaactccggggtggcccagggggccgctctcagaaggccgaggggcagaggtggctctcggccctgcgccaccattccgatggctctgtcagcctctctgggcacttgcagccgcccccagtcaccactgagcagcatggggcacgctatgcctgtcgaattcaccatcccagcctgcctgcctcggggcgcagcgctgaggtcaccctggaggtagcaggtaagagctgggagctctgcggaatctgagccagcacccaggaagacaggagctcactctcaccccttctgcctgccaggtctttcagggccctcccttgaggacagcgtaggccttttcctgtctgcctttcttctgcttgggctcttcaaggcactgggctgggctggtaagtgtcagccctaccctgaccatgacctgaggttggtggactttccccacctactcccaagagcctgacacccatccctctgccctccacctctaccactccagcatcccatcccttctcaatctttccccacagctgtctacctgtccacctgcaaggattcaaagaaggtacagtgctccacctctctgtatctttcccttgtcactttatctcctcatcctatctcaaaacccatggagggaggctgctggtgtggtaggcagaacctaggcttggaattcacactgatctgggttaaaacctggcactatatcctaactgtaggactctttgagcatgctacttaatctatatgtttccttgggtgtagggattttaaaaagttacttaggcagtgctgtccaatagaaagataatgcaagccacatatgtaaatttaaatactctagtactcacattaaaaaaataagcagaaacaggtaaaaaaaaaaaaaaaaa

SEQ ID NO: 2645 - DNA, 1410 bp, Homo sapiens
ctggagaggatctacccgggtccctgcctggccagtggggaaacaccggtcccccaggcaccttcacctaaccagagcggggatttccaccgcccctcatgccgccctttggaggaaagtgaaagtgaaaggaggaagaggaggcttcatggctgaggaggtcgcagcgccatgaagtccctgtctctgctcctcgctgtggctttgggcctggcgaccgccgtctcagcaggacccgcggtgatcgagtgttggttcgtggaggatgcgagcggaaagggcctggccaagagacccggtgcactgctgttgcgccagggaccgggggaaccgccgccccggccggacctcgaccctgagctctatctcagtgtacacgaccccgcgggcgccctccaggctgccttcaggcggtatccccggggcgcccccgcaccacactgcgagatgagccgcttcgtgcctctccccgcctctgcgaaatgggccagcggcctgacccccgcgcagaactgcccgcgggccctggatggggcttggctgatggtcagcatatccagcccagtcctcagcctctccagcctcttgcgaccacagccagagcctcagcaggagcctgttctcatcaccatggcaacagtggtactgactgtcctcacccacacccctgcccctcgagtgagactgggacaagatgctctgctggacttgagctttgcctacatgccccccacctccgaggccgcctcatctctggctccgggtccccctccctttgggctagagtggcgacgccagcacctgggtaagggacatctgctcctggctgcaactcctgggctgaatggccagatgccagcagcccaagaaggggccgtggcatttgctgcttgggatgatgatgagccatggggcccatggaccggaaatgggaccttctggctgcctacagttcaaccctttcaggagggcacctatctggccaccatacacctgccatacctgcaaggacaggtcaccctggagcttgctgtgtacaaaccccccaaagtgtccctgatgccagcaacccttgcacgggccgccccaggggaggcacccccggaattgctctgccttgtgtcccacttctacccttctgggggcctggaggtggagtgggaactccggggtggcccagggggccgctctcagaaggccgaggggcagaggtggctctcggccctgcgccaccattccgatggctctgtcagcctctctgggcacttgcagccgcccccagtcaccactgagcagcatggggcacgctatgcctgtcgaattcaccatcccagcctgcctgcctcggggcgcagcgctgaggtcaccctggaggtagcaggtaagagctgggagctctgcggaatctga

SEQ ID NO: 2646 - DNA, 2984 bp, Homo sapiens
gcagacggttccgggagccgcacggtcccctctccttccccatcctctcccctcccctctccgggttcccccacccacaggagccttgggccgaccactcccccgatggcctcagccacggaggaccccgttctggagcgttatttcaaaggccacaaagctgcgatcacctccttggacctcagccccaacggcaagcaacttgctactgcttcttgggatacctttctcatgctatggaatttcaagccacatgctagagcttacagatatgtgggtcacaaggatgttgtaaccagcgtgcagttttctccacatggaaacttattggcgtctgcctcacgagacagaaccgtgagactctggattcctgataagagaggaaaattctcagaatttaaagctcatacagctccagttcgaagtgtagacttttcagctgatggccagtttctagctacagcttctgaagacaaatccataaaagtatggagcatgtatcgccagcgcttcctgtattccttgtatcgacatacacactgggtacgctgtgccaaattttcacccgatggaagactaattgtgtcatgtagtgaggataaaactattaaaatttgggataccacaaataagcaatgtgttaataacttctcagattccgttggatttgcaaattttgtggactttaaccctagtggtacatgcatagcttcagcaggttctgatcaaactgtgaaagtctgggatgtaagagtgaacaaattactacagcattaccaagttcacagcggtggagttaattgcatatcattccatccttcgggtaactatctcatcacagcttcttcagatggtacccttaagattctggacctcttagaaggaaggctcatctatacacttcaaggacatacgggacctgtctttactgtttcattttcaaaaggtggagagctatttgcatcaggaggtgcagacacacaggtcttattatggaggactaactttgatgaattgcattgtaaaggtcttaccaaaagaaatctcaaaagattacattttgattcaccaccacatcttcttgatatctacccaagaacaccacatccccatgaggaaaaagttgagactgtagaaattaatccaaagcttgaggtaatcgatttgcagatctctactccccctgttatggatatcctttcttttgattctaccacaacaacagaaaccagtggtaggactctgccagacaagggtgaagaggcctgtggatatttcttgaacccttccttaatgtcaccagaatgtttgccaacaaccacgaaaaagaaaacagaagacatgagtgacctcccctgtgaaagtcaaaggagcatacctctcgctgtgactgatgctttagagcatattatggaacaactcaatgttttgacacagactgtttcaatcttggagcagcgactgactttgacagaggataagctgaaagactgccttgaaaatcagcaaaagcttttcagtgctgtccaacagaaaagctgaataaaaaattcattttcatttgttgggcagaggcccaataaatgaacaaatgtacatacactcaggaaggtagtacaagatactccatacaacacaaccatgtgctatttatcatggcatttcttaaaagggtgagcaacagaacaaaaggcagaaaaggcatacctaaggactaatttaaacacatatcaatgtgaaggactaatttaaattactatcatttatgattgcagtaataaagtgataagcattcaagcaactctgtattttcctcatattattttaaatgtccattttcatttataggccaaatcctgccaggaaagtaaccagatctctggatttcactgttaagtcatttcagattgaccatattcagacagtcatggggtgaaataattcacttacctccaaaatagcgtcctatatgccaataatgagttattgatctgactagttgtatgtctttctgttcaaaatagaaattatcctttcttactaatgccttgaaagaatgaacaaataaaaattcccagaccacagaatttccacagcaagaatacacttattttaattaacaatagcacagatatagcatagggcagtgggttttttagttaatttatggcgtactttgtttatccattggccaacctgaaggaaatgaaactcacctatctttctatcacagatgaatgtgctagatgaatgatttgggttgtatctgatcatggttcacaaaaattatgttagtgtgttttcagtatgctaaaaagtcagagtgatacaaaagtgatatttaaaaatatacacacatgtatgtacacatgcttcagaaatattgttgcttagggtgatttgggcagctaaatagtaagtactttttaaaatttttgcatcatcatcttcctatttaatgaattgtgatttaaaacaaaatgaaaataagccaggtattctaaaagatcctggatacaaattaagaattttgctttattttaaaccaaattgagattaaattgaagaaaagcaagcaaattaatttcagcttgattatcaacctgtatcaagaacaaaaatgggaggaggtgtccacatttatggtgtgtataggtaacatggggaaaatgctattctgtgttttggaaaagaagaaatagtgccgtcctatttatttctatatttagaaatttttctcaaagaaatttcaattgtatctatgagatgggtttctaagtatcttattgtgtgttataagtgccctttaatatcatactaagtgtgagcttctggacattttcaagagcttacaaaaactaagtggcattgtatttttataaccccattgagaagactaagtaagaaatgaaatgtcctatcaattttattttgtcatgcttcaaacaataaagacatttctgctttaaaaaaaaaaaaaaaaa

SEQ ID NO: 2647 - DNA, 1328 bp, Homo sapiens
cgaggctgcgccgcgtggagtggcttggcttaacagcagggagggcagagcgatgctctttgacctcccagaagagtcacgtgggctgacccagagccggggcggaaaggctgcgttagtttcttccgggtcattgacagaagcgtcaattcctgggagtagttcgttggttttctttcccctcatccttttgcctgctcccggcgaggggtggctttgatttcggcgatgagctcccagaaaggcaacgtggctcgttccagacctcagaagcaccagaatacgtttagcttcaaaaatgacaagttcgataaaagtgtgcagaccaagaaaattaatgcaaaacttcatgatggagtatgtcagcgctgtaaagaagttcttgagtggcgtgtaaaatacagcaaatacaaaccattatcaaaacctaaaaagtgtgttaaatgtttacaaaagacagtgaaggattcttatcacataatgtgcaggccatgtgcctgtgaacttgaagtttgcgcaaaatgtggaaagaaagaagacattgttattccgttgaataaagaaacagaaaaaatagaacatactgaaaataatctaagttccaaccatagaagaagctgcagaagaaatgaagaaagtgatgatgatttagattttgatattgatttagaagacacaggaggagaccatcaaatgaattaatatcactgtattaaaagtctgccgggcacagtggctcacgcctgtaatcccaacactttgggaggccaaggagggtggatcacctgaggtcaggagttcgagaccagcctggccaacatggcggaaccccatctccactaaaagtacaaaaaattagctgggcgtggtggctcatgcctgtaatcccagctactcaggaggctgaggcaggaggattgcttgaaccctggaggcggagattgaagtgagctgagttcgtgccattacactccagcctgggtgacagagtgagactctgtctcaaaaaaaataaaataaaaagtcaatttagaatgtgaaattctgaccaccttttggctttgagtattttccaaaagatatttgaaatcctaatgaggaaatcagaaaaagctatggaaaaatagacaaatttcatacatgaacaatataaattgtgtatattacttaacatcaaactaaacaagattcagaattgatggttgtataagaactagctcatgtaaaaataaaataacattattacattgcctcaaaaattggtcctcggtaagtgccttttgataaatgatctcaaataaatgactcatagcaaaaaaaaaaaaaaa

SEQ ID NO: 2648 - DNA, 1221 bp, Homo sapiens
cgaggctgcgccgcgtggagtggcttggcttaacagcagggagggcagagcgatgctctttgacctcccagaagagtcacgtgggctgacccagagccggggcggaaaggctgcgttagtttcttccgggtcattgacagaagcgtcaattcctgggagtagttcgttggttttctttcccctcatccttttgcctgctcccggcgaggggtggctttgatttcggcgatgagctcccagaaaggcaacgtggctcgttccagacctcagaagcaccagaatacgtttagcttcaaaaatgacaagttcgataaaagtgtgcagaccaagtgttaaatgtttacaaaagacagtgaaggattcttatcacataatgtgcaggccatgtgcctgtgaacttgaagtttgcgcaaaatgtggaaagaaagaagacattgttattccgttgaataaagaaacagaaaaaatagaacatactgaaaataatctaagttccaaccatagaagaagctgcagaagaaatgaagaaagtgatgatgatttagattttgatattgatttagaagacacaggaggagaccatcaaatgaattaatatcactgtattaaaagtctgccgggcacagtggctcacgcctgtaatcccaacactttgggaggccaaggagggtggatcacctgaggtcaggagttcgagaccagcctggccaacatggcggaaccccatctccactaaaagtacaaaaaattagctgggcgtggtggctcatgcctgtaatcccagctactcaggaggctgaggcaggaggattgcttgaaccctggaggcggagattgaagtgagctgagttcgtgccattacactccagcctgggtgacagagtgagactctgtctcaaaaaaaataaaataaaaagtcaatttagaatgtgaaattctgaccaccttttggctttgagtattttccaaaagatatttgaaatcctaatgaggaaatcagaaaaagctatggaaaaatagacaaatttcatacatgaacaatataaattgtgtatattacttaacatcaaactaaacaagattcagaattgatggttgtataagaactagctcatgtaaaaataaaataacattattacattgcctcaaaaattggtcctcggtaagtgccttttgataaatgatctcaaataaatgactcatagcaaaaaaaaaaaaaaa

SEQ ID NO: 2649 - DNA, 2980 bp, Homo sapiens
gctactgcccctgctgctgtcgtaggcgaggacggctgttagtgctgctgctgttggttcgtcgcggcggcgaaggaggaggaggaagagggcgaggcgacaagagaagaaggaggcaggcgcggcggcagcggcggcgccccgagccggcggaggcgaggggggggaagatggcggacgtgcttagcgtcctgcgacagtacaacatccagaagaaggagattgtggtgaagggagacgaagtgatcttcggggagttctcctggcccaagaatgtgaagaccaactatgttgtttgggggactggaaaggaaggccaacccagagagtactacacattggattccattttatttctacttaataacgtgcacctttctcatcctgtttatgtccgacgtgcagctactgaaaatattcctgtggttagaagacctgatcgaaaagatctacttggatatctcaatggtgaagcgtcaacatcggcaagtatagacagaagcgctcccttagaaataggtcttcagcgatctactcaagtcaaacgagctgcagatgaagttttagcagaagcaaagaaaccacgaattgaggatgaagagtgtgtgcgccttgataaagagagattggctgcccgtttggagggtcacaaagaagggattgtacagactgaacagattaggtctttgtctgaagctatgtcagtggaaaaaattgctgcaatcaaagccaaaattatggctaagaaaagatctactatcaagactgatctagatgatgacataactgcccttaaacagaggagttttgtggatgctgaggtagatgtgacccgagatattgtcagcagagagagagtatggaggacacgaacaactatcttacaaagcacaggaaagaatttttccaagaacatttttgcaattcttcaatctgtaaaagccagagaagaagggcgtgcacctgaacagcgacctgccccaaatgcagcacctgtggatcccactttgcgcaccaaacagcctatcccagctgcctataacagatacgatcaggaaagattcaaaggaaaagaagaaacggaaggcttcaaaattgacactatgggaacctaccatggtatgacactgaaatctgtaacggagggtgcatctgcccggaagactcagactcctgcagcccagccagtaccaagaccagtttctcaagcaagacctcccccaaatcagaagaaaggatctcgaacacccattatcataattcctgcagctaccacctctttaataaccatgcttaatgcaaaagaccttctacaggacctgaaatttgtcccatcagatgaaaagaagaaacaaggttgtcaacgagaaaatgaaactctaatacaaagaagaaaagaccagatgcaaccagggggcactgcaattagtgttacagtaccttatagagtagtagaccagccccttaaacttatgcctcaagactgggaccgcgttgtagccgtttttgtgcagggtcctgcatggcagttcaaaggttggccatggcttttgcctgatggatcaccagttgatatatttgctaaaattaaagccttccatctgaagtatgatgaagttcgtctggatccaaatgttcagaaatgggatgtaacagtattagaactcagctatcacaaacgtcatttggatagaccagtgttcttacggttttgggaaacattggacaggtacatggtaaagcataaatcgcacttgagattctgaattatttggctcctccatttctggaaattgagactcaagctttatgaatttatcaagaacttaaaaatgaagaaggtcacagattgatcttttataagaccttatttgatgctttgtgcttcaaggagatgatacctgtcatccatataagcaaactttttggcttacaactatttttttaatattagccttctagtctgtaatggaaattgtatattttgatagaagttttttctccattggttaaattagcattacttaaaatttgtttctttagaaaataaatgcaggttataaatgtgtgtatatttagagattataaggctctctgagccatcttctgatttttcattgctctataattctttttactgaaaatactatgttatgaatggtattaaattttagtctctggaacatccaaaaccaagcaaagggatgtgactattttgaatgaatcagaatgtcaacttgtatgtacactatatctacacttactcattatttaaaaagaataatgaaaaatctagatcaattcttcaatttgattgaactgttcagccttttcaagatttctttatttacaaatgattacatttaaatgaatgtacattcttctcactgactttggtgattttgaaacctagaatgatgtgtttctatctgtaatatctttccatttgaaaaaaatctcaaaacacagattaaaaccacaataggctgtagtattttttattttgggagccagagtatgatttgggggaagaatatgtatcagccctattgcagtataactttaagctccttttctctttagtccacttttgattgtaatttttatggtataggattttgaatcttctattttaggcttgtcagtcttggagttcttatcttccattatccctaaatattgataaactcccaggcaccaaagaaaacatttgcttaattgtctgaaaagaaacaagagaaaaacactggtatttttatgtctgtattcaatatggtataaaatataaaaactatattttaacttagtgaaatattttactatttctctacttcagacaaaatgttgcatccaaggtacatcaagtgaccatttgccttgaaccttgatttcactttgttttttttttttccttaaaggcaactaggaagctttactttcctaaagtgtttttgccattggaatttttgctgatcacagt

SEQ ID NO: 2650 - DNA, 6960 bp, Homo sapiens
acttccgccccctccccctgccattggaactagctgagccgaactagttgcggccaccgagcagccggctctcggcacctcctcctccgcctccctgtctcctgttccattcgcctttcctcttctttcctggcccacgccgctccgaggcctcgcgaccgccgagcctgcagcctgccccgcggccaacatgagcttcttgtttggtagtcgctcttctaaaacttttaaaccaaagaagaacattccagagggttctcaccagtatgagctcttaaaacacgcagaagccacacttggcagtggcaaccttcggatggctgtcatgcttcctgaaggggaagatctcaatgaatgggttgcagttaacactgtggatttcttcaatcagatcaacatgctttatggaactatcacagacttctgtacagaagagagttgtccagtgatgtcagctggcccaaaatatgagtatcattgggcagatggaacgaacataaagaaacctattaagtgctctgcaccaaagtatattgattacttgatgacttgggttcaggaccagttggatgatgagacgttatttccatcaaaaattggtgtcccgttcccaaagaatttcatgtctgtggcaaaaactatactcaaacgcctctttagggtttatgctcacatttatcatcagcattttgaccctgtgatccagcttcaggaggaagcacatctaaatacatctttcaagcactttattttttttgtccaggaattcaaccttattgatagaagagaacttgcaccactccaagaactgattgaaaaactcacctcaaaagacagataaaaggatgcagagctgtgcaaattgttcctcaaatgaagcagtgtggagtgtattggggattttgttatattttgtttttatctggattgtttttgtcctaggtttgggggcgggggcttgtttgggttcctttttctttattctgattatgtgaaaccatattctattgctaggggaagccaagaaccattctctatacacttgataagggtaaatttatcttagtgtttttaaacttggttttggttacttgaggagttttttaataatattgtgtgctgcaagaaagtgcttgttgattgaactgccgatggattggtttctgtgtggtataaattgtggcccatttatgaagtccccaaaagagttatgtttttaagtgccttggcaggctcacttctgaggtgcaaaacatagatatagaactgaacagggcttgaaacaatattaggattactacccagggcacttactggtgcatgttgtaacatatctatgataaaagccatagtttacctaaaatggtgatttccagcctttactgctttgaagaaacagaatttgtaaaggtatgcatgtagaacataaaaaatatttcttaattattttttatattgatggtaatatattacgttcaacaatgcttaaagctctacaagcaggtcttttcccacctcttgatatctgtgatactgaaacttgaggatgttgaaatgtattacattttggcttctttctacatgttaactgcactgtagatgtaaaaattcaggttatatataggattgccatcttcagaggtgatgctgaactgtgaggtttcctagtaattgccaaatgagccgtaagtctgcagaattcccttctactttgaagagaaggggataggaatgtatatttggctgggggcatggagatgttcgtatgtatgaggagttagggatggggagtcaagttctagaaagttttgtctgaaaacctttgaatagaatggcatgaagattttaatcaattacttataaacaaagtcttagagacttccttttaggaatcaacttccatgagaagttaaaaataaattattaattttaggtacagacattaaacatggaatttaaggactgttgggggaaattgatcacttcttagcatttccattcagtgaatggagctgatgtttgcctgtcattttaagatgataccataccttctttggttattataggtccagtttgaagcattctgacttctggtttttccaccctgaaaggaaatgtttttctttgcagcagtattagataatgaaaaatgctaattcagtagttattaacttctaaattttattcgccatgactttctagtgaattattaccataaataacaatttcagaaacttagtttttagaataaatattaatttttccacttcagttttattctagaaaataccctttttagaaatccagttttagttttgtcattttcgataaatctttcttcagttagaaatatatatccttccttcagttgaaacatatacctttttcacatctaggaagaaatgcttgctctgaaatagtatagattaaaaacactcagtagaaaagaatctaaaattaaatgaatttgttttgccattaaagtagagcagtgatacaatttaatgccattacaattatgttgactagaaactgcctttttctccacttcatttctagcaattatttaccaagtaccaacagtagaagtaacaggaaagcctggcagagttaaatatcttggacatttattggtaaagcttatttataaactgcagtcagagctagttaatttccttaaatctttttgtattcagatagataatatgaatcattatgggttgattcagaaataaaatttgtgaggtgattttgaatcttgtccatataggaaaatgaagcacagaattactcagtcttccatattgtatttgacttcatatcaatctagtaaaaaaggagttgcaatagccaagtatagagagaatagtgaaaaattaatcttgccctttcaagccttatacagtagtacactgtacttgtttttagtagtaagacctactttcccactatatgtagatagtttgttttcactgtgccagaatctcaggtgcctgcttagagtatttctttaatcacagtcactgggaagtaaggagatgtatatatgtgtatatatggtaacaaagcatagcagttctctaggggagaggcctggcattgcacatggtgttacatggctacaagtaaggaaaaaatcagaaagtgaaagaactgatgtaataaaaggttgatttggttggttcccatgaaagttagtaagatgcccttttaaatataaggatcagtgctttgttctgcagcagagtttgctgataaatgtctgttggattctttttggatttctttaattaatttgtaagtaaccaagataattattttcccccttgctctctatattaatacgtagctataaagcaacagttggttttcttatcctttgataaaagcatcccataaaatataaagtagtaagttaacatagtattattgtcacacacaatgctttttttggttaaatgttgatacgaagcaatgttttggaattactttaattgatggagtagtggtggtagagagaaattaataacaaaaagagtgaaaatattttaattagcagtagatggtgctactggctttcatttgctgacttgattattccctttctcttaaaaaccatggcattagactgcactaaattaacaagcatgttagttgctggtagaggttttggaggttaatttaccttaaattggaagacttttaattgcagtctctttctaccttccctctgttagtcatttgtaaattctaaatggtcaccataaaatgtattaggtaggagaagatacgttttatgtataatatatctcagactgagttactgcctgtcttatcaggatggataaaacactacagtctcttatcaggaaatagagatgatgtggatatttatatattacatatataaccaccagactccattttatatattagcattttccttgcttatgggaaaatagcaaaacaacatttcatttatacttttgtttacccctctctgagacaggttttgataaccactgaaatggtagaatatgtgagatacaaatattgagttgtagaactttctttttaaggtgaataagtcatgccttaacatccaaataagagttcatcttcagagtggttcttttgggagcactgtttattccagctatactgcaaaagtataatgtttttggaactgttctagagcataccatgaaaagcagtttgttattatgcaggaaaatcagtttcatcattttagttacactaaacacttttggcagcttaatatgacctttttaaattttttttattttttttatttttatttctttaagatggagtcttgctctgttgcccgggctggagtacaatggcatgatctcagctcactgcaacctccacctcctgggttcaagcatttctcctgcctcagcctcccaagtagctgggattacaggcagcaccacacctggctaattttcatatttttagtagagatggggtttcaacatattggccaggctggtctcaaactcctgacctcaagtgatccgccctccccagcctcccaaagtgctgggattacaggtgtgagccaccacagccagccagtatgacctatcttaatcatcagctcaactgtaatttaaatttggctgttctctggagctaaaccattagggaagttcaaaggaatgtgccatgatttccgaatttgcacaagagaatgttttaagcattggtagcataattgaataaaagaatagtttcctgatgtcactattttgaagtggaaattatcacttggatgtggaggttttactttttaaaaacattcagcttaattaccttaccttaattaccttagttagatatactaatggaaaaaaaccaagtcctttctctagaacttgttttctatttttgttccttttcatgaaaacttctcaatttaattttaactactgtaggatagtattgattgaatggatactatggaaaagtggatccaatatttaagatagaagtagtttaaggagacaacagcctttactgccatttttttttaaatgttttcactcagatgaacaatttgactttaataaaagactggagatttttgtacaaagaaataggaataagtttcatatactaattatgctgagttttaagcctacatatcacaaaatatttagaattgtataaccttttcatatatttataacttttaatgtctttttaaaagatgtgggaccaaaaatatatttataatttggaaatgtgactgcataccaataagaaaacttaccttattttgaaatttatctgggatattaaagaatctaccaattcttaaaaacacagatttatactttaagcttattttaaaattaaagaatatataccaattcttagaaacactttaaggactactcttaaataacttaaatatcagagttttgttgtaatattaaaatttaccgtggaaatcactgttgttcagctatcaccttaattgtgtatgatatgataaatgtttagcagtaaagctatcttaagatttaatggaaaagtttaatttgaagatgtaacaaaaattctgaccacagttgattctgaatttttaaggctttcctaataggctgatcacagagaataatccattttgaaggtataaaactgcactgtatgtctgtcacttgtagctgaactgattcacattttgacaaaagagagaaaatacaaaaatgagttttgcaaatgtaataactttttctgcatatagaactaaataattgaaaaatatgggctatagttctcaaaggtagatagtaaaatcactggctttttccagctgtatgtttttccactgtgcgtgtacacacacactggaaaataattaggctgattttgcaggtcttcattgttagagattctgaagtatttactgtcaattcataggtttcagtttatttaggaaattagtgtttgacagctttttttaaattatttcactgaagctgagattattagtgatacaaagttaaaatttcaatatttaatttctctatatattattaatattaaattgttttttacttataaattcatgttctcatctgatttaatattaaatttgtataggtgggcgtttcttaccattttgcacaagtttttgtttttctgaaatacttaattgtgcaggttgtaaaaaagattagtgcattttcattttaaggatgctttgctccttaaattgttcgacagaaatgactttttagggaaagtagtttttttggagctactaacttgtatttattattgtacatgcataaccagggtggtgagggcactaatcttgtaggaaacacttacttgatgttttatttgaacttttcctataggtttaacttttactgcatagaattaacactaggaacagtgtcatgaaatctgggttgaaggagaatacagtatatatgagaacacttaaagttcaaatagaaatcatttctgaagacaaaagcagaggaatattgtcagtgccaagtaatggaagaataagggcggcatttacactgtgcaagtattgagaagagtgcataaagacagggaactactctcatggagacagtttctctcttataatcaagtaactagaaggggaaaaatcatctaagttatgaaatccaacataggcgctatattacaaactgtgccggattatgcaaattgtagttgttactgatcaaagtttaattgcttcatttttgtttaaaaagggatactgatgtcagaaaatctgtaatatgttttattcaaaagatgtaaataatgtatacagacttgtatgtgatgggatgggaaatatttaaattctaggtgtttttttttttttaaagaagaaactcaatgtttataagaaaaaaatgaataaatagttacgtttggccatgaatcctgaaa

SEQ ID NO: 2651 - DNA, 3796 bp, Homo sapiens
aacgaaccggaagtgctaaagcctccgaggccaaggccgctgctactgccgccgctgcttcttagtgccgcgttcgccgcctgggttgtcaccggcgccgccgccgaggaagccactgcaaccaggaccggagtggaggcggcgcagcatgaagcggcgcaggcccgctccatagcgcacgtcgggacggtccgggcggggccggggggaaggaaaatgcaacatggcagcagcaatggaaacagaacagctgggtgttgagatatttgaaactgcggactgtgaggagaatattgaatcacaggatcggcctaaattggagcctttttatgttgagcggtattcctggagtcagcttaaaaagctgcttgccgataccagaaaatatcatggctacatgatggctaaggcaccacatgatttcatgtttgtgaagaggaatgatccagatggacctcattcagacagaatctattaccttgccatgtctggtgagaacagagaaaatacactgttttattctgaaattcccaaaactatcaatagagcagcagtcttaatgctctcttggaagcctcttttggatctttttcaggcaacactggactatggaatgtattctcgagaagaagaactattaagagaaagaaaacgcattggaacagtcggaattgcttcttacgattatcaccaaggaagtggaacatttctgtttcaagccggtagtggaatttatcacgtaaaagatggagggccacaaggatttacgcaacaacctttaaggcccaatctagtggaaactagttgtcccaacatacggatggatccaaaattatgccctgctgatccagactggattgcttttatacatagcaacgatatttggatatctaacatcgtaaccagagaagaaaggagactcacttatgtgcacaatgagctagccaacatggaagaagatgccagatcagctggagtcgctacctttgttctccaagaagaatttgatagatattctggctattggtggtgtccaaaagctgaaacaactcccagtggtggtaaaattcttagaattctatatgaagaaaatgatgaatctgaggtggaaattattcatgttacatcccctatgttggaaacaaggagggcagattcattccgttatcctaaaacaggtacagcaaatcctaaagtcacttttaagatgtcagaaataatgattgatgctgaaggaaggatcatagatgtcatagataaggaactaattcaaccttttgagattctatttgaaggagttgaatatattgccagagctggatggactcctgagggaaaatatgcttggtccatcctactagatcgctcccagactcgcctacagatagtgttgatctcacctgaattatttatcccagtagaagatgatgttatggaaaggcagagactcattgagtcagtgcctgattctgtgacgccactaattatctatgaagaaacaacagacatctggataaatatccatgacatctttcatgtttttccccaaagtcacgaagaggaaattgagtttatttttgcctctgaatgcaaaacaggtttccgtcatttatacaaaattacatctattttaaaggaaagcaaatataaacgatccagtggtgggctgcctgctccaagtgatttcaagtgtcctatcaaagaggagatagcaattaccagtggtgaatgggaagttcttggccggcatggatctaatatccaagttgatgaagtcagaaggctggtatattttgaaggcaccaaagactcccctttagagcatcacctgtacgtagtcagttacgtaaatcctggagaggtgacaaggctgactgaccgtggctactcacattcttgctgcatcagtcagcactgtgacttctttataagtaagtatagtaaccagaagaatccacactgtgtgtccctttacaagctatcaagtcctgaagatgacccaacttgcaaaacaaaggaattttgggccaccattttggattcagcaggtcctcttcctgactatactcctccagaaattttctcttttgaaagtactactggatttacattgtatgggatgctctacaagcctcatgatctacagcctggaaagaaatatcctactgtgctgttcatatatggtggtcctcaggttgctattgctggggccccagtcactctgtggatcttctatgatacaggatacacggaacgttatatgggtcaccctgaccagaatgaacagggctattacttaggatctgtggccatgcaagcagaaaagttcccctctgaaccaaatcgtttactgctcttacatggtttcctggatgagaatgtccattttgcacataccagtatattactgagttttttagtgagggctggaaagccatatgatttacagatctatcctcaggagagacacagcataagagttcctgaatcgggagaacattatgaactgcatcttttgcactaccttcaagaaaaccttggatcacgtattgctgctctaaaagtgatataattttgacctgtgtagaactctctggtatacactggctatttaaccaaatgaggaggtttaatcaacagaaaacacagaattgatcatcacattttgatacctgccatgtaacatctactcctgaaaataaatgtggtgccatgcaggggtctacggtttgtggtagtaatctaataccttaaccccacatgctcaaaatcaaatgatacatattcctgagagacccagcaataccataagaattactaaaaaaaaaaaaaaaaaaaagacattagcaccatgtattcatactaccctattttcacttttaatagtattataaacttcatgaacttaattagtgtatttttacagtatacttttgagtttgttaaaatatgatgatattagtgattggtttggttcagttccagaatctttgactagttacagatttgatagcacttaaatgtaattgaatagcttatgcttcattgcttgggcatatccagcatgttatgaactaataactattaaacttgacttaaccagtcattcattaataatttttcaaggataacttagtggcctcctaaagacacttgttttggcactgaccagtttttagccaatttaatctgtatctagtataaataattctcatttttctttgatgatattaacagagtgggcttttccttttgcataaaggctagtaactgtatatgtagcatggatttaattagtcatgatattgataattacaggcagaaaatttttaatcaaatgattagagcttaaatatttgcaggcaagtttttttttttcctttaagaaaaggaaaaagtacacattcactagaattcttcagaaaatttagtggtgccagtttccatttggtatttccttattaaaatattctagaattttaaggagattgaagggaatcacagtggggtggggagacctgggtttggggaatgacagagagaagaggtggtgagggcctgattaaaaactaagcagaagtagttttaacaaaaatactcatgaaaatgtttggaaactgaaatttaaacaactgtaatattaaggaaaccagaatcaataaatcactgtcttgccagcacagctacagagtaacatgattcaggggaggaaaagttccttagagttacttttataattctttttttttttcctcttaggtttagaaatcttacaaatttaaactttatcctttta

SEQ ID NO: 2652 - DNA, 4096 bp, Homo sapiens
aacgaaccggaagtgctaaagcctccgaggccaaggccgctgctactgccgccgctgcttcttagtgccgcgttcgccgcctgggttgtcaccggcgccgccgccgaggaagccactgcaaccaggaccggagtggaggcggcgcagcatgaagcggcgcaggcccgctccatagcgcacgtcgggacggtccgggcggggccggggggaaggaaaatgcaacatggcagcagcaatggaaacagaacagctgggtgttgagatatttgaaactgcggactgtgaggagaatattgaatcacaggatcggcctaaattggagcctttttatgttgagcggtattcctggagtcagcttaaaaagctgcttgccgataccagaaaatatcatggctacatgatggctaaggcaccacatgatttcatgtttgtgaagaggaatgatccagatggacctcattcagacagaatctattaccttgccatgtctggtgagaacagagaaaatacactgttttattctgaaattcccaaaactatcaatagagcagcagtcttaatgctctcttggaagcctcttttggatctttttcaggcaacactggactatggaatgtattctcgagaagaagaactattaagagaaagaaaacgcattggaacagtcggaattgcttcttacgattatcaccaaggaagtggaacatttctgtttcaagccggtagtggaatttatcacgtaaaagatggagggccacaaggatttacgcaacaacctttaaggcccaatctagtggaaactagttgtcccaacatacggatggatccaaaattatgccctgctgatccagactggattgcttttatacatagcaacgatatttggatatctaacatcgtaaccagagaagaaaggagactcacttatgtgcacaatgagctagccaacatggaagaagatgccagatcagctggagtcgctacctttgttctccaagaagaatttgatagatattctggctattggtggtgtccaaaagctgaaacaactcccagtggtggtaaaattcttagaattctatatgaagaaaatgatgaatctgaggtggaaattattcatgttacatcccctatgttggaaacaaggagggcagattcattccgttatcctaaaacaggtacagcaaatcctaaagtcacttttaagatgtcagaaataatgattgatgctgaaggaaggatcatagatgtcatagataaggaactaattcaaccttttgagattctatttgaaggagttgaatatattgccagagctggatggactcctgagggaaaatatgcttggtccatcctactagatcgctcccagactcgcctacagatagtgttgatctcacctgaattatttatcccagtagaagatgatgttatggaaaggcagagactcattgagtcagtgcctgattctgtgacgccactaattatctatgaagaaacaacagacatctggataaatatccatgacatctttcatgtttttccccaaagtcacgaagaggaaattgagtttatttttgcctctgaatgcaaaacaggtttccgtcatttatacaaaattacatctattttaaaggaaagcaaatataaacgatccagtggtgggctgcctgctccaagtgatttcaagtgtcctatcaaagaggagatagcaattaccagtggtgaatgggaagttcttggccggcatggatctaatatccaagttgatgaagtcagaaggctggtatattttgaaggcaccaaagactcccctttagagcatcacctgtacgtagtcagttacgtaaatcctggagaggtgacaaggctgactgaccgtggctactcacattcttgctgcatcagtcagcactgtgacttctttataagtaagtatagtaaccagaagaatccacactgtgtgtccctttacaagctatcaagtcctgaagatgacccaacttgcaaaacaaaggaattttgggccaccattttggattcagcaggtcctcttcctgactatactcctccagaaattttctcttttgaaagtactactggatttacattgtatgggatgctctacaagcctcatgatctacagcctggaaagaaatatcctactgtgctgttcatatatggtggtcctcaggtgcagttggtgaataatcggtttaaaggagtcaagtatttccgcttgaataccctagcctctctaggttatgtggttgtagtgatagacaacaggggatcctgtcaccgagggcttaaatttgaaggcgcctttaaatataaaatgggtcaaatagaaattgacgatcaggtggaaggactccaatatctagcttctcgatatgatttcattgacttagatcgtgtgggcatccacggctggtcctatggaggatacctctccctgatggcattaatgcagaggtcagatatcttcagggttgctattgctggggccccagtcactctgtggatcttctatgatacaggatacacggaacgttatatgggtcaccctgaccagaatgaacagggctattacttaggatctgtggccatgcaagcagaaaagttcccctctgaaccaaatcgtttactgctcttacatggtttcctggatgagaatgtccattttgcacataccagtatattactgagttttttagtgagggctggaaagccatatgatttacagatctatcctcaggagagacacagcataagagttcctgaatcgggagaacattatgaactgcatcttttgcactaccttcaagaaaaccttggatcacgtattgctgctctaaaagtgatataattttgacctgtgtagaactctctggtatacactggctatttaaccaaatgaggaggtttaatcaacagaaaacacagaattgatcatcacattttgatacctgccatgtaacatctactcctgaaaataaatgtggtgccatgcaggggtctacggtttgtggtagtaatctaataccttaaccccacatgctcaaaatcaaatgatacatattcctgagagacccagcaataccataagaattactaaaaaaaaaaaaaaaaaaaagacattagcaccatgtattcatactaccctattttcacttttaatagtattataaacttcatgaacttaattagtgtatttttacagtatacttttgagtttgttaaaatatgatgatattagtgattggtttggttcagttccagaatctttgactagttacagatttgatagcacttaaatgtaattgaatagcttatgcttcattgcttgggcatatccagcatgttatgaactaataactattaaacttgacttaaccagtcattcattaataatttttcaaggataacttagtggcctcctaaagacacttgttttggcactgaccagtttttagccaatttaatctgtatctagtataaataattctcatttttctttgatgatattaacagagtgggcttttccttttgcataaaggctagtaactgtatatgtagcatggatttaattagtcatgatattgataattacaggcagaaaatttttaatcaaatgattagagcttaaatatttgcaggcaagtttttttttttcctttaagaaaaggaaaaagtacacattcactagaattcttcagaaaatttagtggtgccagtttccatttggtatttccttattaaaatattctagaattttaaggagattgaagggaatcacagtggggtggggagacctgggtttggggaatgacagagagaagaggtggtgagggcctgattaaaaactaagcagaagtagttttaacaaaaatactcatgaaaatgtttggaaactgaaatttaaacaactgtaatattaaggaaaccagaatcaataaatcactgtcttgccagcacagctacagagtaacatgattcaggggaggaaaagttccttagagttacttttataattctttttttttttcctcttaggtttagaaatcttacaaatttaaactttatcctttta

SEQ ID NO: 2653 - DNA, 4086 bp, Homo sapiens
attccgagtcaaccaccgttcactgggcgccccttgagctctgggcgctggcctcctggcttccacgctttgatggtgaggaaaggaaagattcctgtgagaagagcaggatgagcagagggattctatgcttgaagtcgagtcacttgaaaaagatctctttgaatgtggaagagatctgagcagatgaaaataaaatcaggaaaatgcaacatggcagcagcaatggaaacagaacagctgggtgttgagatatttgaaactgcggactgtgaggagaatattgaatcacaggatcggcctaaattggagcctttttatgttgagcggtattcctggagtcagcttaaaaagctgcttgccgataccagaaaatatcatggctacatgatggctaaggcaccacatgatttcatgtttgtgaagaggaatgatccagatggacctcattcagacagaatctattaccttgccatgtctggtgagaacagagaaaatacactgttttattctgaaattcccaaaactatcaatagagcagcagtcttaatgctctcttggaagcctcttttggatctttttcaggcaacactggactatggaatgtattctcgagaagaagaactattaagagaaagaaaacgcattggaacagtcggaattgcttcttacgattatcaccaaggaagtggaacatttctgtttcaagccggtagtggaatttatcacgtaaaagatggagggccacaaggatttacgcaacaacctttaaggcccaatctagtggaaactagttgtcccaacatacggatggatccaaaattatgccctgctgatccagactggattgcttttatacatagcaacgatatttggatatctaacatcgtaaccagagaagaaaggagactcacttatgtgcacaatgagctagccaacatggaagaagatgccagatcagctggagtcgctacctttgttctccaagaagaatttgatagatattctggctattggtggtgtccaaaagctgaaacaactcccagtggtggtaaaattcttagaattctatatgaagaaaatgatgaatctgaggtggaaattattcatgttacatcccctatgttggaaacaaggagggcagattcattccgttatcctaaaacaggtacagcaaatcctaaagtcacttttaagatgtcagaaataatgattgatgctgaaggaaggatcatagatgtcatagataaggaactaattcaaccttttgagattctatttgaaggagttgaatatattgccagagctggatggactcctgagggaaaatatgcttggtccatcctactagatcgctcccagactcgcctacagatagtgttgatctcacctgaattatttatcccagtagaagatgatgttatggaaaggcagagactcattgagtcagtgcctgattctgtgacgccactaattatctatgaagaaacaacagacatctggataaatatccatgacatctttcatgtttttccccaaagtcacgaagaggaaattgagtttatttttgcctctgaatgcaaaacaggtttccgtcatttatacaaaattacatctattttaaaggaaagcaaatataaacgatccagtggtgggctgcctgctccaagtgatttcaagtgtcctatcaaagaggagatagcaattaccagtggtgaatgggaagttcttggccggcatggatctaatatccaagttgatgaagtcagaaggctggtatattttgaaggcaccaaagactcccctttagagcatcacctgtacgtagtcagttacgtaaatcctggagaggtgacaaggctgactgaccgtggctactcacattcttgctgcatcagtcagcactgtgacttctttataagtaagtatagtaaccagaagaatccacactgtgtgtccctttacaagctatcaagtcctgaagatgacccaacttgcaaaacaaaggaattttgggccaccattttggattcagcaggtcctcttcctgactatactcctccagaaattttctcttttgaaagtactactggatttacattgtatgggatgctctacaagcctcatgatctacagcctggaaagaaatatcctactgtgctgttcatatatggtggtcctcaggtgcagttggtgaataatcggtttaaaggagtcaagtatttccgcttgaataccctagcctctctaggttatgtggttgtagtgatagacaacaggggatcctgtcaccgagggcttaaatttgaaggcgcctttaaatataaaatgggtcaaatagaaattgacgatcaggtggaaggactccaatatctagcttctcgatatgatttcattgacttagatcgtgtgggcatccacggctggtcctatggaggatacctctccctgatggcattaatgcagaggtcagatatcttcagggttgctattgctggggccccagtcactctgtggatcttctatgatacaggatacacggaacgttatatgggtcaccctgaccagaatgaacagggctattacttaggatctgtggccatgcaagcagaaaagttcccctctgaaccaaatcgtttactgctcttacatggtttcctggatgagaatgtccattttgcacataccagtatattactgagttttttagtgagggctggaaagccatatgatttacagatctatcctcaggagagacacagcataagagttcctgaatcgggagaacattatgaactgcatcttttgcactaccttcaagaaaaccttggatcacgtattgctgctctaaaagtgatataattttgacctgtgtagaactctctggtatacactggctatttaaccaaatgaggaggtttaatcaacagaaaacacagaattgatcatcacattttgatacctgccatgtaacatctactcctgaaaataaatgtggtgccatgcaggggtctacggtttgtggtagtaatctaataccttaaccccacatgctcaaaatcaaatgatacatattcctgagagacccagcaataccataagaattactaaaaaaaaaaaaaaaaaaaagacattagcaccatgtattcatactaccctattttcacttttaatagtattataaacttcatgaacttaattagtgtatttttacagtatacttttgagtttgttaaaatatgatgatattagtgattggtttggttcagttccagaatctttgactagttacagatttgatagcacttaaatgtaattgaatagcttatgcttcattgcttgggcatatccagcatgttatgaactaataactattaaacttgacttaaccagtcattcattaataatttttcaaggataacttagtggcctcctaaagacacttgttttggcactgaccagtttttagccaatttaatctgtatctagtataaataattctcatttttctttgatgatattaacagagtgggcttttccttttgcataaaggctagtaactgtatatgtagcatggatttaattagtcatgatattgataattacaggcagaaaatttttaatcaaatgattagagcttaaatatttgcaggcaagtttttttttttcctttaagaaaaggaaaaagtacacattcactagaattcttcagaaaatttagtggtgccagtttccatttggtatttccttattaaaatattctagaattttaaggagattgaagggaatcacagtggggtggggagacctgggtttggggaatgacagagagaagaggtggtgagggcctgattaaaaactaagcagaagtagttttaacaaaaatactcatgaaaatgtttggaaactgaaatttaaacaactgtaatattaaggaaaccagaatcaataaatcactgtcttgccagcacagctacagagtaacatgattcaggggaggaaaagttccttagagttacttttataattctttttttttttcctcttaggtttagaaatcttacaaatttaaactttatcctttta

SEQ ID NO: 2654 - DNA, 4079 bp, Homo sapiens
aacgaaccggaagtgctaaagcctccgaggccaaggccgctgctactgccgccgctgcttcttagtgccgcgttcgccgcctgggttgtcaccggcgccgccgccgaggaagccactgcaaccaggaccggagtggaggcggcgcagcatgaagcggcgcaggcccgctccatagcgcacgtcgggacggtccgggcggggccggggggaaggctttgatggtgaggaaaggaaagattcctgtgagaagagcaggatgagcagagggattctatgcttgaagtcgagtcacttgaaaaagatctctttgaatgtggaagagatctgagcagatgaaaataaaatcaggaaaatgcaacatggcagcagcaatggaaacagaacagctgggtgttgagatatttgaaactgcggactgtgaggagaatattgaatcacaggatcggcctaaattggagcctttttatgttgagcggtattcctggagtcagcttaaaaagctgcttgccgataccagaaaatatcatggctacatgatggctaaggcaccacatgatttcatgtttgtgaagaggaatgatccagatggacctcattcagacagaatctattaccttgccatgtctggtgagaacagagaaaatacactgttttattctgaaattcccaaaactatcaatagagcagcagtcttaatgctctcttggaagcctcttttggatctttttcaggcaacactggactatggaatgtattctcgagaagaagaactattaagagaaagaaaacgcattggaacagtcggaattgcttcttacgattatcaccaaggaagtggaacatttctgtttcaagccggtagtggaatttatcacgtaaaagatggagggccacaaggatttacgcaacaacctttaaggcccaatctagtggaaactagttgtcccaacatacggatggatccaaaattatgccctgctgatccagactggattgcttttatacatagcaacgatatttggatatctaacatcgtaaccagagaagaaaggagactcacttatgtgcacaatgagctagccaacatggaagaagatgccagatcagctggagtcgctacctttgttctccaagaagaatttgatagatattctggctattggtggtgtccaaaagctgaaacaactcccagtggtggtaaaattcttagaattctatatgaagaaaatgatgaatctgaggtggaaattattcatgttacatcccctatgttggaaacaaggagggcagattcattccgttatcctaaaacaggtacagcaaatcctaaagtcacttttaagatgtcagaaataatgattgatgctgaaggaaggatcatagatgtcatagataaggaactaattcaaccttttgagattctatttgaaggagttgaatatattgccagagctggatggactcctgagggaaaatatgcttggtccatcctactagatcgctcccagactcgcctacagatagtgttgatctcacctgaattatttatcccagtagaagatgatgttatggaaaggcagagactcattgagtcagtgcctgattctgtgacgccactaattatctatgaagaaacaacagacatctggataaatatccatgacatctttcatgtttttccccaaagtcacgaagaggaaattgagtttatttttgcctctgaatgcaaaacaggtttccgtcatttatacaaaattacatctattttaaaggaaagcaaatataaacgatccagtggtgggctgcctgctccaagtgatttcaagtgtcctatcaaagaggagatagcaattaccagtggtgaatgggaagttcttggccggcatggatctaatatccaagttgatgaagtcagaaggctggtatattttgaaggcaccaaagactcccctttagagcatcacctgtacgtagtcagttacgtaaatcctggagaggtgacaaggctgactgaccgtggctactcacattcttgctgcatcagtcagcactgtgacttctttataagtaagtatagtaaccagaagaatccacactgtgtgtccctttacaagctatcaagtcctgaagatgacccaacttgcaaaacaaaggaattttgggccaccattttggattcagcaggtcctcttcctgactatactcctccagaaattttctcttttgaaagtactactggatttacattgtatgggatgctctacaagcctcatgatctacagcctggaaagaaatatcctactgtgctgttcatatatggtggtcctcaggtgcagttggtgaataatcggtttaaaggagtcaagtatttccgcttgaataccctagcctctctaggttatgtggttgtagtgatagacaacaggggatcctgtcaccgagggcttaaatttgaaggcgcctttaaatataaaatggttgctattgctggggccccagtcactctgtggatcttctatgatacaggatacacggaacgttatatgggtcaccctgaccagaatgaacagggctattacttaggatctgtggccatgcaagcagaaaagttcccctctgaaccaaatcgtttactgctcttacatggtttcctggatgagaatgtccattttgcacataccagtatattactgagttttttagtgagggctggaaagccatatgatttacagatctatcctcaggagagacacagcataagagttcctgaatcgggagaacattatgaactgcatcttttgcactaccttcaagaaaaccttggatcacgtattgctgctctaaaagtgatataattttgacctgtgtagaactctctggtatacactggctatttaaccaaatgaggaggtttaatcaacagaaaacacagaattgatcatcacattttgatacctgccatgtaacatctactcctgaaaataaatgtggtgccatgcaggggtctacggtttgtggtagtaatctaataccttaaccccacatgctcaaaatcaaatgatacatattcctgagagacccagcaataccataagaattactaaaaaaaaaaaaaaaaaaaagacattagcaccatgtattcatactaccctattttcacttttaatagtattataaacttcatgaacttaattagtgtatttttacagtatacttttgagtttgttaaaatatgatgatattagtgattggtttggttcagttccagaatctttgactagttacagatttgatagcacttaaatgtaattgaatagcttatgcttcattgcttgggcatatccagcatgttatgaactaataactattaaacttgacttaaccagtcattcattaataatttttcaaggataacttagtggcctcctaaagacacttgttttggcactgaccagtttttagccaatttaatctgtatctagtataaataattctcatttttctttgatgatattaacagagtgggcttttccttttgcataaaggctagtaactgtatatgtagcatggatttaattagtcatgatattgataattacaggcagaaaatttttaatcaaatgattagagcttaaatatttgcaggcaagtttttttttttcctttaagaaaaggaaaaagtacacattcactagaattcttcagaaaatttagtggtgccagtttccatttggtatttccttattaaaatattctagaattttaaggagattgaagggaatcacagtggggtggggagacctgggtttggggaatgacagagagaagaggtggtgagggcctgattaaaaactaagcagaagtagttttaacaaaaatactcatgaaaatgtttggaaactgaaatttaaacaactgtaatattaaggaaaccagaatcaataaatcactgtcttgccagcacagctacagagtaacatgattcaggggaggaaaagttccttagagttacttttataattctttttttttttcctcttaggtttagaaatcttacaaatttaaactttatcctttta

SEQ ID NO: 2655 - DNA, 2578 bp, Homo sapiens
atggcatcacacagtgcaatacccaatggcaggggcggtgctccatccctgcagacgtcatcgagggcacacctggggtcgtctagggtcatggacctggccacagagcagaaactgggcccgaacggagcggggcctgctgagcgggcgcggcaccagccgccgcaacccaaagccccgggcttcctgcagccaccgccgctgcgccagcccaggacgaccccgccgccaggggcccagtgcgaggtccccgccagcccccagcggccttccccgcccggggcgctcccagagcaaacgaggtccctgagagctccacctagttcacaggataaaatcccacagcagaactcggagtcagcaatggctaagccccaggtggttgtagctcctgtattaaggtctaagctgtctgtgaatgcccctgaattttacccttcaggttattcctccagttacacagaatcctatgaggttggttgtgaggattatcctactccatcagaatatgttcaggattttttgaatcatcttacagagcagcctggcagttttgaaactgaaattgaacagtttgcagagaccctgaatggttgcgttacaacagatgatgctttgcaagaacttgcggaactcatctatcaacaggccacgtctatcccaaatttctcttatatgggagctcgcctgtgtaattacctgtcccatcatctgacaattagcccacagagtggcaacttccgccaattgctacttcaaagatgtcggactgaatatgaagttaaagatcaagctgcaaaaggggatgaagttactcgaaaacgatttcatgcatttgtattctttctgggagaactttatcttaacctggagatcaagggaacaaatggacaggttacaagagcagatattcttcaggttggtcttcgagaattgctgaatgccctgttttctaatcctatggatgacaatttaatttgtgcagtaaaattgttaaaattgacaggatcagttttggaagatgcttggaaggaaaaaggaaagatggatatggaagaaattattcagagaattgaaaacgttgtcctagatgcaaactgcagtagagatgtaaaacagatgctcttgaagcttgtagaactccggtcaagtaactggggtagagtccatgcaacttcaacatatagagaagcaacaccagaaaatgatcctaactactttatgaatgaaccaacattttatacatctgatggtgttcctttcactgcagctgatccagattaccaagagaaataccaagaattacttgaaagagaggacttttttccagattatgaagaaaatggaacagatttatccggggctggtgatccatacttggatgatattgatgatgagatggacccagagatagaagaagcttatgaaaagttttgtttggaatcagagcgtaagcgaaaacagtaaagttaaatttcagcatatcagttttataaagcagtttaggtatggtgatttagcagaacacaggagagcaagaaaatgtgtcacatctataccaaattaaggatgttgagttatgttactaatgtatgcaactttaattttgtttaacactatctgccaaaataaactttattccctataacttaaaatgtgtatatatatataatagtttattatgtacagttaattctactgttttggctgcaataaaatcgattttgaaataaatgaaatgttgaaaattttgctagttggttagatgcttatcctttaaattctacttttcttgaggtgaaaaagtcttcctctggaaatacatatcactgcaaaaatgtagcatccttttttaggtaggagtattatagctttcattttagtttgacatttagtgtcccaatgaattgaatttcaaatatgaatcataatcttgaaaatctttagcactaaagtcttggaatatatcaacaactgatttacatatgcagatgctatttgataccaagggctttttaaatgtcatgggggggaaatcccaacttggtgaactcccagctaaacagccaagacttcactgaagatttattccaattctagaattgttcttttttatttttattttttcaactgactaacttcattaccttaaagcctagaacattattctgctttatttatatggctttctcacttttattttgtagcatgggttgcatcgacttttttactagagaattttactagatatttgtcattcaagttttcatctgctttataattgatacaccttgagggtcacttttctaatacttttactataatgtggtaccacctcagccctaataaataatatttttacctaatgtcaaatctttttccagctaactaaaaactatgtacaaaaggattgcttgtaaatatgcatgtaaatagttctgttaataacccactgttttacatttggtacatctgtgtctgctaatacagttagctttctcacttttctgcttgtttgttcagtctgaattaaaattagactttgaaaataaagcttaaatagttctgtttcctctaa

SEQ ID NO: 2656 - DNA, 1286 bp, Homo sapiens
gcttcctcgttgcccccgccgcgggcgcgagatggattccgggtgctggttgttcggcggcgagttcgaggactcggtgttcgaggagaggccggagcggcggtcaggaccgcccgcgtcctactgcgccaagctctgcgagccgcagtggttttatgaagaaacagaaagcagtgatgatgttgaagtgctgactctcaagaaattcaaaggagacctggcctacagacgacaagagtatcagaaagcactgcaggagtattccagtatctctgaaaaattgtcatcaaccaattttgccatgaaaagggatgtccaggaaggtcaggctcggtgtctggctcacctgggtaggcatatggaggcgctggagattgctgcaaacttggaaaataaagcaaccaacacagaccatttaaccacggtactctacctccagcttgctatttgttcaagtttgcagaacttggagaaaacaattttctgcctgcagaaactgatttctttgcatccttttaatccttggaactggggcaaattggcagaggcttacctgaatctggggccagctctttcagcagcacttgcgtcatctcagaaacagcacagtttcacctcaagtgacaaaactatcaaatccttctttccacactcaggaaaagactgtcttttgtgttttcctgaaaccttgcctgagagctctttattttctgtggaagcgaatagcagtaatagccagaaaaatgagaaagctctgacaaatatccaaaactgtatggcagaaaagagagaaacagtgttgatagagactcagctgaaagcatgtgcctcttttatacgaaccaggcttctgcttcagtttacccaacctcagcaaacatcgtttgctttggagaggaacttaaggactcagcaggaaattgaagataaaatgaaagggttcagcttcaaagaagacactttgctgttgatagctgaggttatgggagaagatatcccagaaaaaataaaagatgaagttcacccagaggtgaagtgtgttggctccgtagccctgactgccttggtgactgtatcctcagaagaatttgaagacaagtggttcagaaagatcaaagaccatttctgtccatttgaaaatcagttccatacagagatacaaatcttggcttagtgggttataaaaaacaaaaccacaaatatcttgtactgtattaattgtccttgtttacttcagacaggatccattgctaatcatggagtataaatgattatttatgttttat

SEQ ID NO: 2657 - DNA, 3559 bp, Homo sapiens
cctagtacttcctgttctcggctaaccctggcgctgggccgggggctggagagtgaccgtggtctgagtgacctggggcggctgcgtgggccggggtgggcctcaaagccgggcaccagacgggaggggcggcgctcgggccgcgcgctgcccgcgccgggtcctggcgggcggcgaggctggggctgactcctgcctcaggatgccgggggaggaagaggagcgggccttcctggtggcccgcgaggagctggcgagcgccctgaggagggattccgggcaggcgttttccctggagcagctccggccgctactagccagctctctgccgctagccgcccgctacctgcagctggacgccgcacgccttgtccgctgcaacgctcatggggagccccgaaactacctcaacaccctgtccacggctctgaacatcctggagaaatacggccgcaaccttctcagccctcagcggcctcggtactggcgtggtgtcaagtttaataaccctgtctttcgcagcacggtggatgctgtgcaggggggccgagatgtgctgcgattatatggctacacagaggagcaaccagatgggttgagcttccccgaagggcaggaggagccagatgagcaccaggttgctacagtcacactggaagtactgctgcttcggacagagctcagcctgctattgcagaatactcatccaagacagcaggcactggagcagctgttggaagacaaggttgaagatgatatgctgcagctttcagaatttgaccccctattgagagagattgctcctggccccctcaccacaccctctgtcccaggctccactcctggtccctgcttcctctgtggttctgccccaggcacactgcactgcccatcctgtaaacaggccctgtgtccagcctgtgaccacctgttccatggacacccatcccgtgctcatcacctccgccagaccctgcctggggtcctgcagggtacccacctgagccccagtttacctgcctcagcccaaccacggccccagtcgacctccctgctggccctgggagacagctctctttcttcccctaatcctgcaagtgctcatttgccctggcactgtgctgcctgtgccatgctaaatgagccttgggcagtgctctgtgtggcctgtgatcggccccgaggctgtaaggggttggggttgggaactgagggtccccaaggaactggaggcctagaacctgatcttgcacggggtcggtgggcctgccagagctgtacctttgagaatgaggcagctgctgtgctatgttccatatgtgagcgacctcggctggcccagcctcccagcttggtggtggattcccgagatgctggcatttgcctgcaaccccttcagcagggggatgctttgctggcctctgcccagagtcaagtctggtactgtattcactgtaccttctgcaactcgagccctggctgggtgtgtgttatgtgcaaccggactagtagccccattccagcacaacatgccccccggccctatgccagctctttggaaaagggaccccccaagcctgggcccccacgacgccttagtgcccccctgcccagttcctgtggagatcctgagaagcagcgccaagacaagatgcgggaagaaggcctccagctagtgagcatgatccggaaggggaagccgcaggtgcctgtccagaggagatcttctcggctctgcagtactcgggcactgaggtgcctctgcagtggttgcgctcagaactgccctacgtcctggagatggtggctgagctggctggacagcaggaccctgggctgggtgccttttcctgtcaggaggcccggagagcctggctggatcgtcatggcaaccttgatgaagctgtggaggagtgtgtgaggaccaggcgaaggaaggtgcaggagctccagtctctaggctttgggcctgaggaggggtctctccaggcattgttccagcacggaggtgatgtgtcacgggccctgactgagctacagcgccaacgcctagagcccttccgccagcgcctctgggacagtggccctgagcccaccccttcctgggatgggccagacaagcagagcctggtcaggcggcttttggcagtctacgcactccccagctggggccgggcagagctggcactgtcactgctgcaggagacacccaggaactatgagttgggggatgtggtagaagctgtgaggcacagccaggaccgggccttcctgcgccgcttgcttgcccaggagtgtgccgtgtgtggctgggccctgccccacaaccggatgcaggccctgacttcctgtgagtgcaccatctgtcctgactgcttccgccagcacttcaccatcgccttgaaggagaagcacatcacagacatggtgtgccctgcctgtggccgccccgacctcaccgatgacacacagttgctcagctacttctctacccttgacatccagcttcgcgagagcctagagccagatgcctatgcgttgttccataagaagctgaccgagggtgtgctgatgcgggaccccaagttcttgtggtgtgcccagtgctcctttggcttcatatatgagcgtgagcagctggaggcaacttgtccccagtgtcaccagaccttctgtgtgcgctgcaagcgccagtgggaggagcagcaccgaggtcggagctgtgaggacttccagaactggaaacgcatgaacgacccagaataccaggcccagggcctagcaatgtatcttcaggaaaacggcattgactgccccaaatgcaagttctcgtacgccctggcccgaggaggctgcatgcactttcactgtacccagtgccgccaccagttctgcagcggctgctacaatgccttttacgccaagaataaatgtccagagcctaactgcagggtgaaaaagtccctgcacggccaccaccctcgagactgcctcttctacctgcgggactggactgctctccggcttcagaagctgctacaggacaataacgtcatgtttaatacagagcctccagctggggcccgggcagtccctggaggcggctgccgagtgatagagcagaaggaggttcccaatgggctcagggacgaagcttgtggcaaggaaactccagctggctatgccggcctgtgccaggcacactacaaagagtatcttgtgagcctcatcaatgcccactcgctggacccagccaccttgtatgaggtggaagagctggagacggccactgagcgctacctgcacgtacgcccccagcctttggctggagaggatccccctgcttaccaggcccgcttgttacagaagctgacagaagaggtacccttgggacagagtatcccccgcaggcggaagtagctgagggcaagggtcccgatgagggtcccatggcctgctccctcaggaacagctccagcaccaataaagaggcatcttaccaccaaaaaaaaaaaaaaaaaaaaaaaaaaaaaaaaaaaaaaaaaaaaaaaaaaaaaaa

SEQ ID NO: 2658 - DNA, 6341 bp, Homo sapiens
actctgcggcgggaagaaccacctggaggtggcggggggggttgatttctatcacccctagggagagaggatcggggacccgctgatcttccagctcccctcacccaacgtcgtgcatgctgcagacagacctttccgtccttcatgaacacacgtgtggtagacagatgactgtcctgtaccctgtgctgctctaggtgtgccagacgtggagctgtccagttgggagaagatggattccaaagatgaaagctcgcatgtgtggccgacatctgcagagcatgaacagaatgccgcacaggtgcactttgttccggacacaggaacagtggctcagattgtctataccgatgaccaggttcgccccccacagcaggtggtgtacacggcagatggtgcctcctacacatcagtggatggtccagagcacacgctggtgtacatccacccggtggaagctgcacagactctgtttacagaccccggccaggtagcttatgtccaacaggatgctacagctcagcaggcctcattgccagttcataaccaggtgctgccttccatcgagagtgtagatgggtccgaccctttggcaactctgcagacccctctaggcagactggaggccaaagaggaagaggatgaggatgaggacgaggacactgaggaagatgaggaagaagacggtgaggacacggatctggatgactgggagccagacccgccccggcccttcgacccacacgacttgtggtgtgaggagtgcaataacgcgcatgcttcagtgtgtccgaagcacggccccttgcacccgatccccaaccggccggtgctcacccgggccagggcgagcctccccctggtgctctacatagacaggtttctgggcggggtgttctccaagcggcgcatccccaagcgcacccagtttggccccgtggaggggcctctcgtcaggggctcggagctgaaagactgttacattcacctcaaggtttctcttgataaaggggacaggaaagaaagggatttacatgaagacctatggtttgagttgtctgatgagacgctttgtaactggatgatgtttgtacggccagcccagaatcacctggagcagaacctggtggcttaccagtatggccaccatgtgtattatacaaccataaaaaatgtggagcccaagcaggaactgaaggtgtggtatgccgcatcctatgctgagttcgtgaaccagaaaattcatgacatttctgaggaagaaaggaaagttcttcgagagcaagagaagaattggccctgctatgaatgtaaccgccgatttataagctcggagcagttgcaacagcatctcaattctcatgatgagaaactagatgtgtttagcagaacaagaggcagaggaaggggacgaggcaagaggcgattcggtccaggtcgacggccggggcgtcctccaaaatttatccgcctggaaatcaccagcgaaaatggggaaaagagtgacgatgggacacaggacttgctacattttcccacaaaggagcaatttgatgaggctgaaccagccactctgaatgggctggatcaaccagaacagaccactatcccaatccctcagctgccacaggaaacccagtcttccctggaacatgaaccagaaactcacaccctgcacctgcagccgcagcatgaagagagcgtggtgcccacccagagcacgctgacagccgacgacatgcgcagagccaagcgcatccgattggagctgcagaatgcagctcttcagcatctgtttattcggaagtccttccggccttttaaatgcttgcagtgtgggaaggccttccgggaaaaggacaaactggaccagcacttacgcttccatgggcgggaggggaactgcccactgacctgtgatctctgtaacaagggcttcatcagcagcacatccttggagagccacatgaagctccactcagaccagaagacttactcttgcattttttgcccagaatcctttgaccgccttgatttgttgaaagatcatgtggccattcatatcaatgatggctacttcacctgcccaacttgtaagaaacggttcccagattttatccaggtgaaaaaacacgtgcgcagcttccactcagaaaagatctaccagtgcacagagtgtgacaaggccttctgtcgccccgataaactgcgactccacatgctccggcattcggaccgcaaagacttcctgtgttccacctgtgggaagcaatttaagcgaaaagacaaactacgggaacacatgcagaggatgcataatcctgagagggaggccaagaaagccgaccgcatcagccgctccaagacgttcaagccccgcatcacgtccacagactacgacagcttcacgttcaagtgccgcctgtgcatgatgggcttccggcggcgcggcatgctggtaaatcacttatcgaagagacacccagacatgaagatagaagaggtgccagagttaactctacccatcataaaacccaatcgtgattacttttgtcagtattgcgataaggtttataaaagtgccagcaagcgcaaagcccacattctgaagaaccacccaggagcagagctcccaccgagcattcggaagctccgacccgctggtcctggagagccagaccccatgctgagcacacacacccagctgacgggcaccatcgccacccctcccgtctgctgtccccactgctccaagcagtacagcagcaagaccaagatggtccagcacattcgaaagaagcatccagagttcgcccagctctccaacaccatacacacaccactgacgacagctgtgatcagtgccaccccagcggttttgactacagacagcgccactggagagactgtggtgacgacggacctgctcacccaagcaatgacagaactgtcccagaccttaacgacagactaccgaacgccacaaggggattaccagagaattcagtacatccctgtgtcgcagtcggcgtctggcctccagcagcctcagcacatacagctgcaagtggttcaagtggcctcggccacttcccctcaccagtcacagcagtccactgtggatgttggccagctccatgatcctcagccctacccccagcacgccatccaggtgcagcacatccaggtcagcgagcctaccgcctcggccccgtcctccgcccaggtatctgggcagccgttgagtccctcagcccagcaggctcagcaggggctcagcccctcccacatccagggcagttcttccacacaggggcaggctctgcagcagcagcagcagcagcagcagaattcctctgtgcagcacacgtacctgcccagtgcttggaattccttccgtggctattcatctgagattcaaatgatgacgcttcctccgggtcagtttgtgattacagacagtggtgtggcaactccagttactactggccaggtgaaggcggttacttcgggtcattatgtgttatcagaaagtcaatcagaattggaagaaaagcaaacttctgccctctctggtggagtccaggtcgagccacctgcacacagtgactccctggacccccagaccaacagccaacagcagaccacacagtacatcatcaccaccaccaccaacgggaacggaagcagcgaagtgcatatcaccaaaccatgacttccaccctggagcttgaatccagcacccacctcatgtctgttctcataagtctgaaagctctgacacgtagagctcttttgtaagatttattattcactcaagagttcggaaaccacagttttgtctctcatccatacactggggtttattttgccaaggtcatctttatcaaattgactcttcaaaccctcggtttttgccacagaacagagatctttcaggggaaagtagatttcgaggtggagagaatttgccttgctcttgagctggtcttttaacatactgacgagccttacttttcctttgtggaaatattaagtggcatattgtgttcataccaaaggtggagacaggatgtgccaagttcatggttactggacttcttattccaagccatggcaccaaaggagaaggggcattttgtgggtgtgcattaggtctgaactgctttatcttgttttagttttcagtaatttaacaaagggagcctgctgaataacaaaattaaaatgatgaaacaaaagtttgacagtgatattctgaagcaaaaactgtcatctaaatttttcttgctgattttttttaacttccctattttagaaaactattgttgggctgttggtagtgctttccacagatgctggtcctcagtggattaggtcagaagctcatgttctgatagttcttcattatttcacaaaggtggacaacctgaaagagaaaaggctgcttgatgtcagcagaatctaaacccctacattaaagctttgcctcccattctgtggttgtggtggtggtaagaaggagatattggtaccaagaaaaatttccaaaactattgagagagagagagagaaagtattgaaattttgttctgccttgcaggatccatttatcattcattggtaaaggatatattccttgttcttaccaagtgtacatttaactcttgctgacatgttcagtgtattttattacttttaatgctgtcttaaaatgaacattctttaaagttggacaggaaggtggcatttcttatttattaacatttttaactttaaacatattgtgactcatctagaccttttaataagacgatcaacttcacacttagggaaaaaattaaaatgtgatggccacttctaataattcaggtagttataagggatctggaagaaatccagtctttatgaatatactattagttgggcattaaaaaatcagtatatattttaactttttgtgacatgctaacacattttcagaataattattgcatagtagaatttattactccagaacagaaagaccttacttcatttcaaatgaagttaattaatttacatttctgggtaaaaactggttctataaattaagtagagtagcttctttatgataaagacaattttctgaaaagtgaacaattctgttaaaagaactttattgatgtgtagatttcgcactttatttctgagactgcgttcatgtagttgttccccaatgtttgagtactaagagaacttgagaaaattacttcataaacatatggaaactgaaaatggactctctttgtgacaaagatattcaacagaaaatattgaccctgcattgcaaaacacaggttcgggttccctaagtcccacagtgtaatgattacaaatatcctagtgtccggtctagaaagactttctaggagaagactagtggaattttctaaaggttcagttttagcttttataacttaaatttggccctgttacgttctttttaatttgaaccataaggtatctcccctcccttcaggaataacttattggaaaactgaaaagaatcactgaatggaatgttcattttatggcagttgttttaagttttaaaatacacagaggaaaatattgtggaaggacctctttgttgctttcccttctaagttgtcttcttcttcttcttcttcttcttcttctttggtccttaagtgaaataaagactctaaaactaatttgtatattatcagccagagatgcggatggcagtcgagccaaatcgcatggctttcagatcaggtattctgcacattcattccaaggtcatagatttttaaaaggacctggatttgaagagatggcaaatgatgagccatcagaaaacttaatttggaaaacatgtatgtagccagtgtggatattgtggcctctctcaagacacattgacactgtagacttcattcagtccagtgtgagtattttggagtaggttggatgtagattttgtttttatcattgatttgtaccgacagaaatagacatttcatcatgtaaaattcctgttattctggaaaaacctattgttttgatcttcttgttttctgacttggaagtatcctttcaaaaaaactcttaagatatctaggtctaaaaagcacttcatgagatgctaaagctgacccactggttgaaaatgttgaccctatcctgttatttaaatgtgaacatttattgtacattcagtgagttatagtgttaatagtcttgtgctatgcagcaggtgtaaaaattaataaatatattttttaataaacatgtttgtatgtgtgaagctacaagaaaaaaaaaaaaaaaaaaaa

SEQ ID NO: 2659 - DNA, 6318 bp, Homo sapiens
actctgcggcgggaagaaccacctggaggtggcggggggggttgatttctatcacccctagggagagaggatcggggacccgctgatcttccagctcccctcacccaacgtcgtgcatgctgcagacagacctttccgtccttcatgaacacacgtgtggtagacagatgactgtcctgtaccctgtgctgctctaggtgtgccagacgtggagctgtccagttgggagaagatggattccaaagatgaaagctcgcatgtgtggccgacatctgcagagcatgaacagaatgccgcacaggtgcactttgttccggacacaggaacagtggctcagattgtctataccgatgaccaggttcgccccccacagcaggtggtgtacacggcagatggtgcctcctacacatcagtggatggtccagagcacacgctggtgtacatccacccggtggaagctgcacagactctgtttacagaccccggccaggtagcttatgtccaacaggatgctacagctcagcaggcctcattgccagttcataaccaggtgctgccttccatcgagagtgtagatgggtccgaccctttggcaactctgcagacccctctaggcagactggaggccaaagaggaagaggatgaggatgaggacgaggacactgaggaagatgaggaagaagacggtgaggacacggatctggatgactgggagccagacccgccccggcccttcgacccacacgacttgtggtgtgaggagtgcaataacgcgcatgcttcagtgtgtccgaagcacggccccttgcacccgatccccaaccggccggtgctcacccgggccagggcgagcctccccctggtgctctacatagacaggtttctgggcggggtgttctccaagcggcgcatccccaagcgcacccagtttggccccgtggaggggcctctcgtcaggggctcggagctgaaagactgttacattcacctcaaggtttctcttgataaaggggacaggaaagaaagggatttacatgaagacctatggtttgagttgtctgatgagacgctttgtaactggatgatgtttgtacggccagcccagaatcacctggagcagaacctggtggcttaccagtatggccaccatgtgtattatacaaccataaaaaatgtggagcccaagcaggaactgaaggtgtggtatgccgcatcctatgctgagttcgtgaaccagaaaattcatgacatttctgaggaagaaaggaaagttcttcgagagcaagagaagaattggccctgctatgaatgtaaccgccgatttataagctcggagcagttgcaacagcatctcaattctcatgatgagaaactagatgtgtttagcagaacaagaggcagaggaaggggacgaggcaagaggcgattcggtccaggtcgacggccggggcgtcctccaaaatttatccgcctggaaatcaccagcgaaaatggggaaaagagtgacgatgggacacaggacttgctacattttcccacaaaggagcaatttgatgaggctgaaccagccactctgaatgggctggatcaaccagaacagaccactatcccaatccctcagctgccacaggaaacccagtcttccctggaacatgaaccagaaactcacaccctgcacctgcagccgcagcatgaagagagcgtggtgcccacccagagcacgctgacagccgacgacatgcgcagagccaagcgcatccgaaatgcagctcttcagcatctgtttattcggaagtccttccggccttttaaatgcttgcagtgtgggaaggccttccgggaaaaggacaaactggaccagcacttacgcttccatgggcgggaggggaactgcccactgacctgtgatctctgtaacaagggcttcatcagcagcacatccttggagagccacatgaagctccactcagaccagaagacttactcttgcattttttgcccagaatcctttgaccgccttgatttgttgaaagatcatgtggccattcatatcaatgatggctacttcacctgcccaacttgtaagaaacggttcccagattttatccaggtgaaaaaacacgtgcgcagcttccactcagaaaagatctaccagtgcacagagtgtgacaaggccttctgtcgccccgataaactgcgactccacatgctccggcattcggaccgcaaagacttcctgtgttccacctgtgggaagcaatttaagcgaaaagacaaactacgggaacacatgcagaggatgcataatcctgagagggaggccaagaaagccgaccgcatcagccgctccaagacgttcaagccccgcatcacgtccacagactacgacagcttcacgttcaagtgccgcctgtgcatgatgggcttccggcggcgcggcatgctggtaaatcacttatcgaagagacacccagacatgaagatagaagaggtgccagagttaactctacccatcataaaacccaatcgtgattacttttgtcagtattgcgataaggtttataaaagtgccagcaagcgcaaagcccacattctgaagaaccacccaggagcagagctcccaccgagcattcggaagctccgacccgctggtcctggagagccagaccccatgctgagcacacacacccagctgacgggcaccatcgccacccctcccgtctgctgtccccactgctccaagcagtacagcagcaagaccaagatggtccagcacattcgaaagaagcatccagagttcgcccagctctccaacaccatacacacaccactgacgacagctgtgatcagtgccaccccagcggttttgactacagacagcgccactggagagactgtggtgacgacggacctgctcacccaagcaatgacagaactgtcccagaccttaacgacagactaccgaacgccacaaggggattaccagagaattcagtacatccctgtgtcgcagtcggcgtctggcctccagcagcctcagcacatacagctgcaagtggttcaagtggcctcggccacttcccctcaccagtcacagcagtccactgtggatgttggccagctccatgatcctcagccctacccccagcacgccatccaggtgcagcacatccaggtcagcgagcctaccgcctcggccccgtcctccgcccaggtatctgggcagccgttgagtccctcagcccagcaggctcagcaggggctcagcccctcccacatccagggcagttcttccacacaggggcaggctctgcagcagcagcagcagcagcagcagaattcctctgtgcagcacacgtacctgcccagtgcttggaattccttccgtggctattcatctgagattcaaatgatgacgcttcctccgggtcagtttgtgattacagacagtggtgtggcaactccagttactactggccaggtgaaggcggttacttcgggtcattatgtgttatcagaaagtcaatcagaattggaagaaaagcaaacttctgccctctctggtggagtccaggtcgagccacctgcacacagtgactccctggacccccagaccaacagccaacagcagaccacacagtacatcatcaccaccaccaccaacgggaacggaagcagcgaagtgcatatcaccaaaccatgacttccaccctggagcttgaatccagcacccacctcatgtctgttctcataagtctgaaagctctgacacgtagagctcttttgtaagatttattattcactcaagagttcggaaaccacagttttgtctctcatccatacactggggtttattttgccaaggtcatctttatcaaattgactcttcaaaccctcggtttttgccacagaacagagatctttcaggggaaagtagatttcgaggtggagagaatttgccttgctcttgagctggtcttttaacatactgacgagccttacttttcctttgtggaaatattaagtggcatattgtgttcataccaaaggtggagacaggatgtgccaagttcatggttactggacttcttattccaagccatggcaccaaaggagaaggggcattttgtgggtgtgcattaggtctgaactgctttatcttgttttagttttcagtaatttaacaaagggagcctgctgaataacaaaattaaaatgatgaaacaaaagtttgacagtgatattctgaagcaaaaactgtcatctaaatttttcttgctgattttttttaacttccctattttagaaaactattgttgggctgttggtagtgctttccacagatgctggtcctcagtggattaggtcagaagctcatgttctgatagttcttcattatttcacaaaggtggacaacctgaaagagaaaaggctgcttgatgtcagcagaatctaaacccctacattaaagctttgcctcccattctgtggttgtggtggtggtaagaaggagatattggtaccaagaaaaatttccaaaactattgagagagagagagagaaagtattgaaattttgttctgccttgcaggatccatttatcattcattggtaaaggatatattccttgttcttaccaagtgtacatttaactcttgctgacatgttcagtgtattttattacttttaatgctgtcttaaaatgaacattctttaaagttggacaggaaggtggcatttcttatttattaacatttttaactttaaacatattgtgactcatctagaccttttaataagacgatcaacttcacacttagggaaaaaattaaaatgtgatggccacttctaataattcaggtagttataagggatctggaagaaatccagtctttatgaatatactattagttgggcattaaaaaatcagtatatattttaactttttgtgacatgctaacacattttcagaataattattgcatagtagaatttattactccagaacagaaagaccttacttcatttcaaatgaagttaattaatttacatttctgggtaaaaactggttctataaattaagtagagtagcttctttatgataaagacaattttctgaaaagtgaacaattctgttaaaagaactttattgatgtgtagatttcgcactttatttctgagactgcgttcatgtagttgttccccaatgtttgagtactaagagaacttgagaaaattacttcataaacatatggaaactgaaaatggactctctttgtgacaaagatattcaacagaaaatattgaccctgcattgcaaaacacaggttcgggttccctaagtcccacagtgtaatgattacaaatatcctagtgtccggtctagaaagactttctaggagaagactagtggaattttctaaaggttcagttttagcttttataacttaaatttggccctgttacgttctttttaatttgaaccataaggtatctcccctcccttcaggaataacttattggaaaactgaaaagaatcactgaatggaatgttcattttatggcagttgttttaagttttaaaatacacagaggaaaatattgtggaaggacctctttgttgctttcccttctaagttgtcttcttcttcttcttcttcttcttcttctttggtccttaagtgaaataaagactctaaaactaatttgtatattatcagccagagatgcggatggcagtcgagccaaatcgcatggctttcagatcaggtattctgcacattcattccaaggtcatagatttttaaaaggacctggatttgaagagatggcaaatgatgagccatcagaaaacttaatttggaaaacatgtatgtagccagtgtggatattgtggcctctctcaagacacattgacactgtagacttcattcagtccagtgtgagtattttggagtaggttggatgtagattttgtttttatcattgatttgtaccgacagaaatagacatttcatcatgtaaaattcctgttattctggaaaaacctattgttttgatcttcttgttttctgacttggaagtatcctttcaaaaaaactcttaagatatctaggtctaaaaagcacttcatgagatgctaaagctgacccactggttgaaaatgttgaccctatcctgttatttaaatgtgaacatttattgtacattcagtgagttatagtgttaatagtcttgtgctatgcagcaggtgtaaaaattaataaatatattttttaataaacatgtttgtatgtgtgaagctacaagaaaaaaaaa

SEQ ID NO: 2660 - DNA, 6027 bp, Homo sapiens
agccctcccaggtgtgggacagaaggggcagagggagggcagaggcttaaaggctgtgagcagtcagatcaaaaatgaagccagctcttcctcacagccggtagatggaagtcatttttccagggcctggaaggagttggtaggaagactagatttcagccagcccttgcgccctgtttgtgccagcaggcaccagcgaaccaaaagcaggtgtccatgtctgcttactctgtgccttcaacttttgcccaggcctcattgccagttcataaccaggtgctgccttccatcgagagtgtagatgggtccgaccctttggcaactctgcagacccctctaggcagactggaggccaaagaggaagaggatgaggatgaggacgaggacactgaggaagatgaggaagaagacggtgaggacacggatctggatgactgggagccagacccgccccggcccttcgacccacacgacttgtggtgtgaggagtgcaataacgcgcatgcttcagtgtgtccgaagcacggccccttgcacccgatccccaaccggccggtgctcacccgggccagggcgagcctccccctggtgctctacatagacaggtttctgggcggggtgttctccaagcggcgcatccccaagcgcacccagtttggccccgtggaggggcctctcgtcaggggctcggagctgaaagactgttacattcacctcaaggtttctcttgataaaggggacaggaaagaaagggatttacatgaagacctatggtttgagttgtctgatgagacgctttgtaactggatgatgtttgtacggccagcccagaatcacctggagcagaacctggtggcttaccagtatggccaccatgtgtattatacaaccataaaaaatgtggagcccaagcaggaactgaaggtgtggtatgccgcatcctatgctgagttcgtgaaccagaaaattcatgacatttctgaggaagaaaggaaagttcttcgagagcaagagaagaattggccctgctatgaatgtaaccgccgatttataagctcggagcagttgcaacagcatctcaattctcatgatgagaaactagatgtgtttagcagaacaagaggcagaggaaggggacgaggcaagaggcgattcggtccaggtcgacggccggggcgtcctccaaaatttatccgcctggaaatcaccagcgaaaatggggaaaagagtgacgatgggacacaggacttgctacattttcccacaaaggagcaatttgatgaggctgaaccagccactctgaatgggctggatcaaccagaacagaccactatcccaatccctcagctgccacaggaaacccagtcttccctggaacatgaaccagaaactcacaccctgcacctgcagccgcagcatgaagagagcgtggtgcccacccagagcacgctgacagccgacgacatgcgcagagccaagcgcatccgattggagctgcagaatgcagctcttcagcatctgtttattcggaagtccttccggccttttaaatgcttgcagtgtgggaaggccttccgggaaaaggacaaactggaccagcacttacgcttccatgggcgggaggggaactgcccactgacctgtgatctctgtaacaagggcttcatcagcagcacatccttggagagccacatgaagctccactcagaccagaagacttactcttgcattttttgcccagaatcctttgaccgccttgatttgttgaaagatcatgtggccattcatatcaatgatggctacttcacctgcccaacttgtaagaaacggttcccagattttatccaggtgaaaaaacacgtgcgcagcttccactcagaaaagatctaccagtgcacagagtgtgacaaggccttctgtcgccccgataaactgcgactccacatgctccggcattcggaccgcaaagacttcctgtgttccacctgtgggaagcaatttaagcgaaaagacaaactacgggaacacatgcagaggatgcataatcctgagagggaggccaagaaagccgaccgcatcagccgctccaagacgttcaagccccgcatcacgtccacagactacgacagcttcacgttcaagtgccgcctgtgcatgatgggcttccggcggcgcggcatgctggtaaatcacttatcgaagagacacccagacatgaagatagaagaggtgccagagttaactctacccatcataaaacccaatcgtgattacttttgtcagtattgcgataaggtttataaaagtgccagcaagcgcaaagcccacattctgaagaaccacccaggagcagagctcccaccgagcattcggaagctccgacccgctggtcctggagagccagaccccatgctgagcacacacacccagctgacgggcaccatcgccacccctcccgtctgctgtccccactgctccaagcagtacagcagcaagaccaagatggtccagcacattcgaaagaagcatccagagttcgcccagctctccaacaccatacacacaccactgacgacagctgtgatcagtgccaccccagcggttttgactacagacagcgccactggagagactgtggtgacgacggacctgctcacccaagcaatgacagaactgtcccagaccttaacgacagactaccgaacgccacaaggggattaccagagaattcagtacatccctgtgtcgcagtcggcgtctggcctccagcagcctcagcacatacagctgcaagtggttcaagtggcctcggccacttcccctcaccagtcacagcagtccactgtggatgttggccagctccatgatcctcagccctacccccagcacgccatccaggtgcagcacatccaggtatctgggcagccgttgagtccctcagcccagcaggctcagcaggggctcagcccctcccacatccagggcagttcttccacacaggggcaggctctgcagcagcagcagcagcagcagcagaattcctctgtgcagcacacgtacctgcccagtgcttggaattccttccgtggctattcatctgagattcaaatgatgacgcttcctccgggtcagtttgtgattacagacagtggtgtggcaactccagttactactggccaggtgaaggcggttacttcgggtcattatgtgttatcagaaagtcaatcagaattggaagaaaagcaaacttctgccctctctggtggagtccaggtcgagccacctgcacacagtgactccctggacccccagaccaacagccaacagcagaccacacagtacatcatcaccaccaccaccaacgggaacggaagcagcgaagtgcatatcaccaaaccatgacttccaccctggagcttgaatccagcacccacctcatgtctgttctcataagtctgaaagctctgacacgtagagctcttttgtaagatttattattcactcaagagttcggaaaccacagttttgtctctcatccatacactggggtttattttgccaaggtcatctttatcaaattgactcttcaaaccctcggtttttgccacagaacagagatctttcaggggaaagtagatttcgaggtggagagaatttgccttgctcttgagctggtcttttaacatactgacgagccttacttttcctttgtggaaatattaagtggcatattgtgttcataccaaaggtggagacaggatgtgccaagttcatggttactggacttcttattccaagccatggcaccaaaggagaaggggcattttgtgggtgtgcattaggtctgaactgctttatcttgttttagttttcagtaatttaacaaagggagcctgctgaataacaaaattaaaatgatgaaacaaaagtttgacagtgatattctgaagcaaaaactgtcatctaaatttttcttgctgattttttttaacttccctattttagaaaactattgttgggctgttggtagtgctttccacagatgctggtcctcagtggattaggtcagaagctcatgttctgatagttcttcattatttcacaaaggtggacaacctgaaagagaaaaggctgcttgatgtcagcagaatctaaacccctacattaaagctttgcctcccattctgtggttgtggtggtggtaagaaggagatattggtaccaagaaaaatttccaaaactattgagagagagagagagaaagtattgaaattttgttctgccttgcaggatccatttatcattcattggtaaaggatatattccttgttcttaccaagtgtacatttaactcttgctgacatgttcagtgtattttattacttttaatgctgtcttaaaatgaacattctttaaagttggacaggaaggtggcatttcttatttattaacatttttaactttaaacatattgtgactcatctagaccttttaataagacgatcaacttcacacttagggaaaaaattaaaatgtgatggccacttctaataattcaggtagttataagggatctggaagaaatccagtctttatgaatatactattagttgggcattaaaaaatcagtatatattttaactttttgtgacatgctaacacattttcagaataattattgcatagtagaatttattactccagaacagaaagaccttacttcatttcaaatgaagttaattaatttacatttctgggtaaaaactggttctataaattaagtagagtagcttctttatgataaagacaattttctgaaaagtgaacaattctgttaaaagaactttattgatgtgtagatttcgcactttatttctgagactgcgttcatgtagttgttccccaatgtttgagtactaagagaacttgagaaaattacttcataaacatatggaaactgaaaatggactctctttgtgacaaagatattcaacagaaaatattgaccctgcattgcaaaacacaggttcgggttccctaagtcccacagtgtaatgattacaaatatcctagtgtccggtctagaaagactttctaggagaagactagtggaattttctaaaggttcagttttagcttttataacttaaatttggccctgttacgttctttttaatttgaaccataaggtatctcccctcccttcaggaataacttattggaaaactgaaaagaatcactgaatggaatgttcattttatggcagttgttttaagttttaaaatacacagaggaaaatattgtggaaggacctctttgttgctttcccttctaagttgtcttcttcttcttcttcttcttcttcttctttggtccttaagtgaaataaagactctaaaactaatttgtatattatcagccagagatgcggatggcagtcgagccaaatcgcatggctttcagatcaggtattctgcacattcattccaaggtcatagatttttaaaaggacctggatttgaagagatggcaaatgatgagccatcagaaaacttaatttggaaaacatgtatgtagccagtgtggatattgtggcctctctcaagacacattgacactgtagacttcattcagtccagtgtgagtattttggagtaggttggatgtagattttgtttttatcattgatttgtaccgacagaaatagacatttcatcatgtaaaattcctgttattctggaaaaacctattgttttgatcttcttgttttctgacttggaagtatcctttcaaaaaaactcttaagatatctaggtctaaaaagcacttcatgagatgctaaagctgacccactggttgaaaatgttgaccctatcctgttatttaaatgtgaacatttattgtacattcagtgagttatagtgttaatagtcttgtgctatgcagcaggtgtaaaaattaataaatatattttttaataaacatgtttgtatgtgtgaagctacaagaaaaaaaaaaaaaaaaaaa

SEQ ID NO: 2661 - DNA, 5903 bp, Homo sapiens
agccctcccaggtgtgggacagaaggggcagagggagggcagaggcttaaaggctgtgagcagtcagatcaaaaatgaagccagctcttcctcacagccggtagatggaagtcatttttccagggcctggaaggagttggtaggaagactagatttcagccagcccttgcgccctgtttgtgccagcaggcaccagcgaaccaaaagcaggtgtccatgtctgcttactctgtgccttcaacttttgcccaggcctcattgccagttcataaccaggtgctgccttccatcgagagtgtagatgggtccgaccctttggcaactctgcagacccctctaggcagactggaggccaaagaggaagaggatgaggatgaggacgaggacactgaggaagatgaggaagaagacggtgaggacacggatctggatgactgggagccagacccgccccggcccttcgacccacacgacttgtggtgtgaggagtgcaataacgcgcatgcttcagtgtgtccgaagcacggccccttgcacccgatccccaaccggccggtgctcacccgggccagggcgagcctccccctggtgctctacatagacaggtttctgggcggggtgttctccaagcggcgcatccccaagcgcacccagtttggccccgtggaggggcctctcgtcaggggctcggagctgaaagactgttacattcacctcaaggtttctcttgataaaggggacaggaaagaaagggatttacatgaagacctatggtttgagttgtctgatgagacgctttgtaactggatgatgtttgtacggccagcccagaatcacctggagcagaacctggtggcttaccagtatggccaccatgtgtattatacaaccataaaaaatgtggagcccaagcaggaactgaaggtgtggtatgccgcatcctatgctgagttcgtgaaccagaaaattcatgacatttctgaggaagaaaggaaagttcttcgagagcaagagaagaattggccctgctatgaatgtaaccgccgatttataagctcggagcagttgcaacagcatctcaattctcatgatgagaaactagatgtgtttagcagaacaagaggcagaggaaggggacgaggcaagaggcgattcggtccaggtcgacggccggggcgtcctccaaaatttatccgcctggaaatcaccagcgaaaatggggaaaagagtgacgatgggacacaggacttgctacattttcccacaaaggagcaatttgatgaggctgaaccagccactctgaatgggctggatcaaccagaacagaccactatcccaatccctcagctgccacaggaaacccagtcttccctggaacatgaaccagaaactcacaccctgcacctgcagccgcagcatgaagagagcgtggtgcccacccagagcacgctgacagccgacgacatgcgcagagccaagcgcatccgaaatgcagctcttcagcatctgtttattcggaagtccttccggccttttaaatgcttgcagtgtgggaaggccttccgggaaaaggacaaactggaccagcacttacgcttccatgggcgggaggggaactgcccactgacctgtgatctctgtaacaagggcttcatcagcagcacatccttggagagccacatgaagctccactcagaccagaagacttactcttgcattttttgcccagaatcctttgaccgccttgatttgttgaaagatcatgtggccattcatatcaatgatggctacttcacctgcccaacttgtaagaaacggttcccagattttatccaggtgaaaaaacacgtgcgcagcttccactcagaaaagatctaccagtgcacagagtgtgacaaggccttctgtcgccccgataaactgcgactccacatgctccggcattcggaccgcaaagacttcctgtgttccacctgtgggaagcaatttaagcgaaaagacaaactacgggaacacatgcagaggatgcataatcctgagagggaggccaagaaagccgaccgcatcagccgctccaagacgttcaagccccgcatcacgtccacagactacgacagcttcacgttcaagtgccgcctgtgcatgatgggcttccggcggcgcggcatgctggtaaatcacttatcgaagagacacccagacatgaagatagaagaggtgccagagttaactctacccatcataaaacccaatcgtgattacttttgtcagtattgcgataaggtttataaaagtgccagcaagcgcaaagcccacattctgaagaaccacccaggagcagagctcccaccgagcattcggaagctccgacccgctggtcctggagagccagaccccatgctgagcacacacacccagctgacgggcaccatcgccacccctcccgtctgctgtccccactgctccaagcagtacagcagcaagaccaagatggtccagcacattcgaaagaagcatccagagttcgcccagctctccaacaccatacacacaccactgacgacagctgtgatcagtgccaccccagcggttttgactacagacagcgccactggagagactgtggtgacgacggacctgctcacccaagcaatgacagaactgtcccagaccttaacgacagactaccgaacgccacaaggggattaccagagaattcagtacatccctgtgtcgcagtcggcgtctggcctccagcagcctcagcacatacagctgcaagtggttcaagtggcctcggtatctgggcagccgttgagtccctcagcccagcaggctcagcaggggctcagcccctcccacatccagggcagttcttccacacaggggcaggctctgcagcagcagcagcagcagcagcagaattcctctgtgcagcacacgtacctgcccagtgcttggaattccttccgtggctattcatctgagattcaaatgatgacgcttcctccgggtcagtttgtgattacagacagtggtgtggcaactccagttactactggccaggtgaaggcggttacttcgggtcattatgtgttatcagaaagtcaatcagaattggaagaaaagcaaacttctgccctctctggtggagtccaggtcgagccacctgcacacagtgactccctggacccccagaccaacagccaacagcagaccacacagtacatcatcaccaccaccaccaacgggaacggaagcagcgaagtgcatatcaccaaaccatgacttccaccctggagcttgaatccagcacccacctcatgtctgttctcataagtctgaaagctctgacacgtagagctcttttgtaagatttattattcactcaagagttcggaaaccacagttttgtctctcatccatacactggggtttattttgccaaggtcatctttatcaaattgactcttcaaaccctcggtttttgccacagaacagagatctttcaggggaaagtagatttcgaggtggagagaatttgccttgctcttgagctggtcttttaacatactgacgagccttacttttcctttgtggaaatattaagtggcatattgtgttcataccaaaggtggagacaggatgtgccaagttcatggttactggacttcttattccaagccatggcaccaaaggagaaggggcattttgtgggtgtgcattaggtctgaactgctttatcttgttttagttttcagtaatttaacaaagggagcctgctgaataacaaaattaaaatgatgaaacaaaagtttgacagtgatattctgaagcaaaaactgtcatctaaatttttcttgctgattttttttaacttccctattttagaaaactattgttgggctgttggtagtgctttccacagatgctggtcctcagtggattaggtcagaagctcatgttctgatagttcttcattatttcacaaaggtggacaacctgaaagagaaaaggctgcttgatgtcagcagaatctaaacccctacattaaagctttgcctcccattctgtggttgtggtggtggtaagaaggagatattggtaccaagaaaaatttccaaaactattgagagagagagagagaaagtattgaaattttgttctgccttgcaggatccatttatcattcattggtaaaggatatattccttgttcttaccaagtgtacatttaactcttgctgacatgttcagtgtattttattacttttaatgctgtcttaaaatgaacattctttaaagttggacaggaaggtggcatttcttatttattaacatttttaactttaaacatattgtgactcatctagaccttttaataagacgatcaacttcacacttagggaaaaaattaaaatgtgatggccacttctaataattcaggtagttataagggatctggaagaaatccagtctttatgaatatactattagttgggcattaaaaaatcagtatatattttaactttttgtgacatgctaacacattttcagaataattattgcatagtagaatttattactccagaacagaaagaccttacttcatttcaaatgaagttaattaatttacatttctgggtaaaaactggttctataaattaagtagagtagcttctttatgataaagacaattttctgaaaagtgaacaattctgttaaaagaactttattgatgtgtagatttcgcactttatttctgagactgcgttcatgtagttgttccccaatgtttgagtactaagagaacttgagaaaattacttcataaacatatggaaactgaaaatggactctctttgtgacaaagatattcaacagaaaatattgaccctgcattgcaaaacacaggttcgggttccctaagtcccacagtgtaatgattacaaatatcctagtgtccggtctagaaagactttctaggagaagactagtggaattttctaaaggttcagttttagcttttataacttaaatttggccctgttacgttctttttaatttgaaccataaggtatctcccctcccttcaggaataacttattggaaaactgaaaagaatcactgaatggaatgttcattttatggcagttgttttaagttttaaaatacacagaggaaaatattgtggaaggacctctttgttgctttcccttctaagttgtcttcttcttcttcttcttcttcttcttctttggtccttaagtgaaataaagactctaaaactaatttgtatattatcagccagagatgcggatggcagtcgagccaaatcgcatggctttcagatcaggtattctgcacattcattccaaggtcatagatttttaaaaggacctggatttgaagagatggcaaatgatgagccatcagaaaacttaatttggaaaacatgtatgtagccagtgtggatattgtggcctctctcaagacacattgacactgtagacttcattcagtccagtgtgagtattttggagtaggttggatgtagattttgtttttatcattgatttgtaccgacagaaatagacatttcatcatgtaaaattcctgttattctggaaaaacctattgttttgatcttcttgttttctgacttggaagtatcctttcaaaaaaactcttaagatatctaggtctaaaaagcacttcatgagatgctaaagctgacccactggttgaaaatgttgaccctatcctgttatttaaatgtgaacatttattgtacattcagtgagttatagtgttaatagtcttgtgctatgcagcaggtgtaaaaattaataaatatattttttaataaacatgtttgtatgtgtgaagctacaagaaaaaaaaa

SEQ ID NO: 2662 - DNA, 8583 bp, Homo sapiens
ggcttccgctggtggcctagagcggggcccggtatggaggtgggctagaggccgacgccagccagagagcgaaatgttcttttggggccagagtctgggcatatatgaatgcaaatccgtgttttgttcacaactaagcccagctgagacgatcacttttctgtaggccatttgtccaggtacagaatgagcacatgttgttggtgtacgccaggtggtgcttccaccattgacttcctaaagcgctatgcttccaacactccgtccggtgaatttcaaacagccgacgaagacctctgctactgcttggagtgtgtggctgagtaccacaaagcaagagatgaattgccattcttgcatgaggttttatgggaattagaaaccttacgtctcataaatcactttgaaaaatccatgaaggcagaaattggagatgatgatgagttatatatagtagacaataatggagagatgccactgtttgacatcactgggcaagactttgaaaataagcttcgagttcctcttcttgaaatactgaaatatccttacttgcttctacatgaacgtgttaacgagttatgtgttgaagcactttgtcggatggaacaagccaattgctcctttcaggtgtttgataaacatccagggatctatttgtttttagtccatcccaatgaaatggttcggcgttgggctatcttgactgcaagaaacttggggaaagtggacagagatgattattatgacttacaagaagttttactttgcctttttaaagtcattgagttggggcttttagagagtccagacatttatacttcttctgtcctagagaagggtaaactgattcttctgccctcacacatgtatgatactaccaactacaaaagctattggttaggtatttgcatgttgctgaccattcttgaggaacaagccatggattccctgttgttgggctcagacaaacaaaatgattttatgcaatcgatacttcacactatggagagggaagcagatgatgatagtgtggatcctttctggccagcgttacactgttttatggtgattctggatcgccttggatctaaggtctggggtcaacttatggatcctattgtggcatttcaaaccattatcaacaacgcaagctacaatagagagatccgacatatacggaacagctctgtaaggaccaagttagaaccggagtcctatctggatgatatggtgacttgcagccagatcgtatacaattacaatcctgaaaagaccaaaaaggattctggatggagaacagccatttgcccagattattgtcctaacatgtatgaagaaatggaaacattagccagtgtacttcagtcagatattggtcaagacatgcgtgttcataacagcacatttctatggttcatcccttttgtccagtccctcatggatcttaaggatttgggtgtggcttacatagcacaggttgttaatcatctgtactctgaagtcaaagaagtcctcaaccaaacagatgctgtgtgtgacaaagtcactgaattttttcttctaattttggtatcagtgattgaactgcatagaaataaaaaatgtttgcatttgctgtgggtaagttcccagcaatgggtggaagccgtcgtcaaatgtgccaagcttcctaccactgcgtttacacggagttctgagaaatcatctggaaattgctccaaaggaacagcaatgatatcttcactgtcattgcattccatgccatctaactctgtacaacttgcttatgtgcagctgattagaagtctccttaaagaaggttatcagcttgggcagcagtctctttgcaagcgattctgggataagctcaacttattccttagaggaaatttatctctaggttggcagttgactagtcaggaaacccatgagctacaaagttgcttaaagcaaattattagaaacataaaattcaaagcacctccatgtaacacttttgtggatctgacttctgcatgtaaaatctctcctgcatcttataataaagaagaaagtgaacaaatggggaagacgtctagaaaagatatgcattgtttggaagcttccagcccaacattttctaaagaaccaatgaaagtgcaagacagtgtatcgatcaaagcagataacactatagaaggtgacaataatgagcaaaattatataaaggatgtgaaactagaggaccatctcttagctgggtcatgcttaaagcagagtagtaaaaacatttttactgaaagagctgaagatcaaattaaaataagtacaaggaagcagaagtctgtaaaagagatctcttcatatacaccaaaggactgtacttcaagaaatggtccagaaaggggatgtgacagaggaataatagtatcaacacgtttgttgactgattctagcactgatgctttggaaaaagtgtccacatcgaatgaagatttctctttaaaggatgatgctcttgctaaaacctcaaaacgaaaaactaaggtacagaaagatgaaatctgtgcaaagttatcacatgtaataaagaagcaacacaggaagagtactttggtcgataatactatcaatttagatgaaaatttgactgtatctaacattgagagtttctattcaaggaaagatacaggagttcagaaaggagatggtttcatacacaatctttctttagaccctagtggtgttctggatgataagaatggagaacaaaaatctcaaaacaatgtattgccaaaagagaaacaattaaagaatgaagaattagttattttctctttccatgaaaacaattgtaaaatacaggaatttcatgttgatggtaaagaattgatcccttttacagaaatgaccaatgcttcagagaagaaatcatctccctttaaagatcttatgactgtacctgaatcaagagatgaggagatgagtaatagtaccagtgtgatttattctaacttgacaagagaacaggcccctgacatcagtcctaaatctgacaccttaacggattctcagatagacagagaccttcacaaattatctttactagctcaagccagtgttattacgttcccatccgattcacctcagaactcatcgcagctgcaaaggaaagtaaaagaagataaaagatgtttcacagctaaccaaaataatgttggagatacctcccgtggacaggttattattatttcagattctgatgatgatgatgatgaaagaatcctgagtcttgagaaactcactaaacaggacaaaatatgccttgagagggaacatccagagcagcacgtttcaacagttaatagtaaggaggaaaagaatccagtaaaggaagaaaagacagagactctttttcagtttgaggaatctgattctcagtgttttgagtttgaaagttcatctgaagtgttttcagtttggcaagatcatccagacgataataattcagttcaagatggtgagaaaaaatgtttggctcctatagccaatactacaaatggtcagggttgtacagattatgtatctgaagttgttaaaaaaggagcagagggcattgaagaacacacaagaccacggagtatttctgttgaagaattttgtgaaattgaagtaaaaaagcctaagagaaaacgatctgaaaaaccaatggctgaagatcctgtgaggccttcatcttctgtcagaaatgagggccagtctgatactaataagagagagcttgtgggaaatgattttaaaagtattgatagaaggacttcaactcccaattcacgtattcagagagccactacggtttcacaaaagaagtcttcaaagctttgtacttgtacagaacccatcaggaaagttccagtttctaagacccctaagaaaactcattcagatgccaaaaaaagacagaatagaagttcaaattacctaagttgtagaacaactcctgctatagtgccgccaaagaaatttcgtcagtgtcctgagccaacttcaacagctgagaaacttggcctgaaaaagggtcctcgtaaggcatatgagttgtcccagcggtctttggattatgtagctcaattacgtgatcatggcaaaactgttggagtagttgatacccgaaaaaagactaaattaatttctcctcagaacctgtctgtcagaaataataagaaacttctgactagtcaagaacttcagatgcaaaggcagatcagacccaaatcacaaaaaaatagacgaagactttctgattgtgaaagtacagatgttaaaagagcagggtcacatacagcacagaattctgacgtatttgtaccagaatctgataggtcagattataattgtacaggaggaactgaggtacttgccaacagtaacagaaaacagttaataaaatgcatgccttctgaaccagaaaccataaaagcaaaacatgggtctccagcaactgatgatgcttgccctttgaaccagtgtgattctgtagtgttaaatggaacagtaccaacaaatgaagtaattgtctccacttcagaagaccctctgggtggaggtgatccaacagcacgtcatatagagatggcagctttgaaagaaggagagcctgactccagcagtgatgcagaggaagataacttatttttaacccaaaatgatcctgaagatatggatttatgttcacaaatggagaatgacaattataaactcattgaactaattcatggaaaagatacagttgaggttgaagaagattctgtaagtcggcctcagttggaatctttgagtggcacaaagtgtaagtacaaagattgtcttgaaaccacaaaaaaccagggtgaatactgcccaaaacactctgaagtgaaagcagcagatgaagatgtatttcgtaaacctggcttgcctcctcctgcatctaaacctttgagacctaccactaagatttttagctcaaagagtacttcacgaattgctggtctttctaaatctttggaaacttcttcagcactttcaccgtctctaaaaaataagtcaaaggggatacagtcgattttgaaagtaccacagccagttcccctcatagctcagaagccagttggtgaaatgaagaattcgtgcaatgttcttcatcctcagtctccgaataattccaacaggcaaggttgcaaagttccatttggtgaaagcaaatattttccatcttcctctccagtaaacattcttttgtcatcacagtctgtctctgacaccttcgttaaagaggtcttaaaatggaaatatgaaatgtttttgaactttggtcagtgtgggccccctgcaagtctttgtcagtccatctcaagacctgtgcctgtcagatttcacaattatggagattattttaatgtttttttccctttgatggtattgaatacttttgaaacagtggcacaagaatggctcaactctccaaatagagagaatttctatcagttgcaagtacgaaaatttcctgccgattatataaaatactgggagtttgcagtttatctggaagaatgtgaactggctaaacagctttatccaaaggaaaacgatttggtgtttttagctcctgagagaataaatgaagagaagaaagatacaaagagaaatgacatacaagatctccacgaatatcattctggttatgttcataaatttcgccgcacgtcagtcatgcgtaatgggaaaactgagtgttacctttccatccagactcaagagaactttccggccaatttaaacgaacttgtgaattgtattgtaatcagttctctggtaactacacaaaggaagttgaaagccatgtctctgttgggtagtcggaaccaactggctagagctgttctgaatccaaaccctatggacttctgtacaaaagatttactgactacaacatctgagagaattattgcgtacttaagagatttcaatgaagatcaaaagaaagcaatagaaactgcatatgctatggtgaaacactcaccatcagttgccaaaatctgcttgattcatggaccacctggaacaggaaaatcaaaaactattgttggcctcctctatcgtctactgacagagaaccagaggaaggggcattcagacgaaaactccaatgccaaaatcaaacaaaaccgtgtcctcgtgtgtgcaccttccaatgcagctgttgatgaactcatgaaaaaaattatccttgaattcaaagaaaaatgtaaagacaagaagaatcctttaggaaactgtggagatataaatttagtacgactgggtccagaaaagtctattaatagtgaggttctaaagttcagtttggacagccaagtaaaccacagaatgaaaaaagagttaccttctcatgttcaggcgatgcataaaagaaaggaatttctagattatcagctggatgagctttcccggcagcgagctctatgccgaggtggacgggaaatacagaggcaagaattagatgaaaacatttccaaagtttctaaggaaaggcaggaacttgcttctaaaattaaagaggttcaaggacgcccacagaaaacacagagtatcatcatcttagagtcccatatcatctgctgcacgttgagcacaagtggtggtttactacttgagtctgctttccgtgggcaagggggtgtccccttcagctgtgtcattgttgatgaggctggacagtcttgtgaaattgagactcttactccactcatccatcgctgcaataagctcatcctagtaggagatcctaagcagctccctccgacagtcatctctatgaaagcacaggagtatggctacgaccagtcaatgatggctcgcttctgcagactgctggaagagaatgtagaacacaacatgatcagcaggctgcccattctacagctcactgttcagtacaggatgcatccagacatatgcctcttcccttctaattatgtttataacagaaacttaaaaacaaatagacagacagaagccattcgatgttcatcagattggccatttcagccataccttgtgtttgatgttggagatggttcagaaagacgggataatgactcatatataaatgttcaagaaataaaactggtgatggaaataattaagcttattaaagacaaaagaaaggatgttagttttcgaaacattggcataataactcattacaaggcccagaagacgatgattcagaaggatttggacaaagagttcgatagaaaaggaccagcagaagtagacactgtggatgcattccagggtcggcagaaggattgtgttattgttacgtgtgtcagagcaaatagcatccaaggttcaattggattcctggcaagtttgcagagattgaatgtcaccatcacacgagccaagtacagcctcttcatcctcggacatttgaggaccctgatggaaaaccagcattggaatcagctgattcaggatgctcagaagcgtggtgccattattaagacctgtgacaaaaactatagacatgatgcagtgaagattctgaaactcaagcctgtgctgcagagaagtctcactcaccctcctaccatagccccagaggggtccagaccccagggtggtttgcccagcagcaagctagacagtggatttgccaagacatctgttgctgcttctctataccacacaccctctgactccaaggaaattactcttactgttacttcaaaggaccctgaaagacctcctgttcatgaccaacttcaggacccacgactgctgaagaggatgggcattgaggtcaaaggaggaatattcctttgggatccacaaccctcgagcccccagcatcctggagcaacacctcctacgggcgagccgggcttccctgtcgttcaccaggacctgagccatatacagcagcccgctgctgtagtggctgctctgagcagccacaaacctcccgtgcggggcgaacctccagctgccagtcccgaggcttccacgtgtcagagcaaatgtgatgacccggaagaggagctctgtcacaggagagaggccagggctttcagtgaaggggagcaggagaagtgtggttccgagacccatcacaccaggaggaactctaggtgggacaagaggacactggagcaggaggacagcagttccaagaaaagaaagcttttataggaaagcccagtgacatgggccagcagccacagcatattgtaaactgaagatgaccagctcgtgggaccatctagataagcttgttttttgtaaggagtttgtgtgctgttggaaaacatggaaaatgcatccttaacacctgagcctctggtcatcttcagtattttctgtcatttgcaaaagctttcagagggcattgtgtatccgtaataatgtccttgaagtcagagactggaaatgttgatctcttagtcttctatagacaaggaggtcagactggagtgaatgttgtaaaagttgaaatgtatatttgtatagcaaataacaaaatccttttaaaattcaaaaaaaaaaaaaaaaaaa

SEQ ID NO: 2663 - DNA, 2969 bp, Homo sapiens
ctaaattacccactacgttgcttgtatatttaaagttggagttcgttgctaaagatggcagacccagatgtcctcactgaagttccagcagcattgaagcggttagccaagtatgtgatccggggattttatggcattgagcatgccttggccttggacatcttgatcaggaactcctgtgtgaaagaggaggatatgctggagctgctcaagtttgatcggaagcaacttcgatcagttttgaataatttaaagggagacaagtttatcaaatgcagaatgagggtagagactgctgcagacgggaaaaccactcgccataactactacttcatcaattatcgtactcttgttaatgtggtaaaatataaactggaccacatgagaagaagaattgagaccgatgagagagattcgaccaaccgggcttccttcaaatgtcctgtctgtagtagtactttcacagacttagaagctaatcagctctttgatcctatgacaggaactttccgctgtactttttgccatacagaggtagaagaggatgaatcagcaatgcccaaaaaagatgcacgcacacttttggcaaggtttaatgaacaaattgagcccatttatgcattgcttcgggagacagaggatgtgaacttggcctatgaaatacttgagccagaacccacagaaatcccagccctgaaacagagcaaggaccatgcagcaactactgctggagctgctagcctagcaggtgggcaccaccgggaagcatgggccaccaaaggtccttcctatgaagacttatacactcagaatgttgtcattaacatggatgaccaagaagatcttcatcgagcctcactggaagggaaatctgccaaagagaggcctatttggttgagagaaagcactgtccaaggggcatatggttctgaagatatgaaagaagggggcatagatatggacgcatttcaggagcgtgaggaaggccatgctgggcctgatgacaacgaagaggtcatgcgagcactgctcattcacgagaaaaagacttcctctgccatggctggttcagtgggggcagctgctccagtgaccgctgccaatggcgatgactcagaaagcgagaccagtgagtcagatgatgattctccaccccgtccggcagctgtggctgtgcataaacgagaagaggatgaagaggaagatgacgagtttgaagaagtagcagatgaccccattgtcatggtggctggccgtccgttctcctacagtgaagtgagccaacggccagagctagtggcccagatgacaccagaagaaaaggaagcatatatagcaatgggacaacgcatgtttgaggacctctttgagtgagctttccctaattctttctcctttctctaatgctcagttcaaaaaggaatgtctcatctttgaagaaaagtatttaagtggctttctgcccctcttgatgtaagcaactgtccatccttgtgcaaagattgatggtagagagcttgacttttatgccagaaactttcccagcaaggtagggtgctgagaatcctacccttccttgctgtcactacagtattaatattttactgtattttcttttcttttttttttttttttggagatgaagtctcactcttgtaccccaggctggagtgcaatggcgtgatctcggctcactgcaacctctgcctcctgggttcaagcgattctcctgcctcagcctcccgagtagctgggattacaggtgcctgccaccatgcctggctaatttttgtatttttagtagaggcagggtttcaccatgttagccaggatgatctcgatctcctgacctcatgatccacccgcctcggcctcccaaagtgctgtattttcttatctgatttttttcttgccttattaagacataattttctcccttctgaaatgagtgagggaagttcataaggtaaatccttcccatccatctgtttactacaataggttacaataattcactgatcacatccattttatctgttctagccaggcattccaaacaatttcttatactgctgcccaccaaagcagcttgccaacagtcaaatcactgattgggggaaaaaatcctgaaattttgcttagaatttgagcatttcctcaaaattgagatggatcaatatgtaaggggaggtgggagcgtgtgtggaagggggagagatatacttgagtcttatgattaatgtctaaaccagaatttgtgtctttagaactgaccagactggtagattttattgtattgcttaatgtcttttggtttggatttaggatgatagaaaacagaagtataattggtaaacccttaggaagaaattagaaaaacatggacgtaagacaaaaagtctctgtgaagggttgaagagtgacaagcattggtaacagtgccttagaactgtgtcagttagtctgatttggaaatcctttatgtaaagctgagactggtcctggttttgttccctttggtacagacctcttgtcagtgctataaattgtttaatgaggccattccagcagaaatcaacagaataattgattactcttctctctctctgtcactctccctctttctaaacatcattgaaggctgtctctctttaattttgtcagacacagtattttagggtgcatccagtataccattgagcattgtaacctcaggaaacagtttattttgggttctgatatgtagcatggtattttccctaaggcagaactttaaaaataaagaactttcacacaagggtctgtaacaattgtatatcttacaatatttttccttgcattgtaatttttaagtatttatcattttatagtacacatgtaaagaatatatgagccttgtatggagtgatgtttcatttacctgggttgtgttaatgactgaatgttgacaataaatctgttttatactg

SEQ ID NO: 2664 - DNA, 1138 bp, Homo sapiens
agggctactaggacgcacgcgcgagatagaacctctagtctcgtggagagattgaagatggcggcttctcaggcggtggaggaaatgcggagccgcgtggttctgggggagtttggggttcgcaatgtccatactactgactttcccggtaactattccggttatgatgatgcctgggaccaggaccgcttcgagaagaatttccgtgtggatgtagtacacatggatgaaaactcactggagtttgacatggtgggaattgacgcagccattgccaatgcttttcgacgaattctgctagctgaggtgccaactatggctgtggagaaggtcctggtgtacaataatacatccattgttcaggatgagattcttgctcaccgtctggggctcattcccattcatgctgatccccgtctttttgagtatcggaaccaaggagatgaagaaggcacagagatagatactctacagtttcgtctccaggtcagatgcactcggaacccccatgctgctaaagattcctctgaccccaacgaactgtacgtgaaccacaaagtgtataccaggcatatgacatggatccccctggggaaccaggctgatctctttccagagggcactatccgaccagtgcatgatgatatcctcatcgctcagctgcggcctggccaagaaattgacctgctcatgcactgtgtcaagggcattggcaaagatcatgccaagttttcaccagtggcaacagccagttacaggctcctgccagacatcaccctgcttgagcccgtggaaggggaggcagctgaggagttgagcaggtgcttctcacctggtgttattgaggtgcaggaagtccaaggtaaaaaggtggccagagttgccaacccccggctggataccttcagcagagaaatcttccggaatgagaagctaaagaaggttgtgaggcttgcccgggttcgagatcattatatctgtaagaaagatttgctggctgcggtggctcacacctgtaatcccagcactttgggaggccaaggcgagtggatcacggggtcaagagagcgagaccatcctggctaacatggtgaaaccccgtctctataaaaaaaaaaaaaaaaaaaaaaaaaaaaaa

SEQ ID NO: 2665 - DNA, 1322 bp, Homo sapiens
agggctactaggacgcacgcgcgagatagaacctctagtctcgtggagagattgaagatggcggcttctcaggcggtggaggaaatgcggagccgcgtggttctgggggagtttggggttcgcaatgtccatactactgactttcccggtaactattccggttatgatgatgcctgggaccaggaccgcttcgagaagaatttccgtgtggatgtagtacacatggatgaaaactcactggagtttgacatggtgggaattgacgcagccattgccaatgcttttcgacgaattctgctagctgaggtgccaactatggctgtggagaaggtcctggtgtacaataatacatccattgttcaggatgagattcttgctcaccgtctggggctcattcccattcatgctgatccccgtctttttgagtatcggaaccaaggagatgaagaaggcacagagatagatactctacagtttcgtctccaggtcagatgcactcggaacccccatgctgctaaagattcctctgaccccaacgaactgtacgtgaaccacaaagtgtataccaggcatatgacatggatccccctggggaaccaggctgatctctttccagagggcactatccgaccagtgcatgatgatatcctcatcgctcagctgcggcctggccaagaaattgacctgctcatgcactgtgtcaagggcattggcaaagatcatgccaagttttcaccagtggcaacagccagttacaggctcctgccagacatcaccctgcttgagcccgtggaaggggaggcagctgaggagttgagcaggtgcttctcacctggtgttattgaggtgcaggaagtccaaggtaaaaaggtggccagagttgccaacccccggctggataccttcagcagagaaatcttccggaatgagaagctaaagaaggttgtgaggcttgcccgggttcgagatcattatatcttctctgttgagtcaacgggggtgttgccaccagatgtgctggtgagtgaagccatcaaagtactgatggggaagtgccggcgcttcttggatgaactagatgcggttcagatggactgagcttggatgcttctgaggcaagctgaagctttgggttctgactgacccaccctacaggactgctgaacagagagcccagtgtgactagggatcctgagttttctgggacaattccagctttaatcaatacattttgttaaatgtgccataaaatgagactttttacgcctttataaggccttagatgtaaataaactcacccaaacaaaaaaaaaaaaaaaaaa

SEQ ID NO: 2666 - DNA, 3507 bp, Homo sapiens
ccggggccgagccgctgttcggctgacagttgaggatggccggagccgagggcgccgctgggcggcagtcggagctggagcccgtggtatcgttggtcgacgtccttgaggaggacgaggagctggagaatgaggcgtgcgctgtcctgggcggcagcgactccgagaagtgctcctactctcagggctcagtaaagagacaagcactatatgcctgtagtacctgcaccccagagggagaagaaccagcaggaatttgtttagcttgcagttatgaatgtcatggaagtcacaaactatttgagctatacacaaaaagaaattttcgttgtgattgtggaaacagcaagtttaaaaatttggaatgcaaattacttcctgacaaagcaaaggtaaattctggcaataagtacaatgacaacttttttggattgtactgcatttgcaagagaccttatcctgatcctgaagacgagattccagatgagatgatccagtgcgtagtctgtgaagactggttccatggaaggcatcttggtgccattccccctgagagtggggattttcaggagatggtatgccaggcctgcatgaaacgttgttcttttttgtgggcttatgctgcacaattggcagtaaccaaaatatccactgaggatgatggattggtgcggaacattgatggaataggtgatcaggaagttatcaaacctgaaaatggagagcatcaagatagtaccctcaaagaggatgttccagaacagggaaaggatgatgtccgggaggttaaagtagagcagaacagtgaaccatgtgccggctctagttctgaatctgatctccagacagtgtttaagaatgaaagcctcaacgcagaatcaaaatctggctgcaaacttcaggagcttaaagctaagcagcttataaagaaagacactgccacctattggcccctgaactggcgtagcaagttgtgtacctgccaagactgtatgaaaatgtatggagatctagatgtcttattcctgacagatgaatacgacacagttctggcttatgaaaacaaagggaagattgcccaggccactgacaggagcgatcccctaatggatacccttagcagcatgaatagagtccagcaagtggaactcatttgtgaatacaatgatttgaagactgaacttaaagactatctcaagagatttgctgatgaaggcacggttgttaagagagaggacattcagcagttctttgaagagtttcagtcaaaaaagagaagaagagtggatgggatgcagtattactgcagctagagtggagtatgaagctttctcattcaagccaatgaaaatgtgcttcccattcttggaataaaagaggtgtggttcacatttggccccctttccgtcctcctctgtttggagaggcctcgcgctcccttcattctctttagctgcagtagccaccgtgtggatgctgacttcacagccagcgtcctctgtgactcagctgatgcagctcattccacagacttcgccagtgtactcctactccagtgcacccagggttatttgcatagtttttaagtttgattttgttttgagaaagcaaattggtgtcttgtttaatgatctgttatttcactcccagatgtgtgtgttttgccacagagctgttgccttccagaacctcctccgcaggcatcacggaaggctctcttcccgtcacctagaacctctacaggtcccctcgcccctatgattgtggtgccttgggtcaaagcttcctcaagcctggtctgctccttctttcacgtccctgttttctgaggtttggtcatagcttagaaaggatcttggggcttgttttctctaggcccaacctccagagtagccaggactgatggttttctggtctggatgtctgtcacaggcggagagattaacagatgacagggttgaggaagcaagcctttgttatgaattttactaatacagttcaagtgaaattttcgttcatgattctattggcactagaattagaatttcagtactgtagtgctcacagggcttcctggagaacatttgcccgtatactagtcccttctctgctgcctagaaaacagaccgggtctcacccctgtgaaatcttggtggtttacgaagtcctctggatttcttgatattatcagggatattcataagcatatatcaaaaatggacctattttgatattctgttatgaaaatgttattagaaccccaataaattattatttttcccccttgaatctgctaaagaaaacagatcctgacttagcttacttgaaataagcagggcagggagccctgttttggaagagacagactgtggaagagattacaaacaaggcccgaggctgcacgaatgatgagttttgtgtatataatgttaatgtccaccgccacttccctaacgactatgagatcttttttttgaagatcctcatggaaggttgtacagagccccacatttgaggggaagtcctttcagttgatatgagatctctttaacacccctcagtctatgtaggaaatgccttgtgatacatagagaaccctcagcttctctctgcctctggaggaccaaggtctttcctgacagtcggagacacaccttgatgtatgttaataaaagcatttcaggctgtggggccaccatgtatattaatactccttatgtgtccagcatctgtgtattcattcgagtgcccaatccctggatgagatgaactaggccttataaaaagtcaaagcctcaaagaaatggcacaaccatgttcttcggcactcaggctcctaattgcagatcctcacgaagggtggtatgtggagctggaaggtcttgtggccacaggacatgctggtgagccctgagctggccttgtgcagagggctccgttcaaaggctcggggtgtctttgaggttgtttatcaagctggggaactcttccaagtctgacaatgtttcgaaccctttttgcaaggttgcactattagtataccatcatgtccggaaaacttttaatcttctcaaatatctgatgtaactaccagaaagtcccttacttcctatgaccaatcaggaccaagtcttggaggtgatgtgttacattacgtgcagcacaatagtaccgatcagttaactcagcgctgaagggcttgttttatgaaaggtactattccttctttcacattaactggaaacctctttttttacctgttgttcacaactagttttcttattgactgtattggactgtctcttcttgtagagactgattttggccaacatattaatgcatgttttatgcaaaacacaaatatgatattagttgcttttaaggagttctggcattgtatgtgcatttttgtagaaattgttactggacttataattacatacttaactctgatcaggtttctgtaaaatttaaataaaaccaatacaaaataaaaaaaaaaaaaaa

SEQ ID NO: 2667 - DNA, 1576 bp, Homo sapiens
aaagcgccacccggaggcggaaatcagcccgcgtccggcgcaggcgggagaagggagaggagtgacatccgtttgtcggaagtcgctcctcccccttccttcgctttttttccttgtcattggttcctggcactcgggccccacctcctccggctacgcccctcacggccgcttttcccgcctccgccggggccgagccgctgttcggctgacagttgaggatggccggagccgagggcgccgctgggcggcagtcggagctggagcccgtggtatcgttggtcgacgtccttgaggaggacgaggagctggagaatgaggcgtgcgctgtcctgggcggcggcgactccgagaagtgctcctactctcagggctcagtaaagagacaagcactatatgcctgtagtacctgcaccccagagggagaagaaccagcaggaatttgtttagcttgcagttatgaatgtcatggaagtcacaaactatttgagctatacacaaaaagaaattttcgttgtgattgtggaaacagcaagtttaaaaatttggaatgcaaattacttcctgacaaagcaaaggtaaattctggcaataagtacaatgacaacttttttggattgtactgcatttgcaagagaccttatcctgatcctgaagacgagattccagatgagatgatccagtgcgtagtctgtgaagactggttccatggaaggcatcttggtgccattccccctgagagtggggattttcagaagatggtatgccaggcctgcatgaaacgttgttcttttttgtgggcttatgctgcacaattggcagtaaccaaaatatccactgaggatgatggattggtgcggaacattgatggaataggtgatcaggaagttatcaaacctgaaaatggagagcatcaagatagtaccctcaaagaggatgttccagaacagggaaaggatgatgtccgggaggttaaagtagagcagaacagtgaaccatgtgccggctctagttctgaatctgatctccagacagtgtttaagaatgaaagcctcaacgcagaatcaaaatctggctgcaaacttcaggagcttaaagctaagcagcttataaagaaagacactgccacctattggcccctgaactggcgtagcaagttgtgtacctgccaagactgtatgaaaatgtatggagatctagatgtcttattcctgacagatgaatacgacacagttctggcttatgaaaacagagggaagattgcccaggccactgacaggagcgatcccctaatggatacccttagcagcatgaatagagtccagcaagtggaactcatttgtgaatacaatgatttgaagactgaacttaaagactatctcaagagatttgctgatgaaggcacggttgttaagagagaggacattcagcagttctttgaagagtttcagtcaaaaaagagaagaagagtggatgggatgcagtattactgcagctagagtggagtatgaagctttctcattcaagccaatgaaaatgcgcttcccattcttggaataaaagaggtgtggttcac

SEQ ID NO: 2668 - DNA, 1633 bp, Homo sapiens
cacgagggggacccgggccgcgtgggcgccgggatggagggcgccaaggggcggggagcgggcgtgcgtgtgtgtgcgagtgcgaatgcgagggaggccggccttgagtgaaaccggagctacaaagaaggggagagtccgggagcgggagggcgcgagggaggagcggcggctccggggcagctccgacgccctcccgcggggaaggagcccccgcggtgccgccgaggccccgacgcggggccgcccctcggctcgccgccccgcgcccgcgcccgctgggaatgatgaagaagaacaattccgccaagcggggacctcaggatggaaaccagcagcctgcaccgcccgagaaggtcggctgggtccggaaattctgcgggaaagggattttcagggagatttggaaaaaccgctatgtggtgctgaaaggggaccagctctacatctctgagaaggaggtaaaagatgagaaaaatattcaagaggtatttgacctgagtgactatgagaagtgtgaagagctccggaagtccaagagcaggagcaagaaaaatcatagcaagtttactcttgcccactccaaacagcccggtaacacggcacccaacctgatcttcctggcagtgagtccagaagagaaggaatcgtggatcaatgccctcaactctgccatcacccgagccaagaaccgtatcttggatgaggtcaccgttgaggaggacagctatcttgcccatcccactcgagacagggcaaaaatccagcactcccgccgccccccaacaaggggacacctaatggctgtggcttccacctctacctcggatgggatgctgaccttggacttgatccaagaggaagacccttcccctgaggaaccaacctcttgtgctgagagctttcgggttgacctggacaagtctgtggcccagctggcagggagccggcggagagcggactcagaccgcatccagccctccgcagaccgggcaagcagtctctcccgaccttgggaaaaaacagacaaaggggccacctacaccccccaggcacccaagaagttgacgcccacagagaaaggccgctgcgcctccctggaggagatcctatctcagcgggatgctgcctctgcccgcaccctccagctgcgggctgaggaacccccaacccctgccctccccaacccggggcagctgtcccggatccaggacctggtagcaaggaaactggaggagactcaggagcttctggcagaggttcagggactgggagatgggaagcgaaaggccaaggacccccctcggtctccgccggattctgagtcagagcagctgctgctggagacggaacggctgctgggagaggcatcatcgaattggagccaggcaaagagggtgctgcaggaggtcagggagctgagagacctgtacagacagatggacctgcagaccccggactcccacctcagacagaccaccccgcacagtcagtaccggaagagcctgatgtgagggcagggtggggtctggaacttgtcgggttggacagactcttatctccgtgttgctggataaagcttttttatttacctcaatcaaaaaaagaaaacaaaaatgaaaaaaaaaaaaaa

SEQ ID NO: 2669 - DNA, 2997 bp, Homo sapiens
caagaggtgcagagcaagcgcatgcgtcgtgacggcccggcttaggcgactctgggcgggtctgggccgctccagtgttttggggcacagaagctgtgggaggagctggaggcttcaccgtggtaaccacagcgccgctgctgccccgccttgcaggcctcaggactgtcatcgcctctgggtgtgagggtactttggccaccgtccccggaaataaccgcgcctgcctctcaagataccccatcctctccacgccgctgccgctgccgccatgcaaggggaggacgccagatacctcaaaaggaaagttaaaggagggaatatagatgtacatccatcagaaaaagcactcattgttcactatgaagtggaagctaccattcttggagaaatgggggaccccatgttgggagaacgaaaagaatgtcaaaaaatcattcgacttaagagtctcaatgccaacacagatataacttccctggcaaggaaggtggttgaagaatgtaaactcattcatccttcaaaactaaatgaggtagaacagctgttgtactatctacagaaccgccgtgattcattgtcaggaaaagagaaaaaagaaaaatcaagcaagcctaaagatccacctccttttgaaggaatggagattgatgaagttgctaacattaatgacatggatgaatatattgagttattatatgaagatattcctgacaaagttcggggttctgctttgatcctgcagcttgctcgaaatcctgataacttggaagaactactattgaatgaaactgcccttggtgcattagcaagggtcctgagagaagactggaagcaaagtgtcgagttagctacaaacataatttacatctttttttgtttctccagcttttctcaatttcatggacttattactcactataaaattggagctctgtgtatgaatattattgatcatgagttaaaaagacatgagctttggcaagaagaactctcaaagaagaagaaagctgttgatgaagaccctgaaaaccaaaccttgagaaaggattatgaaaaaacctttaaaaagtaccaggggcttgtggtaaaacaggaacagctattacgagttgctctttatttgcttctgaatcttgctgaggatactcgtaccgaactgaaaatgaggaacaagaacatagttcacatgttggtgaaagcccttgatcgggacaattttgagctgctaattttagttgtgtcattcttgaagaaactcagcatttttatggagaataaaaatgatatggtggaaatggatattgttgaaaaactggtgaaaatgataccttgtgagcatgaagacctgctgaatatcaccctccgacttttactaaacctatcctttgacacaggactgaggaataagatggtacaagttggactgcttcccaagctcactgcactcctaggcaatgacaactacaaacaaatagcaatgtgtgttctttaccacataagcatggatgaccgctttaaatcaatgtttgcatacactgactgtataccacagttaatgaagatgctgtttgaatgttcagatgaacgaattgacttggaactcatttctttctgcattaatcttgctgctaacaaaagaaatgtacagcttatctgtgaaggaaatgggctgaagatgctcatgaagagggctctgaagtttaaggatccattgctgatgaaaatgattagaaacatttctcagcatgatggaccaactaaaaatctgtttattgattatgttggggaccttgcagcccagatctctaatgatgaagaagaggagtttgtgattgaatgtttgggaactcttgcaaacttgaccattccagacttagactgggaattggttcttaaagaatataagttggttccatacctcaaggataaactaaaaccaggtgctgcagaagatgatcttgttttagaagtggttataatgattggaactgtatccatggatgactcttgtgctgcattgctagccaaatctggcataatccctgcactcattgaattgctaaatgctcaacaagaagatgatgaatttgtgtgtcagataatttatgtcttctaccagatggttttccaccaagccacaagagacgtcataatcaaggaaacacaggctccagcatatctcatagacctaatgcatgataagaataatgaaatccgaaaggtctgtgataatacattagatattatagcggaatatgatgaagaatgggctaagaaaattcagagtgaaaagtttcgctggcataactctcagtggctggagatggtagagagtcgtcagatggatgagagtgagcagtacttgtatggtgatgatcgaattgagccatacattcatgaaggagatattctcgaaagacctgaccttttctacaactcagatggattaattgcctctgaaggagccataagtcccgatttcttcaatgattaccaccttcaaaatggagatgttgttgggcagcattcatttcctggcagccttggaatggatggctttggccaaccagttggcattcttggacgccctgccacagcatatggattccgccctgatgaaccttactactatggctatggatcttgataaagtatctgtttccatgtgtaatctcagcttagaagaaatctgtgtgggttgggttaattttggatctttgcctaataatgcatgttgatgttattgtgggtctgtgtttgtttttatttttatatgttgttagctgcagattaaccccagcccctctgtcttctgttaagtacagttgatactgacattgttcactcatcaaaccacatcttgatgctaagtaacatttcccatgagcctcaaaactgaatgctgaaaagctactagactggaaaacaaacactgcattatgtatgttaagtgactaatttaatttcaattaaaaagcgtaaagtgaaaatgaa

SEQ ID NO: 2670 - DNA, 3279 bp, Homo sapiens
gacgtcgcgcgggctcccgggcggggcgggtccggccgcctccgagcccggccggcagcccccggccttaaagcgcgggctgtccggaggggtcggctttcccaccgaggatttggcactctggtgagggaaaagggcgaaagagaaaagcgagcagccgtcctttcacagcctcagaaagtgctcgcttcccttcgggggctttcgcgaatcccgaggcaatctcggaggcggtatttgacctgtccaaagacgacttgatacctctataatgtaacagaaaaggtcagaaaatattaagcaagtagaagtgtggagcatattaagcaagatgaacatctcgggaagcagctgtggaagccctaactctgcagatacatctagtgactttaaggacctttggacaaaactaaaagaatgtcatgatagagaagtacaaggtttacaagtaaaagtaaccaagctaaaacaggaacgaatcttagatgcacaaagactagaagaattcttcaccaaaaatcaacagctgagggaacagcagaaagtccttcatgaaaccattaaagttttagaagatcggttaagagcaggcttatgtgatcgctgtgcagtaactgaagaacatatgcggaaaaaacagcaagagtttgaaaatatccggcagcagaatcttaaacttattacagaacttatgaatgaaaggaatactctacaggaagaaaataaaaagctttctgaacaactccagcagaaaattgagaatgatcaacagcatcaagcagctgagcttgaatgtgaggaagacgttattccagattcaccgataacagccttctcattttctggcgttaaccggctacgaagaaaggagaacccccatgtccgatacatagaacaaacacatactaaattggagcactctgtgtgtgcaaatgaaatgagaaaagtttccaagtcttcaactcatccacaacataatcctaatgaaaatgaaattctagtagctgacacttatgaccaaagtcaatctccaatggccaaagcacatggaacaagcagctatacccctgataagtcatcttttaatttagctacagttgttgctgaaacacttggacttggtgttcaagaagaatctgaaactcaaggtcccatgagcccccttggtgatgagctctaccactgtctggaaggaaatcacaagaaacagccttttgaggaatctacaagaaatactgaagatagtttaagattttcagattctacttcaaagactcctcctcaagaagaattacctactcgagtgtcatctcctgtatttggagctacctctagtatcaaaagtggtttagatttgaatacaagtttgtccccttctcttttacagcctgggaaaaaaaaacatctgaaaacactcccttttagcaacacttgtatatctagattagaaaaaactagatcaaaatctgaagatagtgcccttttcacacatcacagtcttgggtctgaagtgaacaagatcattatccagtcatctaataaacagatacttataaataaaaatataagtgaatccctaggtgaacagaataggactgagtacggtaaagattctaacactgataaacatttggagcccctgaaatcattgggaggccgaacatccaaaaggaagaaaactgaggaagaaagtgaacatgaagtaagctgcccccaagcttcttttgataaagaaaatgctttcccttttccaatggataatcagttttccatgaatggagactgtgtgatggataaacctctggatctgtctgatcgattttcagctattcagcgtcaagagaaaagccaaggaagtgagacttctaaaaacaaatttaggcaagtgactctttatgaggctttgaagaccattccaaagggcttttcctcaagccgtaaggcctcagatggcaactgcacgttgcccaaagattccccaggggagccctgttcacaggaatgcatcatccttcagcccttgaataaatgctctccagacaataaaccatcattacaaataaaagaagaaaatgctgtctttaaaattcctctacgtccacgtgaaagtttggagactgagaatgttttagatgacataaagagtgctggttctcatgagccaataaaaatacaaaccaggtcagaccatggaggatgtgaacttgcatcagttcttcagttaaatccatgtagaactggtaaaataaagtctctacaaaacaaccaagatgtatcctttgaaaatatccagtggagtatagatccgggagcagacctttctcagtataaaatggatgttactgtaatagatacaaaggatggcagtcagtcaaaattaggaggagagacagtggacatggactgtacattggttagtgaaaccgttctcttaaaaatgaagaagcaagagcagaagggagaaaaaagttcaaatgaagaaagaaaaatgaatgatagcttggaagatatgtttgatcggacaacacatgaagagtatgaatcctgtttggcagacagtttctcccaagcagcagatgaagaggaggaattgtctactgccacaaagaaactacacactcatggtgataaacaagacaaagtcaagcagaaagcgtttgtggagccgtattttaaaggtgatgaaagagagactagcttgcaaaattttcctcatattgaggtggttcggaaaaaagaggagagaagaaaactgcttgggcacacgtgtaaggaatgtgaaatttattatgcagatatgccagcagaagaaagagaaaagaaattggcttcctgctcaagacaccgattccgctacattccacccaacacaccagagaatttttgggaagttggttttccttccactcagacttgtatggaaagaggttatattaaggaagatcttgatccttgtcctcgtccaaaaagacgtcagccttacaacgcaatattttctccaaaaggcaaggagcagaagacatagacgttgaaacagaaacagaaggatgaaggacagttttttccttcttagttatttatagttaaagttggtactaaacattgatttttttgatcttctgtaaatggatttataaatcagttttctattgaaaatgtttgtgatattttgcttttgcacctttaaaacaataaggcgctttcattttgcactctaacttaagagtttttactttatgtagtgatacctaatacaattttgaaaatacaaaaaaaaaa

SEQ ID NO: 2671 - DNA, 3249 bp, Homo sapiens
cgcacgcggaaccggcgcgggcacctggggagaaatggatggagaagggacctggctggaaagcctttgccccgctgctctgctccgcccataagaggacccctgaaatgtcccgtgcagtttgttcaagtcccctgtgtgatgaaatgtgcctctcgccttacccgtgtgagaatacctgtggtgtggcagcgagtattttggtatttgacctgtccaaagacgacttgatacctctataatgtaacagaaaaggtcagaaaatattaagcaagtagaagtgtggagcatattaagcaagatgaacatctcgggaagcagctgtggaagccctaactctgcagatacatctagtgactttaaggacctttggacaaaactaaaagaatgtcatgatagagaagtacaaggtttacaagtaaaagtaaccaagctaaaacaggaacgaatcttagatgcacaaagactagaagaattcttcaccaaaaatcaacagctgagggaacagcagaaagtccttcatgaaaccattaaagttttagaagatcggttaagagcaggcttatgtgatcgctgtgcagtaactgaagaacatatgcggaaaaaacagcaagagtttgaaaatatccggcagcagaatcttaaacttattacagaacttatgaatgaaaggaatactctacaggaagaaaataaaaagctttctgaacaactccagcagaaaattgagaatgatcaacagcatcaagcagctgagcttgaatgtgaggaagacgttattccagattcaccgataacagccttctcattttctggcgttaaccggctacgaagaaaggagaacccccatgtccgatacatagaacaaacacatactaaattggagcactctgtgtgtgcaaatgaaatgagaaaagtttccaagtcttcaactcatccacaacataatcctaatgaaaatgaaattctagtagctgacacttatgaccaaagtcaatctccaatggccaaagcacatggaacaagcagctatacccctgataagtcatcttttaatttagctacagttgttgctgaaacacttggacttggtgttcaagaagaatctgaaactcaaggtcccatgagcccccttggtgatgagctctaccactgtctggaaggaaatcacaagaaacagccttttgaggaatctacaagaaatactgaagatagtttaagattttcagattctacttcaaagactcctcctcaagaagaattacctactcgagtgtcatctcctgtatttggagctacctctagtatcaaaagtggtttagatttgaatacaagtttgtccccttctcttttacagcctgggaaaaaaaaacatctgaaaacactcccttttagcaacacttgtatatctagattagaaaaaactagatcaaaatctgaagatagtgcccttttcacacatcacagtcttgggtctgaagtgaacaagatcattatccagtcatctaataaacagatacttataaataaaaatataagtgaatccctaggtgaacagaataggactgagtacggtaaagattctaacactgataaacatttggagcccctgaaatcattgggaggccgaacatccaaaaggaagaaaactgaggaagaaagtgaacatgaagtaagctgcccccaagcttcttttgataaagaaaatgctttcccttttccaatggataatcagttttccatgaatggagactgtgtgatggataaacctctggatctgtctgatcgattttcagctattcagcgtcaagagaaaagccaaggaagtgagacttctaaaaacaaatttaggcaagtgactctttatgaggctttgaagaccattccaaagggcttttcctcaagccgtaaggcctcagatggcaactgcacgttgcccaaagattccccaggggagccctgttcacaggaatgcatcatccttcagcccttgaataaatgctctccagacaataaaccatcattacaaataaaagaagaaaatgctgtctttaaaattcctctacgtccacgtgaaagtttggagactgagaatgttttagatgacataaagagtgctggttctcatgagccaataaaaatacaaaccaggtcagaccatggaggatgtgaacttgcatcagttcttcagttaaatccatgtagaactggtaaaataaagtctctacaaaacaaccaagatgtatcctttgaaaatatccagtggagtatagatccgggagcagacctttctcagtataaaatggatgttactgtaatagatacaaaggatggcagtcagtcaaaattaggaggagagacagtggacatggactgtacattggttagtgaaaccgttctcttaaaaatgaagaagcaagagcagaagggagaaaaaagttcaaatgaagaaagaaaaatgaatgatagcttggaagatatgtttgatcggacaacacatgaagagtatgaatcctgtttggcagacagtttctcccaagcagcagatgaagaggaggaattgtctactgccacaaagaaactacacactcatggtgataaacaagacaaagtcaagcagaaagcgtttgtggagccgtattttaaaggtgatgaaagagagactagcttgcaaaattttcctcatattgaggtggttcggaaaaaagaggagagaagaaaactgcttgggcacacgtgtaaggaatgtgaaatttattatgcagatatgccagcagaagaaagagaaaagaaattggcttcctgctcaagacaccgattccgctacattccacccaacacaccagagaatttttgggaagttggttttccttccactcagacttgtatggaaagaggttatattaaggaagatcttgatccttgtcctcgtccaaaaagacgtcagccttacaacgcaatattttctccaaaaggcaaggagcagaagacatagacgttgaaacagaaacagaaggatgaaggacagttttttccttcttagttatttatagttaaagttggtactaaacattgatttttttgatcttctgtaaatggatttataaatcagttttctattgaaaatgtttgtgatattttgcttttgcacctttaaaacaataaggcgctttcattttgcactctaacttaagagtttttactttatgtagtgatacctaatacaattttgaaaatacaaaaaaaaaa

SEQ ID NO: 2672 - DNA, 3233 bp, Homo sapiens
cgcacgcggaaccggcgcgggcacctggggagaaatggatggagaagggacctggctggaaagcctttgccccgctgctctgctccgcccataagaggacccctgaaatgtcccgtgcagtttgttcaagtcccctgtgtgatgaaatgtgcctctcgccttacccgtgtgagaatacctgtggtgtggcagcgagtattttggtgagcacctgcagtgtagtggtttatactaaggaatacacacaaattacaggcctttgagcccagaatgcaacttgggaggtatttgacctgtccaaagacgacttgatacctctataatgtaacagaaaaggtcagaaaatattaagcaagtagaagtgtggagcatattaagcaagatgaacatctcgggaagcagctgtggaagccctaactctgcagatacatctagtgactttaaggacctttggacaaaactaaaagaatgtcatgatagagaagtacaaggtttacaagtaaaagtaaccaagctaaaacaggaacgaatcttagatgcacaaagactagaagaattcttcaccaaaaatcaacagctgagggaacagcagaaagtccttcatgaaaccattaaagttttagaagatcggttaagagcaggcttatgtgatcgctgtgcagtaactgaagaacatatgcggaaaaaacagcaagagtttgaaaatatccggcagcagaatcttaaacttattacagaacttatgaatgaaaggaatactctacaggaagaaaataaaaagctttctgaacaactccagcagaaaattgagaatgatcaacagcatcaagcagctgagcttgaatgtgaggaagacgttattccagattcaccgataacagccttctcattttctggcgttaaccggctacgaagaaaggagaacccccatgtccgatacatagaacaaacacatactaaattggagcactctgtgtgtgcaaatgaaatgagaaaagtttccaagtcttcaactcatccacaacataatcctaatgaaaatgaaattctagtagctgacacttatgaccaaagtcaatctccaatggccaaagcacatggaacaagcagctatacccctgataagtcatcttttaatttagctacagttgttgctgaaacacttggacttggtgttcaagaagaatctgaaactcaaggtcccatgagcccccttggtgatgagctctaccactgtctggaaggaaatcacaagaaacagccttttgaggaatctacaagaaatactgaagatagtttaagattttcagattctacttcaaagactcctcctcaagaagaattacctactcgagtgtcatctcctgtatttggagctacctctagtatcaaaagtggtttagatttgaatacaagtttgtccccttctcttttacagcctgggaaaaaaaaacatctgaaaacactcccttttagcaacacttgtatatctagattagaaaaaactagatcaaaatctgaagatagtgcccttttcacacatcacagtcttgggtctgaagtgaacaagatcattatccagtcatctaataaacagatacttataaataaaaatataagtgaatccctaggtgaacagaataggactgagtacggtaaagattctaacactgataaacatttggagcccctgaaatcattgggaggccgaacatccaaaaggaagaaaactgaggaagaaagtgaacatgaagtaagctgcccccaagcttcttttgataaagaaaatgctttcccttttccaatggataatcagttttccatgaatggagactgtgtgatggataaacctctggatctgtctgatcgattttcagctattcagcgtcaagagaaaagccaaggaagtgagacttctaaaaacaaatttaggcaagtgactctttatgaggctttgaagaccattccaaagggcttttcctcaagccgtaaggcctcagatggcaactgcacgttgcccaaagattccccaggggagccctgttcacaggaatgcatcatccttcagcccttgaataaatgctctccagacaataaaccatcattacaaataaaagaagaaaatgctgtctttaaaattcctctacgtccacgtgaaagtttggagactgagaatgttttagatgacataaagagtgctggttctcatgagccaataaaaatacaaaccaggtcagaccatggaggatgtgaacttgcatcagttcttcagttaaatccatgtagaactggtaaaataaagtctctacaaaacaaccaagatgtatcctttgaaaatatccagtggagtatagatccgggagcagacctttctcagtataaaatggatgttactgtaatagatacaaaggatggcagtcagtcaaaattaggaggagagacagtggacatggactgtacattggttagtgaaaccgttctcttaaaaatgaagaagcaagagcagaagggagaaaaaagttcaaatgaagaaagaaaaatgaatgatagcttggaagatatgtttgatcggacaacacatgaagagtatgaatcctgtttggcagacagtttctcccaagcagcagatgaagaggaggaattgtctactgccacaaagaaactacacactcatggtgataaacaagacaaagtcaagcagaaagcgtttgtggagccgtattttaaaggtgatgaaagtattatgcagatatgccagcagaagaaagagaaaagaaattggcttcctgctcaagacaccgattccgctacattccacccaacacaccagagaatttttgggaagttggttttccttccactcagacttgtatggaaagaggttatattaaggaagatcttgatccttgtcctcgtccaaaaagacgtcagccttacaacgcaatattttctccaaaaggcaaggagcagaagacatagacgttgaaacagaaacagaaggatgaaggacagttttttccttcttagttatttatagttaaagttggtactaaacattgatttttttgatcttctgtaaatggatttataaatcagttttctattgaaaatgtttgtgatattttgcttttgcacctttaaaacaataaggcgctttcattttgcactctaacttaagagtttttactttatgtagtgatacctaatacaattttgaaaatacaaaaaaaaaa

SEQ ID NO: 2673 - DNA, 2882 bp, Homo sapiens
gtgcagcctgagaggaaacaaagtgctgcgagcaggagacggcggcggcgcgaaccctgctgggcctccagtcaccctcgtcttgcattttcccgcgtgcgtgtgtgagtgggtgtgtgtgttttcttacaaagggtatttcgcgatcgatcgattgattcgtagttcccccccgcgcgcctttgccctttgtgctgtaatcgagctcccgccatcccaggtgcttctccgttcctctaaacgccagcgtctggacgtgagcgcaggtcgccggtttgtgccttcggtccccgcttcgccccctgccgtcccctccttatcacggtcccgctcgcggcctcgccgccccgctgtctccgccgcccgccatggcgactgcgacccccgtgccgccgcggatgggcagccgcgctggcggccccaccacgccgctgagccccacgcgcctgtcgcggctccaggagaaggaggagctgcgcgagctcaatgaccggctggcggtgtacatcgacaaggtgcgcagcctggagacggagaacagcgcgctgcagctgcaggtgacggagcgcgaggaggtgcgcggccgtgagctcaccggcctcaaggcgctctacgagaccgagctggccgacgcgcgacgcgcgctcgacgacacggcccgcgagcgcgccaagctgcagatcgagctgggcaagtgcaaggcggaacacgaccagctgctcctcaactatgctaagaaggaatctgatcttaatggcgcccagatcaagcttcgagaatatgaagcagcactgaattcgaaagatgcagctcttgctactgcacttggtgacaaaaaaagtttagagggagatttggaggatctgaaggatcagattgcccagttggaagcctccttagctgcagccaaaaaacagttagcagatgaaactttacttaaagtagatttggagaatcgttgtcagagccttactgaggacttggagtttcgcaaaagcatgtatgaagaggagattaacgagaccagaaggaagcatgaaacgcgcttggtagaggtggattctgggcgtcaaattgagtatgagtacaagctggcgcaagcccttcatgagatgagagagcaacatgatgcccaagtgaggctgtataaggaggagctggagcagacttaccatgccaaacttgagaatgccagactgtcatcagagatgaatacttctactgtcaacagtgccagggaagaactgatggaaagccgcatgagaattgagagcctttcatcccagctttctaatctacagaaagagtctagagcatgtttggaaaggattcaagaattagaggacttgcttgctaaagaaaaagacaactctcgtcgcatgctgacagacaaagagagagagatggcggaaataagggatcaaatgcagcaacagctgaatgactatgaacagcttcttgatgtaaagttagccctggacatggaaatcagtgcttacaggaaactcttagaaggcgaagaagagaggttgaagctgtctccaagcccttcttcccgtgtgacagtatcccgagcatcctcaagtcgtagtgtacgtacaactagaggaaagcggaagagggttgatgtggaagaatcagaggcgagtagtagtgttagcatctctcattccgcctcagccactggaaatgtttgcatcgaagaaattgatgttgatgggaaatttatccgcttgaagaacacttctgaacaggatcaaccaatgggaggctgggagatgatcagaaaaattggagacacatcagtcagttataaatatacctcaagatatgtgctgaaggcaggccagactgttacaatttgggctgcaaacgctggtgtcacagccagccccccaactgacctcatctggaagaaccagaactcgtggggcactggcgaagatgtgaaggttatattgaaaaattctcagggagaggaggttgctcaaagaagtacagtctttaaaacaaccatacctgaagaagaggaggaggaggaagaagcagctggagtggttgttgaggaagaacttttccaccagcagggaaccccaagagcatccaatagaagctgtgcaattatgtaaaattttcaactgtcttcctcaaaataaagaagtatggtaatccttacctgtatacagtgcagagccttctcagaagcacagaatatttttatatttcctttatgtgaatttttaagctgcaaatctgatggccttaatttcctttttgacactgaaagttttgtaaaagaaatcatgtccatacactttgttgcaagatgtgaattattgacactgaacttaataactgtgtactgttcggaaggggttcctcaaattttttgactttttttgtatgtgtgttttttctttttttttaagttcttatgaggaggggagggtaaataaaccactgtgcgtcttggtgtaatttgaagattgccccatctagactagcaatctcttcattattctctgctatatataaaacggtgctgtgagggaggggaaaagcatttttcaatatattgaacttttgtactgaatttttttgtaataagcaatcaaggttataattttttttaaaatagaaattttgtaagaaggcaatattaacctaatcaccatgtaagcactctggatgatggattccacaaaacttggttttatggttacttcttctcttagattcttaattcatgaggagggtgggggagggaggtggagggagggaagggtttctctattaaaatgcattcgttgtgttttttaagatagtgtaacttgcttaaatttcttatgtgacattaacaaataaaaaagctcttttaatat

SEQ ID NO: 2674 - DNA, 4877 bp, Homo sapiens
ggcggattggcgggcacgccccctcgcccgcggccccctccccgcctctctccaccgcctcctctggctccccggtcagagggccggagcgagaagatggcgaagacgtacgattatctcttcaagctcctgctgatcggcgactcgggggtaggcaagacctgcctcctgttccgcttctcagaggacgccttcaacaccaccttcatctccaccatcggaattgattttaaaattagaacgatagaactagatggaaagaaaattaagcttcagatatgggacacagcgggtcaggaaagattccgaacaatcacgacagcgtactacagaggagccatgggcattatgctggtctatgacatcacaaatgaaaaatcctttgacaatattaaaaattggatcagaaacattgaagagcatgcctcttccgatgtcgaaagaatgatcctgggtaacaaatgtgatatgaatgacaaaagacaagtgtcaaaagaaagaggggagaagctagcaattgactatgggattaaattcttggagacaagcgcaaaatccagtgcaaatgtagaagaggcattttttacacttgcacgagatataatgacaaaactcaacagaaaaatgaatgacagcaattcagcaggagcaggtggaccagtgaaaataacagaaaaccgatcaaagaagaccagtttctttcgttgctcgctactttgatgaactctttctgagagactgcagcacacctagagggccctttcctgcttctctgaaagcacaggtcacccagcctcagaatcacacctcccggctgctgctgagagcaccactgaacttagacctctcaacacagtatgccaagtggattccagcctcatggcctagcaaaagaacagactccctttttcaaacatggaagcaatgaagtggagacacatgcaggacctaactcgttttttccttgttttattacctgttgcagaagcggttatctttcttttttactttgcacatcagtgttagcctttccctatttcagcacaatcttagactcatatttgcacacttttgtgtcgtgaagttctagacaaatttgtacatgtggcaatgttaaaagagcatttacagcagaggttaatatactaaaattaaagggtatttggtctggttcatatggtcaaatattactgccttggtagcatttatttaagggctttttcttaaataagaatcattaaagtcattaaaaaaatttactgaaatgcccatcttgtcatcaaaggccacaatttctttatttcttcagattaagagctttgcctcatccccgacctgttttccagagtctgggtagctgaatgaatcactttaaaatgattacctctgcctaatctatagaaactgcatttggaaatcaccataatctcatttttccctggggtttgtatttgctattctttcccatgtttgacttaagtgtaatcactcttaagtaatatttgaacattattatctgtttctatttgtgaacttcttgagctgaaattttacgtgggctgagagatataccatttagggttttagtgcagcatctaactgtgattctgtcaataaggatatgtaatatattttttcttaggttcactccttagctggctggtttagttgtaataccaaattcctaccataatccctgtctacaaaagttaggtttagattttagtttgcggaaaccttccctatatagagacagattaacttgttgatataaatttaatagagctagctcttggtaatggtgaaaataatgagttttggttggttttatttggcagatgtttttagaaataaaagtacttagacctagtgcagcctctaggaaaagtcttgccttttcattagagaaaacaggaccaaggtttcagttttcaaacagctgttgttgattgtgtagaacccagttccatctgttttggttcattgttacagaacttagtccagtcatttgggctaaagccaaccaaaagcttagttgcctttctcaacaaacactggtactggtatacttttgtagatgaaaccatcacaaggtatttagtgttaacttgtgtgccaaattcagatcactatgtcgttgttgctctagccttcagtgtcataacacaggggggataaaacagaggggatgagggaaatgaattctgttaataattattcttcctggtatgcctgttttgcttcacaaaggctactatcatgctggatagataagaacaggagatggcagtggaaagggattgcttgttaccacagagaattctcttcaaattaagatatgtcattagaatgcttggaccagtcaatcttttgtacttatttgaaaatataggaacaatttagcagctgcaaatatgcccaagctatttttaatagatatactaaacttattgttgacaaatttcagcctccttaatttttttttttttggtaattacctataggcttaaaagtcattcgttgctgttctagtataattagtagttccgtgattgaaagtttattgtaattctactatcttcaaattagatacattttcaaaaggaaaagataattttttagaaacatcttaatattcactatttcctgaaaaaatccaagcagttaacgctttctggatggtaacaaagtaccttctaaaagataagtgctatgacaccatgtatgaatgtaattctcttagtaatttacctctgactatttggtgtcttaacgctttggtttatataatctcaggggttgtctgcaaaccaaaactgacatattctgtggttagcttttattacttttttttttaacagaatgctttgctttggttatatttcttctttcttcttttgtcttatatggattaataactagtctccatgaacttcacttgaaagagcctgtaaaagttagatgagtctaaaagtgctctttgaagtagcagcaaattgggagtatatgctctgttatatagaaataaattgtccttgctattttcttacatttagctttgctagattgtatatacattgagctaagaccttaggaaattcactttctgcatgataaaatgacccaataaatattccactttgcttaataatgtacatacagtgcattattttttctatttgtagatgaatttaatgacagataattgtctgttccccgctgaaactgaagaaatctagtttttttgtgaacatttttgtggtcttatggataaggtacatgaagatttttgcagcagtattagtggttcagtggctgcactttattaatcagtgtgttaatttttgacagtgattggactagaccttttcaaatagagtctgagggtatcagacagtgaaaatgtgctgtaactaagtagcatgtaaatcagttgattgtaaaacgtttcgctgggaacttattttagctatattttacttcagacagattatgatacaataatctacctgtgcatcagttagtaggtgctgcagggtttcttactatttacagaaacattttgtgcagtctttgttataaattttcagaagactatactctttactttgaaggtctattttttaattatacctcatttagctaactagtattctaatacctggtagaaaaacagtgagccagcctttaagcatctaacaaaatttagactctttgttttgttttgaactgaagacatcattgggaaaggtaggaaatattagtttaggatagagcatacatgtcatatccagtagcataaaaaaagtattatctccctgtctccattaataaatttagctgtgcaatataggtgcgtttttgcagaagtttctagtaagagattataactccattttacaggttctgaatgctcagagtctatattaaggcttataaagtttttcctgtgatcagtaagtgacacatttaagcagacattcttttcaagttcatgacttagattcctttacaaatttagttctcaatctttaaaaaccacatttcattatgttggttaattattataaattttaagcactcatttctgcaatcaggtttctcagaattttttttttttaaacagaagagacattcctttttccttgttacatccaaggggggcacaggggtgggtggaaaggaatgtctaaaaatgaaatcccttgatatagagggacctagacggacaggatatgctaaaataatttcaaattctagcacaattttagagtagaataagtcatttttttagactaataaaattaatggctgtcatgttcactctgaaaaaaatctaaatgactgaaatgtacagaaataaaaattagcaaacaattattctagggatattttcagattttacttcatttcttgaaatgcgtgtgccatatgcaattgcatttcttgtgccaagaaactaatagaacttatttcactttacctttttttaaaatgtgaatttagttattatagttcaattttatggccttacagatggcttttattttgtttgcagctgacactgcagttcctttcatgcaaaataccataaactgtttgatgaaaatcatgcccctaatggaaactctctagtttttccatataactatcctactgtacatgtttaaacatattttatttttgctccaatggcttaatgtgaaaagctcctgcagataagtggacctgtcatgtggttaatcttgtttaagccaattcattaactgtgtactgatactgatgctatgttttttttaaatggattttattccaggtgaactttttttttataataatgttcgtctaaaataaaaactacataatgaaaatgaaaa

SEQ ID NO: 2675 - DNA, 4078 bp, Homo sapiens
gcgggggcgcgccccggggtgggcacggggcagtcgtcgggagcgcgcgagtgcgccggaggacggggagagaccccgagacccccggggcacgaagtccagagcgagcgggttatgcctccgcctcgttgccctgaaagccgcagcgacagcgaaaagggctaagattcggccatgagcagcgcccctcggcgccccgccaagggcgcagattctttctgtacgccagagccagagagcttgggccctgggacgcctgggttccccgagcaggaggaagacgaacttcaccgcaccctgggcgtggagcggtttgaggagatcctacaggaggccgggtctcgtggaggggaggagccaggccgcagctatggggaggaagactttgagtaccaccgccagtcctcccaccacatccatcacccactgtccacccacctgcctccggatgcacgccgccgcaagacaccccagggcccaggacggaagcctcgaaggcgcccgggagcctccccgactggagaaaccccgaccattgaggagggggaggaagatgaggatgaggccagcgaggctgagggggcccgggctctcactcagccgtcccctgtctccacaccctcctcggtgcagttctttctccgagaggatgacagtgccgaccggaaggcagagaggaccagtccatcttcccctgcaccactgccccaccaggaggcgactcctcgggcctccaaaggggcccaggctggaacccaggtggaggaggcggaggcggaggcggtggcggtggccagtggcacagcagggggtgacgacgggggtgcctcggggcgccccctgcccaaagcccagcctgggcaccgcagctacaaccttcaggagaggaggcgcatcgggagcatgactggggctgagcaggcactgctgccccgggtccccacggatgagattgaggcccagacgctggccacggccgacctagacctcatgaagagtcaccggtttgaggacgttcctggggtgcggcggcacttggtgcggaagaatgccaaaggttccacacagagtggccgagaagggcgggagcctggccccacacctcgggctcgaccccgggccccccacaagccccatgaggtgtttgtggagctgaatgagttgctcctggacaaaaaccaggagccccagtggcgggagacagctcgctggatcaaatttgaagaggacgtggaggaggagaccgagcgctgggggaagccccacgtggcctccctctccttccgcagtctcctggagctccgcaggaccctggcccatggggctgtgctcttggatctggaccagcagaccctgcccggagtggcccaccaggtggtggagcagatggtcatctctgaccagatcaaggccgaggatagggccaacgtgctgcgggctctgctgttgaaacacagccacccaagtgatgagaaggacttctccttcccccgcaacatctcagctggctccctgggctccctgctggggcatcaccatggtcagggggctgagagtgacccccacgtcaccgagcctctcatgggaggtgttcctgagacccggctggaggtggagcgagagcgtgacgtgccgcccccagcaccaccagctggcatcacccgctccaagtccaagcacgagctgaaactgctggagaagattcctgagaatgccgaggccacggtggtccttgtgggctgcgtggagttcctctcccgccccaccatggcctttgtgcggctccgggaggctgtggagttggacgcagtgttggaggtgccggtgcctgtgcgtttcctcttcctgctgctgggcccgagtagtgccaacatggactaccacgagatcggccgctccatctccaccctcatgtcagacaagcaattccacgaggcagcctacctggctgacgagcgggaggacctgctgacggccatcaacgccttcctggactgcagcgtggtgctgccgccttcagaagtgcagggcgaggagctgctgcgctctgtggcccacttccagcgccagatgctcaagaagcgagaggagcagggccggctgctacctacaggggctgggctggagcccaaatctgcccaagataaggcgctcctgcagatggtagaggcggcaggggcagctgaagatgatccccttcggcggacggggcggccctttggggggctgatccgagatgtgcggcgccgctatccccactacctgagtgacttccgagatgcacttgaccctcagtgcctggccgcagtcatcttcatctactttgccgccctgtctcctgccatcacctttggggggctgctgggagagaagacacaggacctgataggggtgtcggagctgattatgtccacagcgctccagggcgtggtcttctgcctgctgggtgcccagcccctgttggtgatcggcttctcagggcccctgctggtctttgaggaggccttcttctcgttctgtagcagcaaccacctggagtacctggtgggccgtgtgtggatcggcttctggctggtgttcctggccctgctcatggtggccctggaggggagcttcctggtccgcttcgtctcccgcttcacccaggagatcttcgccttcttgatctcactcatcttcatctatgagaccttctacaagctggtgaagatcttccaggagcaccccctgcatggctgctcagcctccaacagctcagaggtggacggcggtgagaacatgacatgggccggggcaagacccacgctggggccgggcaacaggagcttggctgggcagtctgggcaggggaagccccggggccagcccaacacggccctgctgtcgctggtgctcatggccggcaccttcttcatcgccttcttcctgcgcaaattcaagaacagccggttctttcctggccggatccggcgggtgattggggactttggggtgcccatcgccatcctcatcatggtgcttgtggattacagtattgaggacacctatacccagaagctgagcgttcccagtggattctcggtgactgccccagaaaagaggggctgggtcatcaaccccctgggagagaagagccccttccctgtgtggatgatggttgccagcctgctgcccgccatcctggtcttcattctcatcttcatggagacacagatcaccacgctcatcatctccaagaaggagcgcatgctgcagaagggctccggcttccacctggacctgctgctcatcgtggccatgggcggcatctgtgccctctttggcctgccctggttggctgctgccactgtccgctctgtcactcacgccaacgcgctcactgtcatgagcaaggctgtggcacctggggacaagcccaagattcaggaagtcaaggagcagcgggtgacggggctgctggttgccctgcttgtgggcctctccatagttatcggggatctgctccggcagatccccctggccgtgctctttggaattttcctgtacatgggagtcacctcccttaacgggatccagttctatgagcggctgcatctgctgctcatgccgcccaaacaccacccagatgtcacttacgtcaagaaggtccggaccctccgtatgcacctgttcacggccctgcagctgctctgcctggccctgctctgggccgtcatgtccacagctgcctccctggccttccccttcatcctcatcctcacagtgccgctccgcatggtggtgctcacccgtatcttcaccgaccgagagatgaaatgtctggatgctaacgaggcagagccggtgtttgatgagcgggagggtgtggacgagtacaatgagatgcccatgcctgtgtagccgccaccgagggacagccgagggaccgatggacgaggggacaggctggtgggatgggttccccctcccatgcccctccctcctttttatttaagtgaataatttaaagtattctcctcccccactgcccctgcagtaaagtgctttggcccccaaaaaaaaaaaaaaaaaaaaaaaa

SEQ ID NO: 2676 - DNA, 1951 bp, Homo sapiens
tcggcacgagccaagatgtctgacatggaggatgatttcatgtgcgatgatgaggaggactacgacctggaatactctgaagatagtaactccgagccaaatgtggatttggaaaatcagtactataattccaaagcattaaaagaagatgacccaaaagcggcattaagcagtttccaaaaggttttggaacttgaaggtgaaaaaggagaatggggatttaaagcactgaaacaaatgattaagattaacttcaagttgacaaactttccagaaatgatgaatagatataagcagctattgacctatattcggagtgcagtcacaagaaattattctgaaaaatccattaattctattcttgattatatctctacttctaaacagatggatttactgcaggaattctatgaaacaacactggaagctttgaaagatgctaagaatgatagactgtggtttaagacaaacacaaagcttggaaaattatatttagaacgagaggaatatggaaagcttcaaaaaattttacgccagttacatcagtcgtgccagactgatgatggagaagatgatctgaaaaaaggtacacagttattagaaatatatgctttggaaattcaaatgtacacagcacagaaaaataacaaaaaacttaaagcactctatgaacagtcacttcacatcaagtctgccatccctcatccactgattatgggagttatcagagaatgtggtggtaaaatgcacttgagggaaggtgaatttgaaaaggcacacactgatttttttgaagccttcaagaattatgatgaatctggaagtccaagacgaaccacttgcttaaaatatttggtcttagcaaatatgcttatgaaatcgggaataaatccatttgactcacaggaggccaagccgtacaaaaatgatccagaaattttagcaatgacgaatttagtaagtgcctatcagaataatgacatcactgaatttgaaaagattctaaaaacaaatcacagcaacatcatggatgatcctttcataagagaacacattgaagagcttttgcgaaacatcagaacacaagtgcttataaaattaattaagccttacacaagaatacatattccttttatttctaaggagttaaacatagatgtagctgatgtggagagcttgctggtgcagtgcatattggataacactattcatggccgaattgatcaagtcaaccaactccttgaactggatcatcagaagaggggtggtgcacgatatactgcactagataaatggaccaaccaactaaattctctcaaccaggctgtagtcagtaaactggcttaacagagaacaagcttttacagacgtccttaaggcaacagtgcagagatgtaatccttaaaagaactgggaatggcaaaactactgtcggttgatgtgtcctgaaaattattggagttatggcagaagtgcttttttgatcaactggtttgtgttttgctgctgcatttatcccaagaaaaacagctttaatctccagaagaaaaccaaaataccatgggatttatgctgtattgacatcttgccctaaacgtacaacatcatagtaatttgtcatgggcaacatgaccagagagaagatttttgtcatgattttaaatacactgacacgctactgttggttaaatttaaacatgttttacctgcagaaattctctcacaaataacctgcaataacttgaaatgcatacccttttgaacattccttttctcatgtataaattaaaatgtttgctgcattttgcaaaatgtcaattctctaaaaatgtgtccgtatatttctgtacctgcagtgtagtaaaggtttagacgaaaccccataattatagtggcatactgtcacttaggtttcaagccggcaaataaacagtgcagctcagaaattgta

SEQ ID NO: 2677 - DNA, 1790 bp, Homo sapiens
agcgcgcggctgatacccgggactgggctgcggcggttagtcctctcccggccgccgtcgcctccgacatattgcccgcaggagctgcggcggcgaagcggagagcaccggggggaggagatgggaggacgaagaggtcccaacaggacatcttactgtcgaaatccgctctgtgagccgggatcctcggggggctctagtggaagccacacttccagtgcaccggtgaccagtgttcgttcccgcaccaggagcagttctggaacaggcctctccagccctcctctggccacccaaactgttgtgcctctacagcactgcaagatccccgagctgccagtccaggccagcattctgtttgagttgcagctcttcttctgctagctcatagcactcttcgtccactacatcaacatctacaagacagtgtggtggtatccaccttcccacccaccctcccacacctccctgaacttccatctgatcgacttcaacttgctgatggtgaccaccatcgttctgggccgccgcttcattgggtccatcgtgaaggaggcctctcagagggggaaggtctccctctttcgctccatcctgctgttcctcactcgcttcaccgttctcacggcaacaggctggagtctgtgccgatccctcatccacctcttcaggacctactccttcctgaacctcctgttcctctgctatccgtttgggatgtacattccgttcctgcagctgaattgcgacctccgcaagacaagcctcttcaaccacatggcctccatggggccccgggaggcggtcagtggcctggcaaagagccgggactacctcctgacactgcgggagacgtggaagcagcacacaagacagctgtatggcccggacgccatgcccacccatgcctgctgcctgtcacccagcctcatccgcagtgaggtggagttcctcaagatggacttcaactggcgcatgaaggaagtgctcgtcagctccatgctgagcgcctactatgtggcctttgtgcctgtctggttcgtgaagaacacacattactatgacaagcgctggtcctgtgaactcttcctgctggtgtccatcagcacctccgtgatcctcatgcagcacctgctgcctgccagctactgtgacctgctgcacaaggccgccgcccatctgggctgttggcagaaggtggacccagcgctgtgctccaacgtgctgcagcacccgtggactgaagaatgcatgtggccgcagggcgtgctggtgaagcacagcaagaacgtctacaaagccgtaggccactacaacgtggctatcccctctgacgtctcccacttccgcttccatttctttttcagcaaacccctgcggatcctcaacatcctcctgctgctggagggcgctgtcattgtctatcagctgtactccctaatgtcctctgaaaagtggcaccagaccatctcgctggccctcatcctcttcagcaactactatgccttcttcaagctgctccgggaccgcttggtattgggcaaggcctactcatactctgctagcccccagagagacctggaccaccgtttctcctgagccctggggtcacctcagggacagcgtccaggcttcagccaagggctccctggcaaggggctgttgggtagaagtggtggtgggggggacaaaagacaaaaaaatccaccagagctttgtatttttgttacgtactgtttctttgataattgatgtgataaggaaaaaagtcctatttttatactcccaac

SEQ ID NO: 2678 - DNA, 2203 bp, Homo sapiens
gtaagatggcagcggacggacagtgctcgctccccgcttcatggcggccggtgaccctcacccacgtcgaatatcctgcaggtgatctctctggccacctccttgcctacctgagcctcagccctgtatttgtcatcgtcggtttcgtgaccctcatcatatttaagcgggagctgcacacgatctccttccttgggggcctggcactgaacgagggggtcaactggctgatcaaaaacgtcatccaggagccacggccctgtggaggcccccacacagcagtgggcaccaagtacgggatgccctccagccattcccagtttatgtggttcttctccgtctattccttccttttcctgtatttaagaatgcaccaaacaaacaacgccaggttcctggacttgctgtggaggcacgtgctctccctgggactcctcgctgtggccttcctagtctcctacagcagggtctacctgctgtaccacacctggagccaggtgctctatggaggcatcgctggaggcctcatggccatcgcctggttcatcttcacccaggaggtcctcaccccgctgttccccaggatagcagcctggcctgtctccgagttcttcctaatccgagacacaagcctcattcccaacgtactctggtttgagtacacggtaacccgggcagaagccaggaacagacaacgcaagctggggacgaaactgcagtgaccagtgggtgtggctgggtccagcctccagatctggcccgcacgatgccttgcaggatggacaggatgacagacagggacgaagcagagacctctacagacccaagtcaccaagtggagccttttttttttcttattttaattttaatgaacaaggtggaccaaagggctgaaccagcccctcaaccaggaccctggggggcctgctgcctgggggccgtggccagagaccctcgctgtgctgctgccagcccctggctgggcagaaagtgccctcggcatgggcacctgggtgtggggtggaggaggagggctcgcgcctctggtctcggggccaggaattccaggtggcgtgagaagtacacactatttattttttggttttgtcagaggcaggcaggattttggagctggaagaatctgctctccggtggctgccctgtgaacagagggctcccggtcagcttcccaggcccttcgccctatgcccagagggcagactgcctctccctgggccggggtggcctgggtgccaggaggaggggagcataccccacaccctccctgccaccgttgccgttccagaacctcggtcagtgtttccctgtctgggggcagggcccagagcgagcacgcgtctggcggctgctgtcgttgtgttctaccccgtactgacccaacaccacaagggctttctctggtcccctgtccctaagacaataatcgctttctgacaaaggagcctgcacatttgggtgagcagacccaagctgtttacagctctttcttgtcctgccatccagtagcagttagtcttcatccccacgtgaacaaaatgggaaggagccgtgaggagaggagtgaggcaacaggcacccgaagtccctcgtccttccctctgtgtgctctgaatatgtccttgtccttcctgacccatctctgaccagctgggaacctgcttggggtccccctcaaacctgtgtctggggtgtgggctcacagatccctatcagcctggttcgtgggagggctcttcctaaagggacccccatctctaagtcactctgaaagggagttgtggagaggagacgcctccagactctcagaagttttgaggactgaactgggtcactcgggatctgtgttcgaatcctccccacccctttctttgtggagtttcctaacctgctgctgaagcacaatgttttggtgcttgcttttctcatttgttaaaggcagtgtccaaaagccattccagatgccaagaccaggggcttatttctagggaaggtaggtcggtttccatgtttccctcccgttatttttattttttactttttgcctgagacaagccgagtatgaggtggtttgatttaagaaaaatcaatgaaattgtttactactgttttaaaataaaaccgtaaactctggcaaaaaaaaaaaaaaaaaaaaaaaaaaaaaaaaaaaaaaaaaaaaaaaaaa

SEQ ID NO: 2679 - DNA, 3082 bp, Homo sapiens
cccttcgcggccgagatggaccctgggctcggcgtcctccggaaaactgcactgtgaggcggggcgatggggaagggccgaagccccgccagcccagctaaagcagacggctcgcactgcgacccgaagcgcgagtcatggctggggccttagtggcaacaagtgctgagatcagcgggctcagtagcaggaacacaagcacccccttgcggtgtctggaggaagcggcgcggacagtctcccgctccaccgtgtcgggcctgaagaggccgctgaacgctcgcgattactgaggcatctggtaggatcgcaaggccatcaacctacaggtgaagctcgaggcgctgtggcgctttgaagccggagagaagctcagtagaatcgggaaggcgctggggctgtccaactccaccttggccaccattcgtgacaacaaggaaaagatctgggcgagttcccaggaggccacactgcaggcggccaccaagttgacgcgtggccgcagcctggtgatggagaacatggagcagctgctgagcatgcggatggaggaccagagccagcgcaacatgcccctcagtgtggtgctcattcgggagaaagcccacagcccgttcgagaaccgcaagcaggagcagggcgagggcgcctagcccgagagcttcggggccggtcgagggtgattcgctggctttaaggcgcgccacagcttgagcagcatcggggccagcggcccaagaacgcagcgtgcaagaatccagcgttaatgcgcagggtgatcccggagggcggctacacactctggctggtgttcaccatgaataagctctggctggtgttcaccatgaataagcccaggttcctctgtaagcgcctgccgagaggacgttcattttcctgtggaagatgagtcggcccctgggtcaaagccgccggagacctcctgaccctattgctcggtggcaacgcagccggcgacttcaagctgaaggccctgctggggtacccctcggagaacccgtgtttcctcaagggctccttcaagcccaacctgcccttggtgtggtgctcgcacaagaaagcctgggtacagcctgggtgacagagcgagactccgtctcaaaaaaaaaaaaaaaagcctgggtaaccatgagcctcttccaggagtggttcctgcacttctgctctacagtggagggcgctgcacccagtacgaccttccctacaaggggctgcccatcctggacagcactcccggccaccctgggtgttgagacagagtctggctctgtcgcgcaggctggagtgcggtggcgcgatctcggctcactgcaacctccgcctcccgggttcacgccattctcctgcctcagcctcccaggtagctgggactacaggcgcccgccaccacgcccggctaatttttttgtatttttagtagagacggggtttcaccgtgttagccagaatggtctcggtctcctgaccccatgatccacccgccttggcgtcccaaagtgctgggattacaggcgtgagccatggtgcctggccctttaattcccccaatatttttttatctgcattaatttattatttcaagtgaacttccatctcaaatacatggttctcagacgcttccatgaactctcaagtgtgacttattacagcctggggctccttggagcacagtgtgccagtgacctagtggaaggccatgagaaagccaggttcactgttcactgtgcagcatctccctccatggtcttcctggagcctattcccactgcactgagcattccgtgtgtccagaggtagggttagcagggatagatggacttcctgcttattttctgttcacatttccactgaccttcaatcctgtagactgcaaagattgagccagctgagcccccaaagagactcagcagtgcagaatgtgggcctgagtgggaggactgcccagccgcacaccttccagctctgttcttcccgggccctggatgcttcttgccacgctgtcctctgaaatgacgctctgccccagcagacctgtggtaggtgagctagtgaggaagcacacctgggctcttcccaccaggcatcccagccctggtgtggggtatccgcatggttgcaggcatcccctggccaggcctgggtgctcattctccctctctcttcttgtctcctcccctctccctgctttctctgccctgtcctcctcctttttgctgttttcccccggactcctgccatgcccccagactttctttttcccacggatatgggctcattccaaggaaagggtggcatttggacacaaggccctagatcccacgatggaggactggggggtacctgatgcccctcagaaagaggcctgcagggacagcacatgggaaagccccatggctttgtgatccatctggggatgtgatccatttgggtaaggacttgggtttcagggcatgagttggcttccttgcaggatgcaggtccttaggtgggtggcctctgtctccagctgtagggccctgccaggaagcctctatatgagcctacctccctcctgcaggaccagagaggggttgttatgaacagcccaggggattggttgcactaagcttgtcttgaagctttggctggggagtccaggtgcccatgtctctcacctgctccccatacacatctctgcacacctggctgaggcattcccagacctaacctcagataatgtgcatgtgatgaacactcccaagtggctaggcctcttgcacctgagcaggtggattctgccccagcactggggctttctctgggctgtccatcatgggtatatctctggattccaggattgctagttagcacctcacatttgagggtctgtgctattcagtctagaatcagagttggatgagaaatcaactttgaacaccacctttggggtggctgcattggctcacacctgtaatctcagcactttaggaggctgaggcaggaggatagcttgaggccaggagttcgagactaaccggagcaacatagtaaggccacatctgtacaaaaaaaaaaaaaaaaa

SEQ ID NO: 2680 - DNA, 2629 bp, Homo sapiens
acttgtcatggcgactgtccagctttgtgccaggagcctcgcaggggttgatgggattggggttttcccctcccatgtgctcaagactggcgctaaaagttttgagcttctcaaaagtctagagccaccgtccagggagcaggtagctgctgggctccggggacactttgcgttcgggctgggagcgtgctttccacgacggtgacacgcttccctggattggcagccagactgccttccgggtcactgccatggaggagccgcagtcagatcctagcgtcgagccccctctgagtcaggaaacattttcagacctatggaaactacttcctgaaaacaacgttctgtcccccttgccgtcccaagcaatggatgatttgatgctgtccccggacgatattgaacaatggttcactgaagacccaggtccagatgaagctcccagaatgccagaggctgctccccgcgtggcccctgcaccagcagctcctacaccggcggcccctgcaccagccccctcctggcccctgtcatcttctgtcccttcccagaaaacctaccagggcagctacggtttccgtctgggcttcttgcattctgggacagccaagtctgtgacttgcacgtactcccctgccctcaacaagatgttttgccaactggccaagacctgccctgtgcagctgtgggttgattccacacccccgcccggcacccgcgtccgcgccatggccatctacaagcagtcacagcacatgacggaggttgtgaggcgctgcccccaccatgagcgctgctcagatagcgatggtctggcccctcctcagcatcttatccgagtggaaggaaatttgcgtgtggagtatttggatgacagaaacacttttcgacatagtgtggtggtgccctatgagccgcctgaggttggctctgactgtaccaccatccactacaactacatgtgtaacagttcctgcatgggcggcatgaaccggaggcccatcctcaccatcatcacactggaagactccagtggtaatctactgggacggaacagctttgaggtgcgtgtttgtgcctgtcctgggagagaccggcgcacagaggaagagaatctccgcaagaaaggggagcctcaccacgagctgcccccagggagcactaagcgagcactgcccaacaacaccagctcctctccccagccaaagaagaaaccactggatggagaatatttcacccttcagatccgtgggcgtgagcgcttcgagatgttccgagagctgaatgaggccttggaactcaaggatgcccaggctgggaaggagccaggggggagcagggctcactccagccacctgaagtccaaaaagggtcagtctacctcccgccataaaaaactcatgttcaagacagaagggcctgactcagactgacattctccacttcttgttccccactgacagcctcccacccccatctctccctcccctgccattttgggttttgggtctttgaacccttgcttgcaataggtgtgcgtcagaagcacccaggacttccatttgctttgtcccggggctccactgaacaagttggcctgcactggtgttttgttgtggggaggaggatggggagtaggacataccagcttagattttaaggtttttactgtgagggatgtttgggagatgtaagaaatgttcttgcagttaagggttagtttacaatcagccacattctaggtaggtaggggcccacttcaccgtactaaccagggaagctgtccctcatgttgaattttctctaacttcaaggcccatatctgtgaaatgctggcatttgcacctacctcacagagtgcattgtgagggttaatgaaataatgtacatctggccttgaaaccaccttttattacatggggtctaaaacttgacccccttgagggtgcctgttccctctccctctccctgttggctggtgggttggtagtttctacagttgggcagctggttaggtagagggagttgtcaagtcttgctggcccagccaaaccctgtctgacaacctcttggtcgaccttagtacctaaaaggaaatctcaccccatcccacaccctggaggatttcatctcttgtatatgatgatctggatccaccaagacttgttttatgctcagggtcaatttcttttttcttttttttttttttttttctttttctttgagactgggtctcgctttgttgcccaggctggagtggagtggcgtgatcttggcttactgcagcctttgcctccccggctcgagcagtcctgcctcagcctccggagtagctgggaccacaggttcatgccaccatggccagccaacttttgcatgttttgtagagatggggtctcacagtgttgcccaggctggtctcaaactcctgggctcaggcgatccacctgtctcagcctcccagagtgctgggattacaattgtgagccaccacgtggagctggaagggtcaacatcttttacattctgcaagcacatctgcattttcaccccacccttcccctccttctccctttttatatcccatttttatatcgatctcttattttacaataaaactttgctgcca

SEQ ID NO: 2681 - DNA, 2589 bp, Homo sapiens
gctctcgcgagactttcaggggtcggagcgcgggggccggccgagaggaaagctggaggcgcgggtggggaacatgtctgagtcggagctcggcaggaagtgggaccggtgtctggcggatgcggtcgtgaagataggtactggttttggattaggaattgttttctcacttaccttctttaaaagaagaatgtggccattagccttcggttctggcatgggattaggaatggcttattccaactgtcagcatgatttccaggctccatatcttctacatggaaaatatgtcaaagagcaggagcagtgacttcacctgagaacatcccagcgggaggacaagagaaatcatgtttattcctcaggaatactgaagtgccctggagtaagctgccattcttctgtaacaatgttatcagtaatgctttaaactccagcacctggttatgcatttgaaaccaagtctgtttcttgttttgtattttctctctggaagttgtaaggaggtggtcttaaataaattaaacaaaaagaggaagtccattgcatggcctttgtttcttcacctttggtctctgagcatgaggaggactgtgtgtgaactgccagcagctgtagccacctgctcacagcctctctgagaaccccctgaaaccagttgttgggtatccttcccatttgccccctcaggcgtagttttcagaactgcttccacctcgtaatcagaagttgaagattgctgctgcgtggcctgatggagatgactgatgtcttaaggcgcctttccttctgtggcacctcttcgtgtgttctcacctggggacctggcagggcacatctccgctgtgcctactgcaaggcggtcccactgctgctgtattagcaggggaagaatcctggctgtgtggatggcccactccattgaagtcaagtcctgcagcttcatagagcttgagacagtccaagcttcagctctggagggcggaggaaagctcatggcatacccacctggccggaggagcccgattggggttaattttatcttcacgtagcagctgaagtttgaggacaaaagggccacttctgatgcccctctgagtttgttcctgtggtttcacttgaaccagggatgctagatgcaaaagtcatattttagcaatttcttcagacgatatacagaaccccagcgctcagccgttcttatttctttttccttatcgtagaattaagatagggagagcccgatcccacttgcccctgtatcctgtaaatgttgatttatcatctactgtaagcgaggcactgttgtaagcagcagagataaatggataaatagacacaggcttctgccttcaaggagcttagagtctgatggaaagacagacgtgcaaacacaactctgaaagaagtgttttaatggagaagagaggtgtaggcaaagtacactgagaacaaaggagaaggagcaactatgtctccctaggatggccccacaggcgacggaatgcctgcgctgggacccgaagttgactgggaatcccagacagaaggagggtagcctctgtgtttgctcaggatcatgtaatgcatattatagctgggaaatcgcaagtagttcagcatagccagggtgtgtaggggcaggggaaaggcatggagggggaggctgggcaatagggtacaactcatgtctgactccagttctggaacattgattagaccttagttcttgcaagtgctatagtgagtacattcagggtagcaaataccctccctcagcctccccactcccttttccagaaaggtctgctaggctctgccctgcaaactgtccaggctcctctgccctctgggcttgttttcctctttattgctacttggctgtttttcacttggtcctcttcattctatgattaaggcaacccatataattgaaagaaaaataatgtgcagcctgtttcatcccttccacttgttttcttactatttatttatttatttctgagatggaattttgctcttgttgcccaggctggagtgcaatggtggcgatctcggcctgctgcaacctccgcttcctgggttcaagcgcttctcctgcctcagcctcccgagtagctgggattacaggcatgcgccatcacacctggctaattttgtatttttagtagagacggtgtttctccttggtcatgctggtctccaactcccgacctcaggtgatcctcccgcctcggcctcccaaagtgctgggattacaggcgtgagccaccgcacccagcctcctatttgctttaaaagtaatttcctggccggatgcggtggctcacacctgtaatcccagcactttgggaggccaaggcaggtggatcatgaggtcaagagatcaagaccatcctggccaacattgtaaaaccctgtctctactaaaaatataaaaatcagctgggcatggtggcgcacacctgtagtcccagctactcaggaggttgaggcaggagaatcatttgaacccgggaggcagaggttgcggtgagctgagatcgcgccactgcactccagcccggcgacagagcgagaatctgtctc

SEQ ID NO: 2682 - DNA, 2117 bp, Homo sapiens
gaaccggaagcgtgggtctggcggctgcaccggttcgcggtcggcgcgagaacaagcagggtggcgcgggtccgggcatgaagctgggccgggccgtgctgggcctgctgctgctggcgccgtccgtggtgcaggcggtggagcccatcagcctgggactggccctggccggcgtcctcaccggctacatctacccgcgtctctactgcctcttcgccgagtgctgcgggcagaagcggagccttagccgggaggcactgcagaaggatctggacgacaacctctttggacagcatcttgcaaagaaaatcatcttaaatgccgtgtttggtttcataaacaacccaaagcccaagaaacctctcacgctctccctgcacgggtggacaggcaccggcaaaaatttcgtcagcaagatcatcgcagagaatatttacgagggtggtctgaacagtgactatgtccacctgtttgtggccacattgcactttccacatgcttcaaacatcaccttgtacaaggatcagttacagttgtggattcgaggcaacgtgagtgcctgtgcgaggtccatcttcatatttgatgaaatggataagatgcatgcaggcctcatagatgccatcaagcctttcctcgactattatgacctggtggatggggtctcctaccagaaagccatgttcatatttctcagcaatgctggagcagaaaggatcacagatgtggctttggatttctggaggagtggaaagcagagggaagacatcaagctcaaagacattgaacacgcgttgtctgtgtcggttttcaataacaagaacagtggcttctggcacagcagcttaattgaccggaacctcattgattattttgttcccttcctccccctggaatacaaacacctaaaaatgtgtatccgagtggaaatgcagtcccgaggctatgaaattgatgaagacattgtaagcagagtggctgaggagatgacatttttccccaaagaggagagagttttctcagataaaggctgcaaaacggtgttcaccaagttagattattactacgatgattgacagtcatgattggcagccggagtcactgcctggagttggaaaagaaacaacactcagtccttccacacttccacccccagctcctttccctggaagaggaatccagtgaatgttcctgtttgatgtgacaggaattctccctggcattgtttccaccccctggtgcctgcaggccacccagggaccacgggcgaggacgtgaagcctcccgaacacgcacagaaggaaggagccagctcccagcccactcatcgcagggctcatgattttttacaaattatgttttaattccaagtgtttctgtttcaaggaaggatgaataagttttattgaaaatgtggtaactttatttaaaatgatttttaacattatgagagactgctcagattctaagttgttggccttgtgtgtgtgtttttttttaagttctcatcattattacatagactgtgatgtatctttactggaaatgagcccaagcacacatgcatggcatttgttccacaggagggcatccctggggatgtggctggagcatgagccagctctgtcccaggatggtcccagcggatgctgccaggggcagtgaagtgtttaggtgaaggacaagtaggtaagaggacgccttcaggcaccacagataagcctgaaacagcctctccaagggttttcaccttagcaacaatgggagctgtgggagtgattttggccacactgtcaacatttgttagaaccagtcttttgaaagaaaagtatttccaacttgtcacttgccagtcactccgttttgcaaaaggtggcccttcactgtccattccaaatagcccacacgtgctctctgctggattctaaattatgtgaattttgccatattaaatcttcctcatttatactattatttgttacgttcaatcagaatccccgaaacctcctataaagcttagctgccccttctgaggatgctgagaacggtgtctttctttataaatgcaaatggctaccgttttacaataaaattttgcatgtgccaaaaaaaaaaaa

SEQ ID NO: 2683 - DNA, 2437 bp, Homo sapiens
ctgcaatggcggctctagactccctgtcgctcttcactagcctcggcctgagcgagcagaaggcccgcgagacgctcaagaactcggctctgagcgcgcagctgcgcgaggccgctactcaggctcagcagaccctgggttccaccattgacaaagctaccgggatcctgttatatggcttggcctcccgactcagggatacccggcgtctctccttccttgtaagctacatagccagtaagaagatccacactgagccccagctaagcgctgcccttgagtatgtgcggagtcaccccttggaccccatcgacactgtggacttcgagcgggaatgtggcgtgggtgtcattgtgaccccagagcagattgaggaggctgtggaggctgctattaacaggcaccggccccagctcctggtggaacgttaccatttcaacatggggctgctgatgggagaggctcgggctgtgctgaagtgggcagatggcaaaatgatcaagaatgaagtggacatgcaggtcctccaccttctgggccccaagttggaggctgatctggagaagaagttcaaggtggcaaaagctcggctagaagaaacagaccggaggacggcaaaggatgtggtggagaatggcgagactgctgaccagaccctgtctctgatggagcagctccggggggaggcccttaagttccacaagcctggtgagaactacaagaccccaggctatgtggtcactccacacaccatgaatctactaaagcagcacctggagattactggtgggcaggtacgtacccggttcccgccagaacccaatggaatcctgcatattggacatgccaaagccatcaatttcaactttggctatgccaaggccaacaatggcatctgttttctgcgttttgatgacaccaaccctgagaaggaggaagcaaagttcttcacggccatctgtgacatggtagcctggctaggctacacaccttacaaagtcacatatgcgtctgactattttgaccagctatatgcgtgggctgtggagctcatccgcaggggtctggcttatgtgtgccaccagcgaggagaggagctcaaaggccataatactctgccttcaccctggagagaccgtcccatggaggagtcactgctgctctttgaggcaatgcgcaagggcaagttttcagagggcgaggccacactacggatgaagctggtgatggaggatggcaagatggaccctgtagcctatcgagtcaagtatacaccacaccaccgcacaggggacaaatggtgcatctatcccacctacgactacacacactgcctctgtgactccatcgagcacatcactcactcactctgcaccaaggaattccaggcccgacgctcttcctacttctggctttgcaatgcactggacgtctattgccctgtgcagtgggagtatggccgcctcaacctgcactatgctgttgtctctaagaggaagatcctccagcttgtagcaactggtgctgtgcgggactgggatgacccacggctctttacactcacggccctgcgacggcggggcttcccacctgaggccatcaacaacttctgtgcccgggtgggagtgactgtggcacaaaccacaatggagccacatcttctagaagcctgtgtgcgtgatgtgctgaatgacacagccccacgagccatggctgtgctggagtcactacgggtcatcatcaccaactttcctgctgccaagtccttggacatccaggtgcccaacttcccagctgatgagaccaaaggcttccatcaggttccctttgcacccattgtcttcattgagaggactgacttcaaggaggagccagagccaggatttaagcgcctggcttggggccagcctgtgggcctgaggcatacaggctacgtcattgagctgcagcatgttgtcaagggccccagtggttgtgtagagagtctggaggtgacctgcagacgggcagatgctggagagaagccaaaggcctttattcactgggtgtcacagcctttgatgtgtgaggttcgcctctatgagcgactattccagcacaagaaccctgaagatcctactgaggtgcctggtggatttttaagtgacctgaacctggcatcactacacgtggtggatgcagcattagtggactgctctgtggccctggcaaaacccttcgacaagttccagtttgagcgtcttggatatttctccgtggatccagacagccatcagggaaagcttgtctttaaccgaactgtcacactgaaggaagacccaggaaaggtgtgagctggaagcactgaacctacctcatcctcctggagggtgtggctaccctcgccaccccaaattccatgtcaataaagaacagctaaattctcctagaaaaaaaa

SEQ ID NO: 2684 - DNA, 4540 bp, Homo sapiens
attctggggttcgtttagaggtttgaattttctcggagaaagacaggccggccacgaggaaaacagaaacaagccgcagcaacatctaagcccttgaaaggatcctgagagaggggggaaagggaaaacagcagccaccagcccaaccacttgtgtcttctgccccttcccacctatcttgcccaccccaccagcccacgctgcttgggacttgaaatctgtggccgaaggaccgtcactacataacttcaaaaataatcaaccaccctcccttcccaaaccacccaaattcactcatccagcgtttacttttttgaatccactcagaacttttttctgcgacccccctccctaaatggagttgggtgggggggaaatgaatactgagttggcctttattttttaaaagactttttgatccaatgaggccccctaaataattgagttttgggtcctggttggttgttttattttttttcctccaaaattttaccccctcccccctgagcccgaggtgctgacgtcgcaaaaaaattggataaaaccaccatcatgggttcgggtcccatagaccccaaagaacttctcaagggcctggacagcttccttaaccgagatggggaagtcaaaagtgtggatgggatttccaagatcttcagtttgatgaaggaagcacgaaagatggtgagtcgatgcacttacttgaacattctcctgcagacccgttcaccagaaatattggtcaaatttattgacgttggcggctacaaacttcttaacaattggctgacgtattcaaagacaaccaacaacattcccctcctccagcaaattctactgaccctgcagcatctaccgctcactgtagaccatctcaagcagaacaacacagctaaactggtgaagcagctgagcaagtcaagtgaggatgaagagctccggaaattggcctcagtccttgtcagcgactggatggctgtcatccgctctcagagcagtacccagcctgctgagaaagataagaagaaacgtaaagatgaaggaaaaagtcgaactacccttcctgagcgacctttgacagaggtgaaggctgagacccgggctgaggaggccccagagaagaagagggagaagcccaagtctcttcgcaccacagcacccagtcatgccaagttccgttccactggactagagctggagacaccatccttggtgcctgtgaagaagaatgccagcacagtggtggtttctgacaagtacaaccttaaacccatccccctcaaacgtcagagcaacgtagctgctccaggagatgccactccccctgcagagaagaaatacaagccactcaacacaacacctaatgccaccaaagagatcaaagtgaagatcatcccgccacagcctatggagggcctgggctttctggatgctcttaattcagcccctgttccaggcatcaaaattaagaagaaaaaaaaagtactgtcacctacggctgccaagccaagcccctttgaagggaaaacgagcacagaaccaagcacagccaaaccttcttccccagaaccagcaccaccttctgaggcaatggacgcagaccgtccaggcaccccggttccccctgttgaagtcccggagctcatggatacagcctctttggagccaggagctctggatgccaagccagtggagagtcctggagatcctaaccaactgacccggaaaggcaggaagaggaaaagtgtgacatggcctgaggaaggcaaactgagagaatatttctattttgaattggatgaaactgaacgagtaaatgtgaataagatcaaggactttggtgaggcggctaagcgagagatactgtcagaccgacatgcatttgagacagcgcggcgtctgagccatgataacatggaggagaaggtgccctgggtgtgcccccggcccctggttctgccctcacctcttgtcacccctggaagcaatagtcaggagcgatatatccaggctgagcgggagaagggaatccttcaggagctcttcctgaacaaggagagtcctcatgagcctgatcctgagccctacgagcccataccccctaaactcatccccctagatgaggagtgttccatggatgagactccgtatgttgagactctggaacctggggggtcaggtggctcacctgatggggcaggaggctccaagttgcctccagttctggccaatcttatgggaagcatgggtgctggaaagggcccccaaggccctggaggaggaggcattaatgtccaagagatcctcacctccatcatgggtagcccaaacagtcatccttcagaggaactactgaaacaaccagactattcggacaagatcaagcagatgctggtgccacatggactcctaggccctggcccaatagccaatggtttcccaccagggggtcctgggggccccaagggcatgcagcactttccccctggacctgggggacctatgccaggtccccatggaggccctggtgggccagtgggtccacgtcttctgggtcctccaccccctccccggggaggtgatcccttctgggatggcccgggcgaccctatgcggggtggcccaatgcgggggggtccaggaccaggtcctggaccataccatagaggccgaggtggccgaggaggaaacgaacctcctcctcctcctcctccattccgaggcgccagaggaggtcgctctggaggaggacccccaaatggacgagggggccctggtgggggcatggttggaggtggtgggcatcgtcctcacgaaggccctggtgggggcatgggcaacagcagtggacatcgtccccacgaaggccctggcggtggcatgggaagtgggcatcgcccccatgaaggccctggtggtagcatgggtgggggtggaggacatcgtccccacgaaggccctggcggtggcatcagtggtggcagtggccatcgtccccatgaaggccctggcggaggaatgggtgccggtggtggacatcgcccccacgaaggccctggcggaagcatgggtggaagtggtggacatcgtccccatgaaggccctggacacggggggccccatggccaccggcctcatgatgtccctggtcaccgaggccatgaccatcgagggccgccacctcatgagcaccgtggccatgatggtcctggccacgggggagggggccaccgagggcacgatggaggccacagccatggaggagacatgtcaaaccgccctgtctgccgacatttcatgatgaagggcaactgccgctatgagaacaactgtgccttctaccacccgggtgtcaatgggccccccctgccctagggaccatttgcctgccctgttcacacaacccctgtggactgcagcctcgctctttccaccctgttatggcttctgtgaggcccattttcccttttccccagctgatgaggagccggccccctcagttcccacttgcttgggttcctgggggttttctgatcactggtgcgcattgatgtacatattttcctccagtctggggaggagagagactggaaacgttcctggactgctgaagaggagacccagttggcttcactttttgagaagattcgccctgtaccccaaacccctttccagtattacccttaatgcttgagaacctaaagctggttatcctggcgaacacccctacccttctattgcgggtccccacatgcacacagaactctgacacaggatcagctgcacttaagaaatcatcccagctaagttcattattcctcatggggtggggagatgctgaaaggggtattgtatatcccactgcactgagagggctcaatcagctggatttgagttctggaacacacatcatccccacccctcccccagcgtgggctcaccattcttagtcctttctcaagtgggaccttcaactttctgtgaacacccagtctgcgtcctgggtctgctaggttcgatgatggcgaactcgtatctgcatccggtgcaagttttagctggcagaggtgagaccggtggtgctggtctgcctttgccaactatagccagtctggagacttgataaaatacttcagtgagaccagcttctcatcaacttgggcccggcgtgctgggcctgaaagtcacactacatgcactgcctttgggagtcagctcactccctgctcccacctggaaccttgccagcgtgaaggaggcttccaggtacttcaccctgtcaaccacctctgaatccccaccaggcgccttcctgggtggattcaacaagatgattttgccctttcccagttctctccttcactttggcatcagttgttttctatgaaaacagtggattggttgggttttgtgcagggtcttgggttagagccaaaatggatttgaggatgagtatttttttttttggttttgtatattttgtacattaataataaacagtggaaagagaagcagcttaaaaaaaaaaaaaaaaaaaaaa

SEQ ID NO: 2685 - DNA, 1571 bp, Homo sapiens
aaggtgagcgactgcaggcaaacccggcgacagcgcagctcgcgtcgaccctggctcctctgcctgccccctcaggcccccgcctccttcaggatgacgctggacgtggggccggaggatgagctgcccgactgggccgccgccaaagagttttaccagaagtacgaccctaaggacgtcatcggcagaggagtgagctctgtggtccgccgttgtgttcatcgagctactggccacgagtttgcggtgaagattatggaagtgacagctgagcggctgagtcctgagcagctggaggaggtgcgggaagccacacggcgagagacacacatccttcgccaggtcgccggccacccccacatcatcaccctcatcgattcctacgagtcttctagcttcatgttcctggtgtttgacctgatgcggaagggagagctgtttgactatctcacagagaaggtggccctctctgaaaaggaaaccaggtccatcatgcggtctctgctggaagcagtgagctttctccatgccaacaacattgtgcatcgagatctgaagcccgagaatattctcctagatgacaatatgcagatccgactttcagatttcgggttctcctgccacttggaacctggcgagaagcttcgagagttgtgtgggaccccagggtatctagcgccagagatccttaaatgctccatggatgaaacccacccaggctatggcaaggaggtcgacctctgggcctgtggggtgatcttgttcacactcctggctggctcgccacccttctggcaccggcggcagatcctgatgttacgcatgatcatggagggccagtaccagttcagttcccccgagtgggatgaccgttccagcactgtcaaagacctgatctccaggctgctgcaggtggatcctgaggcacgcctgacagctgagcaggccctacagcaccccttctttgagcgttgtgaaggcagccaaccctggaacctcaccccccgccagcggttccgggtggcagtgtggacagtgctggctgctggacgagtggccctaagcacccatcgtgtacggccactgaccaagaatgcactgttgagggacccttatgcgctgcggtcagtgcggcacctcatcgacaactgtgccttccggctctacgggcactgggtaaagaaaggggagcagcagaaccgggcggctctctttcagcaccggccccctgggccttttcccatcatgggccctgaagaggagggagactctgctgctataactgaggatgaggccgtgcttgtgctgggctaggacctcaaccccagggattcccaggaagcagaactctccagaagaagggttttgatcattccagctcctctgggctctggcctcaggcccactaatgatcctgctaccctcttgaagaccagcccggtacctctctccccactggccaggactctgagatcagagctggggtggaagggagccattctgaacgccacgcctggcccggtcagtgctgcatgcactgcatatgaaataaaatctgctacacgccaggg

SEQ ID NO: 2686 - DNA, 2566 bp, Homo sapiens
cgtcgccgtccccgtctcctgccaggcgcggagccctgcgagccgcgggtgggccccaggcgcgcagacatgggctgctccgccaaagcgcgctgggctgccggggcgctgggcgtcgcggggctactgtgcgctgtgctgggcgctgtcatgatcgtgatggtgccgtcgctcatcaagcagcaggtccttaagaacgtgcgcatcgaccccagtagcctgtccttcaacatgtggaaggagatccctatccccttctatctctccgtctacttctttgacgtcatgaaccccagcgagatcctgaagggcgagaagccgcaggtgcgggagcgcgggccctacgtgtacagggagtccaggcacaaaagcaacatcaccttcaacaacaacgacaccgtgtccttcctcgagtaccgcaccttccagttccagccctccaagtcccacggctcggagagcgactacatcgtcatgcccaacatcctggtcttgggtgcggcggtgatgatggagaataagcccatgaccctgaagctcatcatgaccttggcattcaccaccctcggcgaacgtgccttcatgaaccgcactgtgggtgagatcatgtggggctacaaggacccccttgtgaatctcatcaacaagtactttccaggcatgttccccttcaaggacaagttcggattatttgctgagctcaacaactccgactctgggctcttcacggtgttcacgggggtccagaacatcagcaggatccacctcgtggacaagtggaacgggctgagcaaggttgacttctggcattccgatcagtgcaacatgatcaatggaacttctgggcaaatgtggccgcccttcatgactcctgagtcctcgctggagttctacagcccggaggcctgccgatccatgaagctaatgtacaaggagtcaggggtgtttgaaggcatccccacctatcgcttcgtggctcccaaaaccctgtttgccaacgggtccatctacccacccaacgaaggcttctgcccgtgcctggagtctggaattcagaacgtcagcacctgcaggttcagtgcccccttgtttctctcccatcctcacttcctcaacgccgacccggttctggcagaagcggtgactggcctgcaccctaaccaggaggcacactccttgttcctggacatccacccggtcacgggaatccccatgaactgctctgtgaaactgcagctgagcctctacatgaaatctgtcgcaggcattggacaaactgggaagattgagcctgtggtcctgccgctgctctggtttgcagagagcggggccatggagggggagactcttcacacattctacactcagctggtgttgatgcccaaggtgatgcactatgcccagtacgtcctcctggcgctgggctgcgtcctgctgctggtccctgtcatctgccaaatccggagccaagagaaatgctatttattttggagtagtagtaaaaagggctcaaaggataaggaggccattcaggcctattctgaatccctgatgacatcagctcccaagggctctgtgctgcaggaagcaaaactgtagggtcctgaggacaccgtgagccagccaggcctggccgctgggcctgaccggccccccagcccctacaccccgcttctcccggactctcccagcagacagccccccagccccacagcctgagcctcccagctgccatgtgcctgttgcacacctgcacacacgccctggcacacatacacacatgcgtgcaggcttgtgcagacactcagggatggagctgctgctgaagggacttgtagggagaggctcgtcaacaagcactgttctggaaccttctctccacgtggcccacaggctgaccacaggggctgtgggtcctgcgtccccttcctcgggtgagcctggcctgtcccgttcagccgttgggccaggcttcctcccctccaaggtgaaacactgcagtcccggtgtggtggctccccatgcaggacgggccaggctgggagtgccgccttcctgtgccaaattcagtggggactcagtgcccaggccctggcacgagctttggccttggtctacctgccaggccaggcaaagcgcctttacacaggcctcggaaaacaatggagtgagcacaagatgccctgtgcagctgcccgagggtctccgcccaccccggccggactttgatccccccgaagtcttcacaggcactgcatcgggttgtctggcgcccttttcctccagcctaaactgacatcatcctatggactgagccggccactctctggccgaagtggcgcaggctgtgcccccgagctgcccccaccccctcacagggtccctcagattataggtgcccaggctgaggtgaagaggcctgggggccctgccttccgggcgctcctggaccctggggcaaacctgtgacccttttctactggaatagaaatgagttttatcatctttgaaaaataattcactcttgaagtaataaacgtttaaaaaaatggaaaaaaaaaaaaaa

SEQ ID NO: 2687 - DNA, 3716 bp, Homo sapiens
agagcggccggaagcgcggagggagccgcgggatggaccgcagcctgccagttttctccattcaagatagtccctttggagatgcgcccctgggtcgaagccactactggccatcccagagccagacctggtgtcccaagaccctgagcccatccaggtctcagagatccaggctcccacaagctcccaaggctctagccacaggtcccaactcccctgagctgtttgaggagtcctggccatccagttcagggaccccctccctgcccagcaccactgagggacagatgtgggcctccccagcacccaccctgattgacagcggggactccgtggtggccaagtatataaacaggttccgccaggctcagcccaccagtcgagaggagcgccagcctgcaggcccaaccccagctgacttttggtggctgcagtctgactctccagaccccagcagtcaaagtgcagcaggagccaacaaaccagaaggaagaccccatacagctgtccctactgcggtcaacgtgaccagtgcatcccatgctgtggctccccttcaggaaataaagcagaacctccacacatggaactcatccctgctggacctggagacgctgagcctacagagcagagctgccaggctgctcaaacgcagctccagcgatgccagcacttcctcattccccaccagctctgatggcctctctcccttctcggagaccttcatccctgactccagcaagggccttggccccagggcacccgcatccccggcaccagcccaggcccagacccccacccctgctccagccccagcctcctcccaagcaccccttcggccagaggatgacattctgtaccagtggcggcagcggcggaagcttgaacaggctcagggaagcaagggtgacagagcttgggtgccgcctctgacccctgccctccgcacgttggtgagccgagggagggaggagcctggggggagctggaggaggggctgggtctgagggggactgaggaccctccaccctctctctctgtctcagatctctcttatctgtctacagacctctcctgctccagtggagaccctcagttctctggggacccagcctaaccatgtcccactgtggagcagtgtggcccagcctggtccaccagaggccttctatgtggagaggcctccttttccctcagtgtcctctccacacatcttttgggcccccagctcccacgggttcttctgggccccacagtctgggccttgggtatcccttggggctgttcctcccacgcagcaggcctccaccctagcacatctgggctctaccctcgcgcccccggcttccctggcctccaccctcgaacccccggcctccaccccagctcccctggcctccacccttgcacccccagcctccaccccggctcccctggcctgtacccctgcacctccagcctccaccctcgcatccccagctgtcccccagggcctgcccatccctgacccaagcagctgtgcccagcctaagagcctggggcccaagtctcggaggagcagagcccctcgcccagaggctgccgagcaagtccctgcagctggccagggacctggccctcagctcaggggtgtcctgggccaggtagtggcagctcggctgttccctgacagcctggaggacacgcctcctcacttcgagggcccccctccacccaaggctggatctccgaaagtccaggccacacaaccccaaaccaaggtcactccccctccatctgaatcccagtgtcgggccaaggccgagtctctgaaagtcaaggccttgccgcccgcagcggggtcagtgatacggaagagcgaagccactccttcccctggagcctgcctgcagcccgaggtcccactctctccagctgagcaggcaaccacagtcaacgcctcgccgccagccttccaggtggggtctccggaggccctggccccgcccccgcccgctgctgaccacgccccctcggaggccctgcttgcccaggccgccctgctgctgcaggctgcagaagactccgacggcagcgagttccaggacgatcccgtgctgcaggtgctaagagcccatagggcagagctgagtcggcagaaaagggaagcggatgcccgattatcgttcctgttggaccaggctgaagacctgggatcttggtcccctccagccgggtcgccccctaggtccccaaggaggctgctaagaagggaaggagattccctggaggccagaagactttgaattgtacagattctattttacccagtgaggctctttttttttttttcatacagttactggttatctgtgagaaaggggttgtttggaaaggccaaggggtcatgccaatttaaggaaatgccccccatcctccgctgccccatggctctgccctgccccccaccccttcctgaccacggaaacaagatctcctttctggttatatcttccttggggcagagggagtttcagacaagacttctggcaagactgggacccaccttatctggcttcactcaggagccctggctcaaatggaccaaaggactgccctccacggaggaagctactagggtcatcagagtgttggatgatggtcaggctatagcccacacatgcttgagcagcagcagcatctggtgcagctgacccctccctccttgaagcactttctctccctgcttccagcccttctctctgcacctctctggtcaggcctagtcactagcccagcatgtcaactttggcatgacccagggccatggcgttgacatctctatctgcacccacccataggtgctcttgtctagcttaatgactctaaaccccgtctctattctgataatcctcaaatttctgtctgtaacctagacctggccacgaaaccttgggctcctacctcatcaccatttctacccaagggtttaaaagacatctcaaattccataggtcctaaatggagtttccaatctttccccctaggcgtgcctctccccagcttctttttttttttttttttggatggagtctagctctgtcacccaggctggagtgccatagtgtgatctcggctcactgcaagcttcgcctcccgggttcacgccattctcctgcctcagcctcccgagtagctgggactacaggtgcccgccaccacggtcggctaattttttttgtatttttagtagagacggtgtttcactgtgttagccaggatggtcttggtctcctgacctcgtgatccacccgcctcggcctcccaaagtgctgggattgcaggcgtgagccaccgtgctgggccccccctccccaactttcttcggctctgtcctttgccgctcagaccaaaaaccttagagctgtctttgacttctgtctttcccttccacccacagttaaccaggaaatcctgccatctccgcctttattttattttattttttgagatggagtttcacccttgttgcccaggctgtagtacaatggcatgatctcggctcacggcaacctccacctcccgggttcaagcgattctcctgcctcagctactcgggaggctgaggcaagagaattgcttgaactcagaaggcagaggttgcagtggaaaaaaaaaaaaaaggtaatttctctctctttctctctctctctgacacttgctttagaggctacatt

SEQ ID NO: 2688 - DNA, 2291 bp, Homo sapiens
ggaagaaaggctagcgggcgttggccgtatgtgggtgtcttgaggcagtttttcagttctttcatttaccaaagtgacatgcacctactaggtgccaggtgtttagacgtacatacaaccctctgcaaaatctttcagtgtagtcctctgtatgaaaagtttccagccaagaattgccactgcacctgagataagggggatcctggccattaaggaaaccttgccttcgaaactgagccgtgaggaactatacaaaatgggaaattgggacaaatcccagtggctcatgacactaagaagtaaaattacgaactcactgagctggaagtcattcaacgggaattgaataggtaactgcacttttgtgagattataaatataccacggagggtaacgaagctacagaagaatggaagaagacagcctggaagactcaaaccttcctccaaaagtttggcattctgagatgacggtgtcagtgacaggcgaaccacctagtaccgtagaagaagaaggaatacctaaagaaacagacatagaaatcatcccagaaatcccggaaactctagagccactgtcccttccagatgtgctgaggatctcggcagttctggaggacaccacagaccagctctctattctgaactacatcatgcccgttcagtacgaagggagacagagcatctgcgtgaaaagcagagaaatgaatctagaaggaacgaatctagacaaacttccaatggcctcaacaatcacaaaaatacccagtccgttaataactgaggaaggacccaacttgccagaaatcagacacagaggccggttcgctgtggagtttaacaaaatgcaggatcttgtcttcaaaaaacctacaaggcagaccatcatgactacggagacactgaagaaaattcagattgataggcagtttttcagcgatgtgattgcagataccattaaggagttgcaagattcggccacttacaacagtctcctgcaagctttgagcaaagagagggaaaacaaaatgcatttctatgacatcattgccagggaggaaaaaggaagaaaacagataatatcacttcaaaaacagctaattaatgtcaaaaaggaatggcaatttgaagtccagagtcagaatgagtatattgctaacctcaaggaccaactgcaagagatgaaggcaaaatccaacttggagaatcgctacatgaaaaccaataccgagctgcagattgcccagacccagaaaaagtgtaacagaacagaggaactcttggtggaagagattgagaaactcaggatgaaaaccgaagaagaggcccggactcatacagagattgaaatgttccttagaaaggagcagcagaaacttgaggagaggctggagttctggatggagaaatacgataaggacacagaaatgaaacagaatgaactaaatgctctcaaagccacaaaggccagtgacttagcacaccttcaagacctggcaaagatgataagagagtatgaacaggtcatcattgaagatcgtatagaaaaggagaggagcaagaagaaggtaaaacaggatctcttggaattaaagagcgttataaagctccaggcctggtggcgaggcactatgatacggagagaaattggtggtttcaagatgcctaaagacaaagttgatagcaaggattcaaaaggcaaaggtaaaggcaaggataagaggagaggcaagaagaagtgaccaagttctcttttgtgttttctgctggtattctggaggtgggaaggacttggagagttaagaaacacctggtacctcaaagatgactcatctacaggttgtttcctattgagactttcccagggaagcctgatttcactttgcctgttaatttcactctgcctgttaggtgggttttcaaaccctgatttaggattacaccattgacttagggcttcctcataccttgctgggaagaagtttctagtagtcctgtgaagattcattcttcttgctctttctcagcagaacaaaggagttcactggcttagctacagtgacgcattgaaacttgagtaattcctgtaatgtcagattttgattttacccaatttgtctgtagtgaaaaaactcttatgagcaaaagtattcagtaggaattacaatatgatgttattagctgtccagcataatatatacacagcaaagttttaataaatgttggttcctgcctgccttttaaaaaaaaaaaaaaaaaaaaaaaaaaaaaaaaaaaaaaaaaaaaaaaaaa

SEQ ID NO: 2689 - DNA, 1095 bp, Homo sapiens
agacggacagaggagtcgtagcggtcgaggcttttgcggctccggcgtgccggaaagtatgttatgcataaaagtggataatttacatgataaatgaaaatggccaattctttaagaggagaagtactaaaactttataaaaatctgctgtatcttggacgagactatccaaaaggagcagactattttaaaaagcgtttgaagaacattttccttaaaaacaaagatgtgaagaatccagagaagatcaaagaacttattgcacagggcgaatttgtaatgaaagagctagaagctttgtacttccttaggaaatacagagctatgaaacaacgctattattcagataccaacaaaactaattgatcattactactttaatttagctatcagtgccagctgtttatgtataccagatgttgtaaaataattctaacttaaaatgggaagatatacatgttgtgtaaaaaatccctgagctgccctactgaactaaataggtttcaacttctgttcatacggagaaagtatcagcaactttatgctcaattttgatacaaacatagcaatttagctatactaccgatcataaattaatgagcacccaattttgaatgaaaatataatacacttaatcctctaacttaataggacttagccaattatttttagcttatttctccattttactgacgagaatgccatttaccgaacatttaataagcaaaataatttcttacacacttcttctcttaacttttgaaaggaatcccttattttttcacccaatttggtatattaacagcacatactcaaggttcactacaaaacaaacagttcctggtaatgatttaaatgtagttatagaaataaataatatgtatggagtcattacttctgaccttgaaatagcctgctggtgactggcattaacatacataactaactattcaattatttccattattaatgttgctgctgctacctttgggcctaaaaccaagtcacctgttgtgtatcaattaccttctttgataaaaggaaataaataaaaaaaaaaaaaaagaaaaaaaaaaaaaaaaaaaaaaaaaaaaa

SEQ ID NO: 2690 - DNA, 10300 bp, Homo sapiens
aactgctagtggctgagtccctggcggggcgcggcggtggaaggtgtcgcgtacgggcttcccgagctgacgtggcttgaattgggaggggggcagctggagcctcaggcggcagcgcttctagaaatgctgagccgattatcaggattagcaaatgttgttttgcatgaattatcaggagatgatgacactgatcagaatatgagggctcccctagaccctgaattacaccaagaatctgacatggaatttaataatactacacaagaagatgttcaggagcgcctggcttatgcagagcaattggtggtggagctaaaagatattattagacagaaggatgttcaactgcagcagaaagatgaagctctacaggaagagagaaaagctgctgataacaaaattaaaaaactaaaacttcatgcgaaggccaaattaacttctttgaataaatacatagaagaaatgaaagcacaaggagggactgttctgcctacagaacctcagtcagaggagcaactttccaagcatgacaagagttctacagaggaagagatggaaatagaaaagataaaacataagctccaggagaaggaggaactaatcagcactttgcaagcccagcttactcaggcacaggcagaacaacctgcacagagttctacagagatggaagaatttgtaatgatgaagcaacagctccaggagaaggaagaattcattagcactttacaagcccagctcagccagacacaggcagagcaagctgcacagcaggtggtccgagagaaagatgcccgctttgaaacacaagttcgtcttcatgaagatgagcttcttcagttagtaacccaggcagatgtggaaacagagatgcaacagaaattgagggtgctgcaaaggaagcttgaggaacacgaagaatccttggtgggccgtgctcaggtcgttgacttgctgcaacaggagctgactgctgctgagcagagaaaccagattctctctcagcagttacagcagatggaagctgagcataatactttgaggaacactgtggaaacagaaagagaggagtccaagattctactggaaaagatggaacttgaagtggcagagagaaaattatccttccataatctgcaggaagaaatgcatcatcttttagaacagtttgagcaagcaggccaagcccaggctgaactagagtctcggtatagtgctttggagcagaagcacaaagcagaaatggaagagaagacctctcatattttgagtcttcaaaagactggacaagagctgcagtctgcctgtgatgctctaaaggatcaaaattcaaagcttctccaagataagaatgaacaggcagttcagtcagcccagaccattcagcaactggaagatcagctccagcaaaaatccaaagaaattagccaatttctaaatagactgcccttgcaacaacatgaaacagcatctcagacttctttcccagatgtttataatgagggcacacaggcagtcactgaggagaatattgcttctttgcagaagagagtggtagaactagagaatgaaaagggagccttgctccttagttctatagagctggaggagctgaaagctgagaatgaaaaactgtcttctcagattactctcctagaggctcagaatagaactggggaggcagacagagaagtcagtgagatcagcattgttgatattgccaacaagaggagctcttctgctgaggaaagtggacaagatgttctagaaaacacattttctcagaaacataaagaattatcagttttattgttggaaatgaaagaagctcaagaggaaattgcatttcttaaattacagctccagggaaaaagggctgaggaagcagatcatgaggtccttgaccagaaagaaatgaaacagatggagggtgagggaatagctccaattaaaatgaaagtatttcttgaagatacagggcaagattttcccttaatgccaaatgaagagagcagtcttccagcagttgaaaaagaacaggcgagcactgaacatcaaagtagaacatctgaggaaatatctttaaatgatgctggagtagaattgaaatcaacaaagcaggatggtgataaatccctttctgctgtaccagatattggtcagtgtcatcaggatgagttggaaaggttaaaaagtcaaattttggagctcgagctaaactttcataaagcacaagaaatctatgagaaaaatttagatgagaaagctaaggaaattagcaacctaaaccagttgattgaggagtttaagaaaaatgctgacaacaacagcagtgcattcactgctttgtctgaagaaagagaccagcttctctctcaggtgaaggaacttagcatggtaacagaattgagggctcaggtaaagcaactggaaatgaaccttgcagaagcagaaaggcaaagaagacttgattatgaaagccaaactgcccatgacaacctgctcactgaacagatccatagtctcagcatagaagccaaatctaaagatgtgaaaattgaagttttacagaatgaactggatgatgtgcagcttcagttttctgagcagagtaccctgataagaagcctgcaaagccagctgcaaaataaggaaagtgaagtgcttgagggggcagaacgtgtaaggcatatctcaagtaaagtggaagaactgtcccaggctctttcacagaaggaacttgaaataacaaaaatggatcagctcttactagagaaaaagagagatgtggaaaccctccaacaaaccatcgaggagaaggatcaacaagtgacagaaatcagctttagtatgactgagaaaatggttcagcttaatgaagagaagttttctcttggggttgaaattaagactcttaaagaacagctaaatttattatccagagctgaggaagcaaaaaaagagcaggtggaagaagataatgaagtttcttctggccttaaacaaaattatgatgagatgagcccagcaggacaaataagtaaggaagaacttcagcatgaatttgaccttctgaagaaagaaaatgagcagagaaagagaaagctccaggcagctcttattaacagaaaggagcttctgcaaagagtcagtagattggaagaagaattagccaacttgaaagatgaatctaagaaagaaatcccactcagtgagactgagaggggagaagtggaagaagataaagaaaacaaagaatactcagaaaaatgtgtgacttctaagtgccaagaaatagaaatttatttaaaacagacaatatctgagaaagaagtggaactacagcatataaggaaggatttggaagaaaagctggcagctgaagagcaattccaggctctggtcaaacagatgaatcagaccttgcaagataaaacaaaccaaatagatttgctccaagcagaaatcagtgaaaaccaagcaattatccagaagttaatcacaagtaacacggatgcaagtgatggggactccgtagcacttgtaaaggaaacagtggtgataagtccaccttgtacaggtagtagtgaacactggaaaccagaactagaagaaaagatactggcccttgaaaaagaaaaggagcaacttcaaaagaagctacaggaagccttaacctcccgcaaggcaattcttaaaaaggcacaggagaaagaaagacatctcagggaggagctaaagcaacagaaagatgactataatcgcttgcaagaacagtttgatgagcaaagcaaggaaaatgagaatattggagaccagctaaggcaactccagattcaagtaagggaatccatagacggaaaactcccaagcacagaccagcaggaatcgtgttcttccactccaggtttagaagaacctttattcaaagccacagaacagcatcacactcaacctgttttagagtccaacttgtgcccagactggccttctcattctgaagatgcgagtgctctgcagggcggaacttctgttgcccagattaaggcccagctgaaggaaatagaggctgagaaagtagagttagaattgaaagttagttctacaacaagtgagcttactaaaaaatcagaagaggtatttcagttacaagagcagataaataaacagggtttagaaatcgagagtctaaagacagtatcccatgaagctgaagtccatgccgaaagcctgcagcagaaattggaaagcagccaactacaaattgctggcctagaacatctaagagaattgcaacctaaactggatgaactgcaaaaactcataagcaaaaaggaagaagacgttagctacctttctggacaacttagtgagaaagaagcagctctcactaaaatacagacagagataatagaacaagaagatttaattaaggctctgcatacacagctagaaatgcaagccaaagagcatgatgagaggataaagcagctacaggtggaactttgtgaaatgaagcaaaaaccagaagagattggagaagaaagtagagcaaagcaacaaatacaaaggaaactgcaagctgcccttatttcccgaaaagaagcactaaaagaaaacaaaagtctccaagaggaattgtctttggccagaggtaccattgaacgtctcaccaagtctctggcagatgtggaaagccaagtttctgctcaaaataaagaaaaagatacggtcttaggaaggttagctcttcttcaagaagaaagagacaaactcattacagaaatggacaggtctttattggaaaatcagagtctcagcagctcctgtgaaagtctaaaactagctctagagggtcttactgaagacaaggaaaagttagtgaaggaaattgaatctttgaaatcttctaagattgcagaaagtactgagtggcaagagaaacacaaggagctacaaaaagagtatgaaattcttctgcagtcctatgagaatgttagtaatgaagcagaaaggattcagcatgtggtggaagctgtgaggcaagagaaacaagaactgtatggcaagttaagaagcacagaggcaaacaagaaggagacagaaaagcagttgcaggaagctgagcaagaaatggaggaaatgaaagaaaagatgagaaagtttgctaaatctaaacagcagaaaatcctagagctggaagaagagaatgaccggcttagggcagaggtgcaccctgcaggagatacagctaaagagtgtatggaaacacttctttcttccaatgccagcatgaaggaagaacttgaaagggtcaaaatggagtatgaaaccctttctaagaagtttcagtctttaatgtctgagaaagactctctaagtgaagaggttcaagatttaaagcatcagatagaagataatgtatctaaacaagctaacctagaggccaccgagaaacatgataaccaaacgaatgtcactgaagagggaacacagtctataccaggtgagactgaagagcaagactctctgagtatgagcacaagacctacatgttcagaatcggttccatcagcgaagagtgccaaccctgctgtaagtaaggatttcagctcacatgatgaaattaataactacctacagcagattgatcagctcaaagaaagaattgctggattagaggaggagaagcagaaaaacaaggaatttagccagactttagaaaatgagaaaaataccttactgagtcagatatcaacaaaggatggtgaactaaaaatgcttcaggaggaagtaaccaaaatgaacctgttaaatcagcaaatccaagaagaactctccagagttaccaaactaaaggagacagcagaagaagagaaagatgatttggaagagaggcttatgaatcaattagcagaacttaatggaagcattgggaattactgtcaggatgttacagatgcccaaataaaaaatgagctattggaatctgaaatgaagaaccttaaaaagtgtgtgagtgaattggaagaagaaaagcagcagttagtcaaggaaaaaactaaggtggaatcagaaatacgaaaggaatatttggagaaaatacaaggtgctcagaaagaacccggaaataaaagccatgcaaaggaacttcaggaactgttaaaagaaaaacaacaagaagtaaagcagctacagaaggactgcatcaggtatcaagagaaaattagtgctctggagagaactgttaaagctctagaatttgttcaaactgaatctcaaaaagatttggaaataaccaaagaaaatctggctcaagcagttgaacaccgcaaaaaggcacaagcagaattagctagcttcaaagtcctgctagatgacactcaaagtgaagcagcaagggtcctagcagacaatctcaagttgaaaaaggaacttcagtcaaataaagaatcagttaaaagccagatgaaacaaaaggatgaagatcttgagcgaagactggaacaggcagaagagaagcacctgaaagagaagaagaatatgcaagagaaactggatgctttgcgcagagaaaaagtccacttggaagagacaattggagagattcaggttactttgaacaagaaagacaaggaagttcagcaacttcaggaaaacttggacagtactgtgacccagcttgcagcctttactaagagcatgtcttccctccaggatgatcgtgacagggtgatagatgaagctaagaaatgggagaggaagtttagtgatgcgattcaaagcaaagaagaagaaattagactcaaagaagataattgcagtgttctaaaggatcaacttagacagatgtccatccatatggaagaattaaagattaacatttccaggcttgaacatgacaagcagatttgggagtccaaggcccagacagaggtccagcttcagcagaaggtctgtgatactctacagggggaaaacaaagaacttttgtcccagctagaagagacacgccacctataccacagttctcagaatgaattagctaagttggaatcagaacttaagagtctcaaagaccagttgactgatttaagtaactctttagaaaaatgtaaggaacaaaaaggaaacttggaagggatcataaggcagcaagaggctgatattcaaaattctaagttcagttatgaacaactggagactgatcttcaggcctccagagaactgaccagtaggctgcatgaagaaataaatatgaaagagcaaaagattataagcctgctttctggcaaggaagaggcaatccaagtagctattgctgaactgcgtcagcaacatgataaagaaattaaagagctggaaaacctgctgtcccaggaggaagaggagaatattgttttagaagaggagaacaaaaaggctgttgataaaaccaatcagcttatggaaacactgaaaaccatcaaaaaggaaaacattcagcaaaaggcacagttggattcctttgttaaatccatgtcttctctccaaaatgatcgagaccgcatagtgggtgactatcaacagctggaagagcgacatctctctataatcttggaaaaagaccaactcatccaagaggctgctgcagagaataataagcttaaagaagaaatacgaggcttgagaagtcatatggatgatctcaattctgagaatgccaagctagatgcagaactgatccaatatagagaagacctgaaccaagtgataacaataaaggacagccaacaaaagcagcttcttgaagttcaacttcagcaaaataaggagctggaaaataaatatgctaaattagaagaaaagctgaaggaatctgaggaagcaaatgaggatctgcggaggtcctttaatgccctacaagaagagaaacaagatttatctaaagagattgagagtttgaaagtatctatatcccagctaacaagacaagtaacagccttgcaagaagaaggtactttaggactctatcatgcccagttaaaagtaaaagaagaagaggtacacaggttaagtgctttgttttcctcctctcaaaagagaattgcagaactggaagaagaattggtttgtgttcaaaaggaagctgccaagaaggtaggtgaaattgaagataaactgaagaaagaattaaagcatcttcatcatgatgcagggataatgagaaatgaaactgaaacagcagaagagagagtggcagagctagcaagagatttggtggagatggaacagaaattactcatggtcaccaaagaaaataaaggtctcacagcacaaattcagtcttttggaaggtctatgagttccttgcaaaatagtagagatcatgccaatgaggaacttgatgaactgaaaaggaaatatgatgccagtctgaaggaattggcacagttgaaagaacagggactcttaaacagagagagagatgctcttctttctgaaaccgccttttcaatgaactccactgaggagaatagcttgtctcaccttgagaaacttaaccaacagctcctatccaaagatgagcaattgcttcacttgtcctcacaactagaagattcttataaccaagtgcagtccttttccaaggctatggccagtctgcagaatgagagagatcacctgtggaatgagctggagaaatttcgaaagtcagaggaagggaagcagaggtctgcagctcagccttccaccagcccagctgaagtacagagtttaaaaaaagctatgtcttcactccaaaatgacagagacagactactgaaggaattgaagaatctgcagcagcaatacttacagattaatcaagagatcactgagttacatccactgaaggctcaacttcaggagtatcaagataagacaaaagcatttcagattatgcaagaagagctcaggcaggaaaacctctcctggcagcatgagctgcatcagctcaggatggagaagagttcctgggaaatacatgagaggagaatgaaggaacagtaccttatggctatctcagataaagatcagcagctcagtcatctgcagaatcttataagggaattgaggtcttcttcctcccagactcagcctctcaaagtgcaataccaaagacaggcatccccagagacatcagcttccccagatgggtcacaaaatctggtttatgagacagaacttctcaggacccagctcaatgacagcttaaaggaaattcaccaaaaggagttaagaattcagcaactgaacagcaacttctctcagctactggaagagaaaaacaccctttccattcagctctgcgataccagtcagagtcttcgtgagaaccagcagcactatggtgaccttttaaatcactgtgcagtcttggagaagcaggttcaagagctgcaggcggggccactaaatatagatgttgctccaggagctccccaggaaaagaatggagttcacagaaagagtgaccctgaggaactaagggaaccgcagcaaagcttttctgaagctcagcagcagctatgcaacaccagacaggaagtgaatgaattaaggaagctgctggaagaagaacgagaccaaagagtggctgctgagaatgctctctctgtggccgaggagcagatcagacggttagagcacagtgaatgggactcttcccggactcctatcattggctcctgtggcactcaggagcaggcactgttaatagatcttacaagcaacagttgtcgaaggacccggagtggcgttggatggaagcgagtcctgcgttcactctgtcattcacggacccgagtgccacttctagcagccatctactttctaatgattcatgtcctgctcattctgtgttttacgggccatctatagacttagttgttactctttggaccactcccttcaaaacttggaattctctcacctctaacatcagaacatcaattccagtggaacagtcttcccatttacaggtcttctctccaactcttcacggaaagtgcctgcaaaaacagaggtggatacgaggacaggttggagctgcagggactggcgagtctgctttcttctactgccctgagcctgaacgcttctgcttaatctgagaatcacatttggtttgttgagcctaatatttgttgagattttgcaggaccctgatcttttgtggtcctgtaaaagatactgaggaatgtctttcagccaagccaagaggatggtttcaataaacctaataatctgaagttcagctttttttttttttttt

SEQ ID NO: 2691 - DNA, 1681 bp, Homo sapiens
gccgtccaagggtccattggttgccatagagatcgtcgagcgctgggcctgtgatcgctgaggggcgagcagttgcgaccctgggctcctggggacctgagcgttatgtctttccgcgacctccgcaatttcacagagatgatgagagccctgggataccctcgacatatttctatggaaaatttccgtacacccaattttggacttgtatctgaagtgcttctctggcttgtgaaaagatatgagccccagactgacatcccgcctgacgtggatactgaacaggaccgagttttcttcattaaggcaattgcccagttcatggccaccaaggcacatataaaactcaacactaagaagctttatcaagcagatgggtatgcggtaaaagagctgctgaagatcacatctgtcctttataatgctatgaagaccaaggggatggagggctctgaaatagtagaggaagatgtcaacaagttcaagtttgatcttggctcaaagattgcagatttgaaggcagccaggcagcttgcgtctgaaatcacctccaaaggagcatctctgtatgacttgctcggcatggaagtagagttgagggaaatgagaacagaagccattgccagacctctggaaataaacgagactgaaaaagtgatgagaattgcaataaaagagattttgacacaggttcagaagactaaagacctgctcaataatgtggcctctgatgaagctaatttagaagccaaaatcgaaaagagaaaattagaactggaaagaaatcggaagcgactagagactctgcagagtgtcaggccatgttttatggatgagtatgagaagactgaggaagaattacaaaagcagtatgacacttatctggagaaatttcaaaatctgacttatctggaacaacagcttgaagaccatcataggatggagcaagaaaggtttgaggaagctaaaaacactctctgcctgatacagaacaagctcaaggaggaagagaagcgcctgctcaagagtggaagtaacgatgactcggacatagacatccaggaggacgatgaatccgacagtgagttggaagaaaggcggctgcccaagccacagacagccatggagatgctcatgcaaggaagacctggcaaacgcattgtgggcacgatgcaaggtggagactccgatgacaatgaggactcggaggagagtgaaattgacatggaagatgatgatgacgaggatgacgatttggaagacgagagcatttctctctcaccaaccaagcccaatcgaagggtccggaaatctgaacccctggatgagagtgacaatgacttctgacccttttgccaagggaccctggcagattaaaaccctcagacttgtaggtaaatgggaacttagaaggttaggaaggtaacccctgttttgtttactaagctggctggactcatgatcactgaagcaatacttatttctgctttagcctcctatgtttgcattccatgaagcttaaataagaattgaagcaaatccctaagatttatttttttccaccttatttatcttctaaaacttgaggaatgcatgtgttcttagtgattcacatccacgggacaaaaactcaagaagaaataagagctgacgccacacaaaaaaaaaaaaaaaaaaaaaa

SEQ ID NO: 2692 - DNA, 2221 bp, Homo sapiens
cttggctcgctgcgcctctgcctcccaggttcaagagattcttctgcctcagcctcctaagtagctgggattacaggaaatgagaacagaagccattgccagacctctggaaataaacgagactgaaaaagtgatgagaattgcaataaaagagattttgacacaggttcagaagactaaagacctgctcaataatgtggcctctgatgaagctaatttagaagccaaaatcgaaaagagaaaattagaactggaaagaaatcggaagcgactagagactctgcagagtgtcaggccatgttttatggatgagtatgagaagactgaggaagaattacaaaagcagtatgacacttatctggagaaatttcaaaatctgacttatctggaacaacagcttgaagaccatcataggatggagcaagaaaggtttgaggaagctaaaaacactctctgcctgatacagaacaagctcaaggaggaagagaagcgcctgctcaagagtggaagtaacgatgactcggacatagacatccaggaggacgatgaatccgacagtgagttggaagaaaggcggctgcccaagccacagacagccatggagatgctcatgcaaggaagacctggcaaacgcattgtgggcacgatgcaaggtggagactccgatgacaatgaggactcggaggagagtgaaattgacatggaagatgatgatgacgaggatgacgatttggaagacgagagcatttctctctcaccaaccaagcccaatcgaagggtccggaaatctgaacccctggatgagagtgacaatgacttctgacccttttgccaagggaccctggcagattaaaaccctcagacttgtaggtaaatgggaacttagaaggttaggaaggtaacccctgttttgtttactaagctggctggactcatgatcactgaagcaatacttatttctgctttagcctcctatgtttgcattccatgaagcttaaataagaattgaagcaaatccctaagatttatttttttccaccttatttatcttctaaaacttgaggaatgcatgtgttcttagtgattcacatccacgggacaaaaactcaagaagaaataagagctgacgccacacaagtcttggctgcttttgttactatacattttctctgagactccagcagagttggggctggaacttggcactggggactcatgtttggaatcgtaggggaacatctggctgttaatcacttgcacagttgagaacatttcctatacatcggcttttaattctagctcttatttcattttgtaatcttattttctttcgtctgcatgttcacaataccaagcattaaatgtattttaataactaaacttttctgaaagaaggttagctaaagttaaatgaaaacttggtttctttgaaaatcaggcaatagagacaggctccagatgaggaatcctccattttctgtccgaagctgacattcctctggcagtccagttcaccttggattacagccaccttcatgtttccacggttggtactaaatctggaaactctggtgacctgggctgccctctcagaaactccagactcccatggcaatgacagccgggacacttttcttccctccagccagggtttctctaaaggagctttgttttgtctaaagtgtggcaagacatagtgcacaacacagggacaaaggcaggtttcctgcagctcgctacctaagtgtttctgtaggggaaggagccaattaagaaaaagtgttggtacagattcatgtttctgatttaaaaaaacaacaacacaggattgaattaagtagagtaatagcactagaagaatttttctgttgtgaaattagaagtggagttggtttttttcttttttcttcttctttttttttaatatgaaaagtacttagctgggagtggtggcaagcgcccttgggtccagctactcaggaggccaaggtgggaggatcacttgagcccaggagttttagactagcctggacaactaagtgagactccatctctacaaaaaatttaaaaattagccaggtgtggaggggcatgcctgtggtctcagctattcaggaggctgaggcaggagaatcacttgagaccaggaagttgaggctgcaatgagccgtgatcatgccactgcactccagcctgggtgacagagtgagaccctgtcttt

SEQ ID NO: 2693 - DNA, 1485 bp, Homo sapiens
tcagccaattagagctccagttgtcactcctacccacactgggcctgggggtgaagggaagtgtttattaggggtacatgtgaagccgtccagaagtgtcagagtctttgtagctttgaaagtcacctaggttatttgggcatgctctcctgagtcctctgctagttaagctctctgaaaagaaggtggcagacccggtttgctgatcgccccagggatcaggaggctgatcccaaagttgtcagatggagagtaaatacaaggagatactcttgctaacaggcctggataacatcactgatgaggaactggataggtttaagttctttctttcagacgagtttaatattgccacaggcaaactacatactgcaaacagaatacaagtagctaccttgatgattcaaaatgctggggcggtgtctgcagtgatgaagaccattcgtatttttcagaagttgaattatatgcttttggcaaaacgtcttcaggaggagaaggagaaagttgataagcaatacaaatcggtaacaaaaccaaagccactaagtcaagctgaaatgagtcctgctgcatctgcagccatcagaaatgatgtcgcaaagcaacgtgctgcaccaaaagtctctcctcatgttaagcctgaacagaaacagatggtggcccagcaggaatctatcagagaagggtttcagaagcgctgtttgccagttatggtactgaaagcaaagaagcccttcacgtttgagacccaagaaggcaagcaggagatgtttcatgctacagtggctacagaaaaggaattcttctttgtaaaagtttttaatacactgctgaaagataaattcattccaaagagaataattataatagcaagatattatcggcacagtggtttcttagaggtaaatagcgcctcacgtgtgttagatgctgaatctgaccaaaaggttaatgtcccgctgaacattatcagaaaagctggtgaaaccccgaagatcaacacgcttcaaactcagccccttggaacaattgtgaatggtttgtttgtagtccagaaggtaacagaaaagaagaaaaacatattatttgacctaagtgacaacactgggaaaatggaagtactgggggttagaaacgaggacacaatgaaatgtaaggaaggagataaggttcgacttacattcttcacactgtcaaaaaatggagaaaaactacagctgacatctggagttcatagcaccataaaggttattaaggccaaaaaaaaaacatagagaagtaaaaaggaccaattcaagccaactggtctaagcagcatttaattgaagaatatgtgatacagcctcttcaatcagattgtaagttacctgaaagctgcagttcacaggctcctctctccaccaaattaggatagaataattgctggataaacaaattcagaatatcaacagatgatcacaataaacatctgtttctcattcc

SEQ ID NO: 2694 - DNA, 1316 bp, Homo sapiens
ggtaggtcccggcaaccgcagctcgcggcgggcgctgggcgggatccgactctagtcgtaatggaggcgggcggctttctggactcgctcatttacggagcatgcgtggtcttcacccttggcatgttctccgccggcctctcggacctcaggcacatgcgaatgacccggagtgtggacaacgtcagattcctgccctttctcaccacggaagtcaacaacctgggctggctgagttatggggctttgaagggagacgggatcctcatcgtcgtcaacacagtgggtgctgcgcttcagaccctgtatatcttggcatatctgcattactgccctcggaagcgtgttgtgctcctacagactgcaaccctgctaggggtccttctcctgggttatggctacttttggctcctggtacccaaccctgaggcccggcttcagcagttgggcctcttctgcagtgtcttcaccatcagcatgtacctctcaccactggctgacttggctaaggtgattcaaactaaatcaacccaatgtctctcctacccactcaccattgctacccttctcacctctgcctcctggtgcctctatgggtttcgactcagagatccctatatcatggtgtccaactttccaggaatcgtcaccagctttatccgcttctggcttttctggaagtacccccaggagcaagacaggaactactggctcctgcaaacctgaggctgctcatctgaccactgggcaccttagtgccaacctgaaccaaagagacctccttgtttcagctgggcctgctgtccagcttcccaggtgcagtgggttgtgggaacaagagatgactttgaggataaaaggaccaaagaaaaagctttacttagatgattgattggggcctaggagatgaaatcactttttattttttagagatttttttttttaattttggaggttggggtgcaatctttagaatatgccttaaaaggccgggcgcggtggctcacgcctgtaatcccagcactttgggaggccaaggtgggcggatcgcctgaggtcaggagttcaagaccaacctgactaacatggtgaaaccccatctctactaaaaatacaaaattagccaggcatgatggcacatgcctgtaatcccagatacttgggaggctgaggcaggagaattgcttgaacccaggaggtggaggttgcagtgagctgagatcgtgccattgtgatatgaatatgccttatatgctgatatgaatatgccttaaaataaagtgttccccacccctgaaaaaaaaaaaaaaaaaaaa

SEQ ID NO: 2695 - DNA, 5679 bp, Homo sapiens
gcttttctccttggcatggtcacggaatggatacctgtttgatcttcctgcactgctgagaaatcttccttttgggggagaggattaagtctgggttgaggtaggccacctgttgagacctggtgaaagatcaggtataataatgttctgcagtgaaaagaaattgcgtgaagtggaacggatagtgaaagccaatgaccgtgaatataatgaaaagttccagtatgcggataatcgtatccacacatcgaaatataatattctcaccttcttgccaattaatttatttgaacagttccaaagagtggcaaatgcctattttctttgccttctgattttacagctaattccagaaatttcctccttgacctggtttaccaccattgtgcctttggtcctggtgataactatgacagctgtcaaagatgccacagatgactattttcgccacaagagtgataatcaagtgaataatcggcagtctgaagtgctcatcaacagcaaactgcagaatgaaaaatggatgaatgtcaaagtgggagacatcattaaattagaaaataaccaatttgttgctgctgatttacttctcctatcaagtagtgagccacatggtctctgttatgttgaaactgctgagcttgatggggaaacgaacctaaaagtccgccatgcactatcagttacttcagaacttggagcagatatcagcagacttgcagggtttgatgggattgttgtctgtgaggtgcctaacaacaagttagataaattcatgggaatcctttcttggaaagacagcaagcattccctcaacaatgagaagataatcctgagaggctgcatcctgagaaataccagctggtgttttggaatggttatttttgcaggtcctgacactaaactaatgcagaatagtggtaagacaaagtttaaaaggacaagcattgatagattgatgaatactctagtactatggatttttgggtttctgatatgcttgggaattattcttgcaataggaaattcaatctgggagagtcaaactggggaccaattcagaactttcctcttttggaatgaaggagagaagagctctgtgttctccggattcttaacattctggtcatatattattattctcaatacagttgtacccatttccttatatgtgagtgtggaagtaattcgtctaggacacagttattttataaactgggaccggaagatgtattattctcgaaaagcaatacctgcagtggctcgaacgaccacgctcaatgaggaactggggcagattgagtacattttctccgacaaaacgggtaccctcactcaaaacatcatgacctttaaaagatgttccattaatgggagaatctatggtgaagtacatgatgacctggatcagaagacagaaataactcaggaaaaagagcctgtggatttctcagtcaaatctcaagcggatagagaatttcagttctttgaccaccatctgatggaatccattaaaatgggtgatcccaaagttcatgaattccttaggttacttgctctctgccacactgtaatgtcagaagagaatagcgcaggagagctgatttaccaagttcagtcacctgatgaaggggctctagtgactgccgctagaaattttgggttcatttttaaatcccggaccccagagaccataacaatagaagaattgggaacactagttacttatcaattacttgcctttttggatttcaacaacaccagaaaaaggatgtctgtcatagttcgaaacccagaaggacagataaagctttattccaaaggagcagatactattctgtttgaaaaacttcatccttccaatgaagtccttttgtctttgacgtcagaccacctcagtgaatttgcaggggaaggccttcggaccttggccatcgcatacagagacctggatgacaagtactttaaagagtggcataagatgcttgaagatgcgaatgctgccacagaagagagggatgaacgaatagctgggctatatgaagaaattgaaagagatttgatgctactaggtgccactgctgtagaagataagttacaggagggtgttattgaaacagttacaagtttatcactagccaatattaagatctgggtcctaacaggagacaaacaagaaactgccatcaacatcggttatgcctgcaacatgctgactgacgacatgaatgatgtgtttgtgatagcagggaataatgctgtggaagtgagagaagaactcaggaaagcaaaacaaaatttgtttggacaaaacagaaatttttccaatggccatgtagtttgtgaaaaaaagcagcagctggagttggattctattgtagaagaaaccataacaggagattatgccttaatcataaatggccacagtttggctcatgccctagaaagtgatgtcaagaatgatctcctagaacttgcttgcatgtgtaagactgtaatttgctgcagggtcactccactccagaaagcccaagtggtagagctggtgaagaagtacagaaatgctgttactttggccattggtgatggagccaatgatgtcagcatgattaaaagtgctcacattggtgttggcatcagcggccaggaaggattgcaagcagtcttagccagcgactattcatttgcacagtttagatatctccaaaggcttctccttgttcatggaaggtggtcttatttccgaatgtgcaaattcttatgctatttcttctataagaattttgcatttacacttgtgcatttctggtttggtttcttctgtggtttctcagcccagactgtttatgaccagtggttcatcaccctttttaacattgtttacacatcactgcctgttttagccatggggatttttgaccaggatgtgagtgaccagaacagcgtggactgtccccagctctacaaaccaggacagctgaatctgctttttaacaagcgtaaatttttcatttgcgtgttgcatggaatctacacctcattagtccttttcttcatcccctatggggccttttacaacgtggctggagaagatgggcaacatattgctgactaccagtcctttgcagttaccatggccacatctttggtcattgtggtcagtgtgcagatagccttggataccagttactggactttcattaatcacgtcttcatctgggggagcattgccatttatttctccattttatttacaatgcacagtaatggcatctttggcatcttcccaaaccagtttccatttgttggtaatgcacgacattccctgacccagaagtgcatctggcttgtaattctcttaacaacagtggcttcagttatgccagtggtggcattcagatttttgaaggtggatttatacccaaccctgagtgatcagatccgccggtggcagaaggctcaaaagaaggcaaggcctccaagtagccgaaggcctcggacccgcaggtcaagctcaagaaggtctggatatgcttttgctcaccaagaaggctatggagagcttatcacatctggaaaaaatatgcgagctaaaaatccacccccaacatcagggctggaaaagacacattataatagcactagctggattgaaaatttatgtaagaaaaccacagacaccgtgagcagctttagccaggataaaacagtgaaactgtgagtcaatatgaatttaaaccacgtagttatcttttcacttcaggtggagctgaaattctgctggctccagagtttgagatttgaggcaagaggtggggcaggcagattgcctcacttaacttaaatctgcggcagacaactgccagtgcccatcaaacaggagtgtgcgctatggaaaaccaggccagagggtcactgtctggtttgtgatttggtggacaaaacactcgctgttacaagtacagattttttttttttttaaatcaacctagataccaattgacctgaactttagaatcttatttatggagaaaaacttgtaaagctgcatattcactgaatggatcctcaggcggataaaagggtgcattttaaaggtatatatccaagctgaaaagcatgcctattgacagataaacatgtatctgtaagatcagcctttcccaaggtatacttttaaaatttaaagcgtgtactgtgttgctttcagactgagttgcatgtcactctttagtcttgatatctacctgtctgttcagccaggacaacaaatggcttccaagcctgaagaatacaaaagtgtgcttgtgtttctcatttttataccagtctagggacaaaggagactgaacatctttgcagcaggataggctggtaatttgatcaaatttattcaaaaagctctcagtctgtgtcatgtaaggacatgcttatgaaatgtgagagaggctcgccactaagtattctaaatacttttcaatggcttttctaacaacctcagtagtaatttgctgagcatcatccagaccattaatagaatcagcaaagcactggaatttcacactttaatgataatattccacatagtctatgggcaaatattttcaacatttccaatttttaaagcttcagaattgaagccaaacaaattaataaataattgttttaattactatttaaaaactcaggtttagattgtttaaaattagttgcttttgatactcagctgtcatgtttataattcaaacatgtagtaaacatatgtaggtaaggttgtttttttggagatgttgcagctcaaatttcagtccacatatgaatcatcagtgtattttccataaagtgattcgggcatatttgtgtgaaaacctcagttctgtcacttcttacctctataaacttggacgataatgtgccttctctgagactcagtttcttcctctgtaaaatgaggacatactacctacctcatgtggttggttgatgattgtctgtcaaagcacaaactctgaaattattaaaaacataattatttcataaacagatgagttaagttccagttaactcaacatcagtataacagagcaattggaagagaatatgaaaaaactggaatctaaatagtcagtgaggaaggctttgataaaatgaaattgccagaaagatataaaactggttagggtcctacagggaaataaaattataaccgtggaggtacatttctctaccagaaagcaaaaataaagcatcatgtcttaatggttttctacaaatcaacttctaattctacagagtccttaatctggtccctattaaattcttggtcagacaaagttacatttcccaagagagtcaggtgacacttgagtgagtttgatggataatgagctaatgtgatatctataggtcacaattttttaaaaccaaaattttcaagtctgggataatctttcctaaatgggatcaaatgaaataatatgtgtaaaagagtcaaatgcagtcctttaccatagtaactgcctatggacgttgtctttcccttacatgcctgcctacacttaaccagatgttggttttcaatgtctaatttgtcattagtttcaccacatttgctcactttttgtaacatttttgcaagatttgaaaactttcagtaaatgttttggcactattggtaaa

SEQ ID NO: 2696 - DNA, 1646 bp, Homo sapiens
gccaagccccgcccctcaggccggggcgcgaccgcggatccgcagttcccgggccagcctggggcggccggccaggaaccacccgttaaggtgtcttctctttagggatggtgaggttggaaaaaggctcctgtaaccctcctccaggatgaaccacctgccagaagacatggagaacgctctcaccgggagccagagctcccatgcttctctgcgcaatatccattccatcaaccccacacaactcatggccaggattgagtcctatgaaggaagggaaaagaaaggcatatctgatgtcaggaggactttctgtttgtttgtcacctttgacctcttattcgtaacattactgtggataatagagttaaatgtgaatggaggcattgagaacacattagagaaggaggtgatgcagtatgactactattcttcatattttgatatatttcttctggcagtttttcgatttaaagtgttaatacttgcatatgctgtgtgcagactgcgccattggtgggcaatagcgttgacaacggcagtgaccagtgcctttttactagcaaaagtgatcctttcgaagcttttctctcaaggggcttttggctatgtgctgcccatcatttcattcatccttgcctggattgagacgtggttcctggatttcaaagtgttacctcaagaagcagaagaagaaaacagactcctgatagttcaggatgcttcagagagggcagcacttatacctggtggtctttctgatggtcagttttattcccctcctgaatccgaagcaggatctgaagaagctgaagaaaaacaggacagtgagaaaccacttttagaactatgagtactacttttgttaaatgtgaaaaaccctcacagaaagtcatcgaggcaaaaagaggcaggcagtggagtctccctgtcgacagtaaagttgaaatggtgacgtccactgctggctttattgaacagctaataaagatttatttattgtaatacctcacagacgttgtaccatatccatgcacatttagttgcctgcctgtggctggtaaggtaatgtcatgattcatcctctcttcagtgagactgagcctgatgtgttaacaaataggtgaagaaagtcttgtgctgtattcctaatcaaaagacttaatatattgaagtaacacttttttagtaagcaagatacctttttatttcaattcacagaatggaatttttttgtttcatgtctcagatttattttgtatttcttttttaacactctacatttcccttgttttttaactcatgcacatgtgctctttgtacagttttaaaaagtgtaataaaatctgacatgtcaatgtggctagttttatttttcttgttttgcattatgtgtatggcctgaagtgttggacttgcaaaaggggaagaaaggaattgcgaatacatgtaaaatgtcaccagacatttgtattatttttatcatgaaatcatgtttttctctgattgttctgaaatgttctaaatactcttattttgaatgcacaaaatgacttaaaccattcatatcatgtttcctttgcgttcagccaatttcaattaaaatgaactaaattaaaaaaaaaaaaaaaaaaaaaaaaaaaaaa

SEQ ID NO: 2697 - DNA, 3908 bp, Homo sapiens
ccgcccgcccgccttgtcccgcgtcgccgctcttcgcgtgcccgcgcgccccgggcccggccgctgtgtcgccctgagcggagcgccgcccgcgggatccccacgcggaaagggggcgcgccccggcggcggcctggcctcggacgcccccggccgggctagaagccgccgcggcagcagattctcttcaggggaagagtccacatcccacctcatcatgtcccgaagaagccagcgcctcacgcgctactcccagggtgacgatgacggcagcagcagcagcggagggagctcggtggctgggagtcagagcaccctgtttaaagacagtcctctcaggaccttgaagaggaaatccagcaacatgaagcgcctgtccccagcgccacagctgggcccgtcctctgatgcacacacctcctactacagtgagtcgctggtccacgagtcctggttcccacccaggagctccctggaggaactgcatggtgacgccaactggggtgaggacctgcgggtgcggaggaggagaggcacgggtggctcagagagcagcagggccagcgggcttgtggggcgcaaggccaccgaggacttcctgggctcttcctcgggctactcctctgaggacgactacgtgggctactcggatgtggaccagcagagttccagctcgcggctccgaagcgccgtctcacgggcgggctccttactctggatggtggccacttcgccaggccggctcttcagacttctctactggtgggctggcaccacctggtaccgcctgaccacagctgcctccctccttgacgtcttcgttttaaccaggcgcttctcgtccctgaagacgttcctctggttcctgctgccgctgctcttgctgacgtgcctgacgtatggtgcttggtatttctacccctatgggctgcagacattccaccctgctttggtttcctggtgggcagcgaaggacagcaggaggccggatgagggctgggaagccagagactcatcgccacatttccaggctgagcagcgtgttatgtcccgggtacactctctggagcggcgtctggaagctcttgctgctgaattttcctccaactggcagaaggaggccatgcggctggaacgtctggagctgcggcaaggggctcctggccagggaggtggtggtggcctgagccacgaggacaccctggcgctgctggaggggctagtgagccgccgtgaagctgccctgaaggaggatttccgcagggaaactgctgctcgcatccaggaagaactgtctgccctgagagcagagcatcagcaagactcagaagacctcttcaagaagatcgtccgggcctcccaggagtccgaggctcgcatccagcagctgaagtcagagtggcaaagcatgacccaggagtccttccaggagagctctgtgaaggagctgaggcggctggaggaccagctggccggcctgcagcaggagctggcggctctggcactgaagcagagctcggtggcggaagaagtgggcctgctgccccagcagatccaggccgtgcgggacgacgtggaatctcagttcccggcctggatcagtcagttccttgcccgaggtggagggggccgcgtggggctccttcagagagaggagatgcaagctcagctgcgagagctggagagcaagatcctcacccatgtggcagagatgcagggcaagtcggccagggaagccgcggcctccctgagcctgacgctgcagaaagaaggtgtgattggagtgacagaggagcaggtgcaccacatcgtgaagcaggccctgcagcgctacagtgaggaccgcatcgggctggcagactacgccctggagtcaggaggggccagcgtcatcagcacccgatgttctgagacctacgagaccaagacggccctcctcagcctcttcggcatccccctgtggtaccactcccagtcaccccgagtcatcctccagccagatgtgcacccaggcaactgctgggccttccaggggccacaaggcttcgccgtggtccgcctctctgcccgcatccgccccacagccgttaccttagagcatgtgcccaaggccttgtcacccaacagcactatctccagtgcccccaaggacttcgccatctttgggtttgacgaagacctgcagcaggaggggacactccttggcaagttcacttacgatcaggacggcgagcctattcagacgtttcactttcaggcccctacgatggccacgtaccaggtggtggagctgcggatcctgactaactggggccaccccgagtacacctgcatctaccgcttcagagtgcatggggagcccgcccactagccctgcttactggtgcctgctgccagccatctgggagtgggtgaacagcaccccgccgcttcccccacacgcttgctcggcgctctgacttctaggagcacaagagaggagcctgtggccccatgcagatgaaaaggacgggcagggtctcctgagcagcaggtggctcgaggcggttagcaggctccagcagctcccttcttccttccctctgtgcccgtggcgtctgcttcccatcctgggagtgtgtatatatgtagcatatcatgggggactgggaagttgggagaggtaggacctgactggtcttggctggggtcaggggctggtgcctgggagctgatgaagcaggtgccagggctgtgggaggggcaagctacggcctgggctaggtgagctgcctctgcccctgggcaaggaagcgaggccctctgggaggagggtgcttagctccagagcaggatgggacttccccaggcaggaagcacttgatggagagctgcccagctctcctacaaggttagtgccctccacctagggaagcatgaaccacagggtccctgagggccttcgacaaaagtgtgtatttgtcccggggagggtagcagtgggccatggggcttcttgtgccctaaaggggactggctgctgtgatcttctaaggggcccagggccaaccctgtaggcttcccctctgctggggacggtagttgcttttctctctcctgatgctaggttggggcccaccctgctccctgttcctgctagggcctgccagtgcccctgagcttgctttccacattctcccagggtatggagacctagacctgtctttggggccattagcatctggggttatagcaagaagagtggggagcatggaactcctgggctcttgtggggacgttcagggtatcggggtgcgaggtctgtctgcaccggcccccacatctaaccaggccctgatgtaggggtcgtccgctcaggctgcccccttgggctcttgcagctcttgttcaggtagtcgcccttctggtttgttctctgtggggcagttggtgggggctgggggaagaggctggcagaagttaccctggatagggaagggggaggaggggacttttagagccagcaggccccactgtattatgtatatatttttcaaggtctgtttttctaactgaaaagctaagggcttgattcctagccccgttctgtggggcactgggtgatactcagtttcttgttcctggccgtggagaggggcctggggcactggttccggctgtgtctggtggtctggctgcggggaaggggcaagaaggcgggcaggccttcactgcagcactgagcctcaaatccgctctggagcatgaggctggatgcagtggtggtgaggccgccccgctccatcccgaggcagccagggtttgttttgcgctctcctgtcacaaatgctgcactattggttcttaagttttttatctccagatcctaatttatgcctatgcaaaaaataaatgacgcccaagagctg

SEQ ID NO: 2698 - DNA, 2130 bp, Homo sapiens
actcgcgggtaacttgcttttgggagccagcggtatggcgtcgggctgcaagattggcccgtccatcctcaacagcgacctggccaatttaggggccgagtgcctccggatgctagactctggggccgattatctgcacctggacgtaatggacggacatgcacatgatggtgtccaagccagaacagtgggtaaagccaatggctgtagcaggagccaatcagtacacctttcatctcgaggctactgagaacccaggggctttgattaaagacattcgggagaatgggatgaagtcttgctctgtcacccaggctgaagtgcagtggcacagtcagggcccattgcaggttggccttgccatcaaaccaggaacctcagttgagtatttggcaccatgggctaatcagatagatatggccttggttatgacagtggaaccggggtttggagggcagaaattcatggaagatatgatgccaaaggttcactggttgaggacccagttcccatctttggatatagaggtcgatggtggagtaggtcctgacactgtccataaatgtgcagaggcaggagctaacatgattgtgtctggcagtgctattatgaggagtgaagaccccagatctgtgatcaatctattaagaaatgtttgctcagaagctgctcagaaacgttctcttgatcggtgaaaccataaggagcccagtgttcctgttcatgaaatctcccttttactggaaaacaggaatattgactaccaaatcacaatgcaattgaagccgtactgcttttttgagcagttattcattccagtgattaaaactgattgtgcagaatattctaagaggtcagaaattggtgtgtataactacatttttagtgatgcaatttattgattagtgagtaagatactgtttttattgagagatttgatttttataaagtaaaaatacggctgcattagggttacaaacagaaaagtgtcttaatgtctaaggagggcatattagctacactacaaaaacaaattttgtctgtacttctgaaaagaattttgttgtttctcagctgttttccaaaagcaaaggaagtctttatggtttttttctatttcatgttattgtgatttgtttataagtttgggtggggtgcataccatattcttggttcttaaaatctatcacttttcaccttatacttgatgtgtgaaaactataaaaacaatgtgtgaaacccaggggttctaaaatacaagcatagattttatcagggtgttttgtcaaagcaggttattcagtgattcctccccaccattcttaagaacgttaaataatgctgttgtgttagctctgagtagaaaggaaaaagtaaaacctctgtttggaggtaatattgggttgaattctgactgcccctttctagctggacctttaacaaatcacccaatcttttttgtgtttctctaaagtcatttatacattaaatgtaattatagcaactgtggggttctgttgagaattaagagctaacactatatatgtaaagtttccagtactagtcccagaatttagaatatgctcaacacaaagtaaacagcattatataagtttatatttttgtgagttataaagtactttgatatattctcattaaatctgtaaatcacctctataagtaagtggtaataataaagcagatatttttgtccccatttaaaaaatgaagaaattaatgcttaatagggtggtaccctggaaaggatctgggaagtggtagaatttctggtctgtacttttacaaatggagcccttgggaggtgggttaggtaaaagaagctttttacttaacgttgtcttatttccagtctaattttacgctgtagcagaaccagatggctgagaaaattctggaactatggatcttgaccccaaggatatattattttattccaagaaagatcaggtaggcgaaaagatgacaggatacagagtcaatccataaactaaatatttataactgttctgaattatacagagtctaaaaatatgtgtcagctacttcattcctgtaaatactcttgctgtgttataaatatggcaagaaataaacatgaccaatatcaat

SEQ ID NO: 2699 - DNA, 2492 bp, Homo sapiens
gcggtatggcgtcgggctgcaagattggcccgtccatcctcaacagcgacctggccaatttaggggccgagtgcctccggatgctagactctggggccgattatctgcacctggacgtaatggacgggcattttgttcccaacatcacctttggtcaccctgtggtagaaagccttcgaaagcagctaggccaggaccctttctttgacatgcacatgatggtgtccaagccagaacagtgggtaaagccaatggctgtagcaggagccaatcagtacacctttcatctcgaggctactgagaacccaggggctttgattaaagacattcgggagaatgggatgaaggttggccttgccatcaaaccaggaacctcagttgagtatttggcaccatgggctaatcagatagatatggccttggttatgacagtggaaccggggtttggagggcagaaattcatggaagatatgatgccaaaggttcactggttgaggacccagttcccatctttggatatagaggtcgatggtggagtaggtcctgacactgtccataaatgtgcagaggcaggagctaacatgattgtgtctggcagtgctattatgaggagtgaagaccccagatctgtgatcaatctattaagaaatgtttgctcagaagctgctcagaaacgttctcttgatcggtgaaaccataaggagcccagtgttcctgttcatgaaatctcccttttactggaaaacaggaatattgactaccaaatcacaatgcaattgaagccgtactgcttttttgagcagttattcattccagtgattaaaactgattgtgcagaatattctaagaggtcagaaattggtgtgtataactacatttttagtgatgcaatttattgattagtgagtaagatactgtttttattgagagatttgatttttataaagtaaaaatacggctgcattagggttacaaacagaaaagtgtcttaatgtctaaggagggcatattagctacactacaaaaacaaattttgtctgtacttctgaaaagaattttgttgtttctcagctgttttccaaaagcaaaggaagtctttatggtttttttctatttcatgttattgtgatttgtttataagtttgggtggggtgcataccatattcttggttcttaaaatctatcacttttcaccttacacttgatgtgtgaaaactataaaaacaatgtgtgaaacccaggggttctaaaatacaagcatagattttatcagggtgttttgtcaaagcaggttattcagtgattcctccccaccattcttaagaacgttaaataatgctgttgtgttagctctgagtagaaaggaaaaagtaaaacctctgtttggaggtaatattgggttgaattctgactgcccctttctagctggacctttaacaaatcacccaatcttttttgtgtttctctaaagtcatttatacattaaatgtaattatagcaactgtggggttctgttgagaattaagagctaacactatatatgtaaagtttccagtactagtcccagaatttagaatatgctcaacacaaagtaaacagcattatataagtttatatttttgtgagttataaagtactttgatatattctcattaaatctgtaaatcacctctataagtaagtggtaataataaagcagatatttttgtccccatttaaaaaatgaagaaattaatgcttaatagggtggtaccctggaaaggatctgggaagtggtagaatttctggtctgtacttttacaaatggagcccttgggaggtgggttaggtaaaagaagctttttacttaacgttgtcttatttccagtctaattttacgctgtagcagaaccagatggctgagaaaattctggaactatggatcttgaccccaaggatatattattttattccaagaaagatcaggtaggcgaaaagatgacaggatacagagtcaatccataaactaaatatttataactgttctgaattatacagagtctaaaaatatgtgtcagctacttcattcctgtaaatactcttgctgtgttataaatatggcaagaaataaacatgaccaatatcaatagacttcttgaggctactataagttttgagaaataaggttcaaaaaataagaatgctaacacttaagcacagactagagcttgcttgggtttcttcctgcattacaaggtaaaaatttgttaatgtttgtttttattcagcttgggaaagctttgtgccatgaatacgtcgcatttaataacaagcaacacacggcatatagaaataactttaattaaaaaacttacatagaagattataatatcagacgtgacaaagatttgagtttatttgcctggacaacttgggtttgtctggcttttgttttctttttctttaaaaataaatgtacagtaaaactaaaaaaaaaaaaaaaaaaaaaaaaa

SEQ ID NO: 2700 - DNA, 6307 bp, Homo sapiens
gcgagcggctgttggaggaaggaggtgggggccgggagcgcaaatggcgttgagatggtycarggccctgttcaaactccagcactgaccattcaccggcggaagcggcggcgcaggaggcggcggcggcccagcgggggcacacagcaggctctgttaccagctccagcagtggcggccagcgagagctaggcccgsgcccggccggcggcgctcgaggcggggagggaagttgcggggccgccgctcctgcccccccaaccgggcttcctatttaccgaaagcagagtccctcgcctctctcggctctcacctgccggccctgctctcccgcgcgagggttccgcgcccgcccgcgggccgtarggagcgggagaaggcggargcggccccgtggccaaagcacccgccaggcttccgaggagaatatgaaactggtgtcaaaatgacatccagatttgggaaaacatacagtaggaaaggtggaaatggcagttcaaaattcgatgaagtcttttccaacaaacggactacccttagcacaaaatggggagagaccacatttatggctaaattagggcagaagaggcccaatttcaaaccagatatccaagaaattccgaagaaacctaaagtggaagaagaaagtactggagatccttttggatttgatagtgatgatgagtctctaccagtttcttcaaagaatttagcccaggttaagtgttcctcttattcagaatctagtgaagctgctcagttggaagaggtcacttcagtacttgaagctaatagcaaaattagtcatgtggtcgttgaagacactgtcgtttctgataaatgcttccctttggaggacactttacttgggaaagaaaagagcacaaaccgaattgtagaagatgatgcaagcataagtagctgtaataaattaataacttcagataaagtggagaattttcatgaagaacatgaaaagaatagtcaccatattcacaaaaatgctgatgacagtactaagaaacccaatgcagaaactacagtggcttctgaaatcaaggaaacaaatgatacttggaactcccagtttgggaaaaggccagaatcaccatcagaaatatctccaatcaagggatctgttagaactggtttgtttgaatgggataatgattttgaagatatcagatcagaagactgtattttaagtttggatagtgatccccttttggagatgaaggatgacgattttaaaaatcgattggaaaatctgaatgaagccattgaggaagatattgtacaaagtgttcttaggccaaccaactgtaggacgtactgtagggccaataaaacgaaatcctcccaaggagcatcaaattttgataagctgatggacggcaccagtcaggccttagccaaagcaaacagtgaatcgagtaaagatggcctgaatcaggcaaagaaagggggtgtaagttgtgggaccagttttagagggacagttggacggactagagattacactgttttacatccatcttgcttgtcagtttgtaatgttaccatacaggatactatggaacgcagcatggatgagttcactgcatccactcctgcagatttgggagaagctggtcgtctcagaaaaaaggcagatattgcaacttctaagactactactagatttcgacctagtaatactaaatccaaaaaggatgttaaacttgaattttttggttttgaagatcatgagacaggaggtgatgaaggaggttctggaagttctaattacaaaattaagtattttggctttgatgatctcagtgaaagcgaagatgatgaagatgatgactgtcaagtagaaagaaagacaagcaaaaaaagaactaaaacagctccatcaccctccttgcagcctcccccagaaagcaatgataattcccaggacagtcagtctggtactaacaatgcagaaaacttggattttacagaggacttgcctggtgtgcctgaaagtgtgaagaagcccataaataaacaaggagataaatcaaaggaaaataccagaaagatttttagtggccccaaacggtcacccacaaaagctgtatataatgccagacattggaatcatccagattcagaagaactgcctgggccaccagtagtaaaacctcagagtgtcacagtgaggctgtcttcaaaggaaccaaatcaaaaagatgatggagtttttaaggctcctgcaccaccatccaaagtgataaaaactgtgacaatacctactcagccctaccaagatatagttactgcactgaaatgcagacgagaagacaaagaattatatactgttgttcagcacgtgaagcacttcaacgatgttgtagaatttggtgaaaatcaagagttcactgatgacattgagtacttgttaagtggcttaaagagcactcagcctctaaacacacgttgccttagtgttattagcttggctactaaatgtgccatgcccagttttcgaatgcacctgagagcacatgggatggtagcaatggtctttaaaaccttggatgattcccagcaccatcagaatctgtccctctgtacagctgccctcatgtatatactgagtagagatcgtttgaacatggatcttgatagagctagcttagatctaatgattcgacttttggaactggaacaagatgcttcatcagccaagctactgaatgaaaaagacatgaacaaaattaaagaaaaaatccgaaggctctgtgaaactgtacacaacaagcatcttgatctagaaaatataacgactgggcatttagctatggagacattattatcccttacttctaaacgagcaggagactggtttaaagaagaactccggcttttgggtggtctggatcatattgtagataaagtaaaagaatgtgtggatcatttaagtagagatgaggatgaagagaaactggtagcctcactatggggagcagagagatgtttacgagttttagaaagtgtaactgtgcataatcccgaaaatcaaagctacttgatagcatataaagattcccaacttattgtttcatcagctaaagcattacagcattgtgaagaactgattcagcagtacaaccgtgctgaggacagcatatgcttagctgacagtaagcctctgcctcaccagaatgtaactaaccatgtaggcaaagcagtggaggactgcatgagggccatcatcggggtgttgcttaatttaactaatgataatgagtggggcagcaccaaaacaggagagcaggacggtctcataggcacagcgctgaactgtgtgcttcaggttccaaagtacctacctcaggagcagagatttgatattcgagtgctgggcttaggtctgctgataaatctagtggagtatagtgctcggaatcggcactgtcttgtcaacatggaaacatcgtgctcttttgattcttccatctgtagtggagaaggggatgatagtttaaggataggtggacaagttcatgctgtccaggctttagtgcagctattccttgagcgagagcgggcagcccagctagcagaaagtaaaacagatgagttgatcaaagatgctcccaccactcagcatgataagagtggagagtggcaagaaacaagtggagaaatacagtgggtgtcaactgaaaagactgatggtacagaagagaaacataagaaggaggaggaggatgaagaacttgacctcaataaagcccttcagcatgccggcaaacacatggaggattgcattgtggcctcctacacggcactacttcttgggtgtctctgccaggaaagtccaatcaatgtaaccactgtgcgggaatatctgccagaaggagacttttcaataatgacagagatgctcaaaaaatttttgagttttatgaatctcacttgtgctgttggaacaactggccagaaatctatctctagagtgattgaatatttggaacattgctagctgctttacctttgcttcaggtgctcggtaatgctggagctatccttagacaaagaaaagtcaagtcatgaaagaagtccttgaagatataccaagaacattcatcagtatcattcgtgtttggatttttaaggccacctgatttcttcgtcatgcattcggcatttgctaaatgacagttactacatcaatctgcaactatcaaaaatgaggggaaaaggttcaggctgttaacaattccatgcagtatttaaatacatttactttggcagagtttataccctccccttgttttcttgctttattctgggcaagtttgaaggggaaaatttgtgctgctgttagtgcaactgctgtgtatgttgagccactgttgtcatgccagccaggtgcaaaggcagcttagctactgaggtagcgaatgttctgaggacattctagacaacagcttagttcctttttcaggctcatttgcttttgcttttttgttgaatgattccaatcgtaaataaagcttttaataattttgtgaattttttggttgttgttccctgaactactgtctatatttaaaattagatggaatccaaagatacacgggattaatagtatatttttttattcttgattaggtttgggttattgaactattttttacttttgagaccacaaccatattcaatatcataccataatgtgtcatagctataggcacaagaaaaacaacagtttgagagaatattatataagatgatgtgccctgttaaaaggaggaggcaaaatagtcaaacccagggtagtttacacttaatgctagggaggctcttaaaacattattagattttgaggaaagactctctagatatattttctaatgttcagtacaataaatataaggaagctaaaacaccaatgtggaattcctgtttccagataacatgtatattcttctatagagtgacaggatcaattgcataagcgcaaagccttaaattgctggtttagagaagacccttttttcattcagattctttgttcgtagagcagttatttgaaaaacagttatggaacacaaaacattttatagatttaatatcataacattgcaaatttttcttgtattattgttcacaccactggttatacttttttttttccttttttattgattgggcctgaatacaggctttctagagatctttttcattaatacttttaaatacctttcaggtagttacatcatgtttcttcattggatttgtaaaacttgaagccataaaaatattagtttggtgtgtattggggaaaatagctaaaagtctaatttttacccatttagactttgttatttccttgtataaagtgacaaatcggggctcttgtatcagtgccagctgtaatgtttttaaatgcagtggctgccttctattgtcttcctatttttgataatgcagattgttgggaaatctgtaaggaagtaactgattccaggcaaattgttttcttccttctacccaccccaacccctacccatcaccttttaagaacatagtacgccagtgtaacgtgggaaccattgagattgtatttgccctgagtattaaagctagcttagcaaaatacttttaaaaacatattggtaaatgatacccataaaattaaattagttatattttattttaaaatgcaaaatacattgatatttattaatcattggatttagggaaagggacagatttttggtgaacctgacttgtggcagatggtaaggaatattataaaacatttggatgagaacaatcagggcgaactgcatttttctgttacactggtaatcatttgaaaattgatttacctcagtgtttaacagttttttgttttgttttgttttttaaataataactaattgtcgagcactgatagagatgcagattttggtggggggaggtggtgggggagataatcacttcaccaactgcagtgcatttgtgtgtttttaaccctcagagaactctgcattttagggtacttgaggctgacttaactaaaagttttaaagtaaccttttttccattgtaaatatttctgtaaatactaccaattggaaattagaacagtagagtacttttctgaatccaatcctatttttattttatacagtatttctcagctgtgatctttggagcaaaagccaacggcaggaaaaaatagtttgtaccagtttcatgaagtatgtctttgggtttttgtaaataattttaactcaaataaaattgctactttcaatac

SEQ ID NO: 2701 - DNA, 1070 bp, Homo sapiens
ggaaacggtgtttggtggagcccgcgatggccgaacctgcgtctgtcgcggctgaatctctcgcgggcagcagggcgcgcgctgcacgcacagtactaggtcaggtggtgctcccgggtgaggagctgctcctgccggaacaggaggacgcggaaggccctgggggtgcagtggagcgaccgttgagcctgaatgctagagcgtgctcgcgggtgcgcgttgtatgcggtccgggccttcggcgctgtggggaccgcctgctggtcaccaagtgcggccgcctccgtcacaaggagcccggcagtggcagcggcggcggtgtttactgggtggactctcagcagaagcggtatgttccagtaaaaggagaccatgtgattggcatagtgacagctaaatctggagatatattcaaagttgatgttggagggagtgagccagcttctttgtcttacttgtcatttgaaggtgcaactaaaagaaacagaccaaatgtgcaggctattagctccagattgtgaaatcatacaggaagtgggaaaactctatccactggagatagtatttggaatgaatggaagaatatgggttaaggcaaaaaccatccagcagactttaattttggcaaacattttagaagcttgtgaacacatgacgtcagatcaaagaaaacagatcttctccagattggcagaaagttgatataggtggacttttttacaggtcagttgaggcaaaaaactatgggttttttcaggtgaacctcccccatttaaatactcagaagataaggtgtgaatgtatgtattattagagtccgaaagtatttttataagttactggttttcacccacgcttttgtgggagagaaaatcattgcaaaatcattttttttgttcggtacaataaagtttactaaaaaacagtattagggtttatttggagttaactcccttagtaattgctacagcttccataattaactggaggtcagcagtaaaataattttgtgattataacagtaagccaggttcaccagaggaaatgtggaatacctaagtataaagcag

SEQ ID NO: 2702 - DNA, 1220 bp, Homo sapiens
aaacggtgtttggtggagcccgcgatggccgaacctgcgtctgtcgcggctgaatctctcgcgggcagcagggcgcgcgctgcacgcacagtactaggtcaggtggtgctcccgggtgaggagctgctcctgccggaacaggaggacgcggaaggccctgggggtgcagtggagcgaccgttgagcctgaatgctagagcgtgctcgcgggtgcgcgttgtatgcggtccgggccttcggcgctgtggggaccgcctgctggtcaccaagtgcggccgcctccgtcacaaggagcccggcagtggcagcggcggcggtgtttactgggtggactctcagcagaagcggtatgttccagtaaaaggagaccatgtgattggcatagtgacagctaaatctggagatatattcaaagttgatgttggagggagtgagccagcttctttgtcttacttgtcatttgaaggtgcaactaaaagaaacagaccaaatgtgcaggttggagatctcatctatggccagtttgtggttgctaataaagacatggaaccagagatggtctgtattgacagctgtggacgagccaatggaatgggtgtcattggacaggatggtctgctttttaaagtgactctgggcttaattagaaagctattagctccagattgtgaaatcatacaggaagtgggaaaactctatccactggagatagtatttggaatgaatggaagaatatgggttaaggcaaaaaccatccagcagactttaattttggcaaacattttagaagcttgtgaacacatgacgtcagatcaaagaaaacagatcttctccagattggcagaaagttgatataggtggacttttttacaggtcagttgaggcaaaaaactatgggttttttcaggtgaacctcccccatttaaatactcagaagataaggtgtgaatgtatgtattattagagtccgaaagtatttttataagttactggttttcacccacgcttttgtgggagagaaaatcattgcaaaatcattttttttgttcggtacaataaagtttactaaaaaacagtattagggtttatttggagttaactcccttagtaattgctacagcttccataattaactggaggtcagcagtaaaataattttgtgattataacagtaagccaggttcaccagaggaaatgtggaatacctaagtataaagcag

SEQ ID NO: 2703 - DNA, 1741 bp, Homo sapiens
agcggagcgcggaggccgctgggacgcggttcagctcattccctgaggccggcccgcgtcccgtcaggcgccgcgcggggttagcgcggggtcagcggaggtcagcgggggtcagcagcagcggctccgagggcgcggcggacgcaggatgtacacgctgctgtcgggcttgtacaagtacatgtttcagaaggacgagtactgcatcctgatcctgggcctggacaatgctgggaagacgaccttcctggagcagtcgaaaacccgatttaacaagaactacaaggggatgagtctatccaaaatcaccaccaccgtgggcctaaacatcggcactgtggatgtgggaaaggctcggctcatgttctgggacttaggagggcaggaagagctgcagtctttgtgggacaagtattatgcggagtgtcacggcgtcatctacgtcattgactccaccgacgaggagaggctggctgagtccaagcaggcgtttgagaaggtggtgaccagcgaggcgctgtgcggtgtccccgtcttggtgctggccaacaagcaggatgtggagacgtgcctctcaatccctgacatcaagacggccttcagcgactgcaccagcaagatcggcaggcgagattgcctgacccaggcctgctcggccctcacaggcaaaggggtgcgcgagggcatcgagtggatggtgaagtgtgtcgtgcggaatgtgcaccggccgccgcggcagagggacatcacgtaggcgcagccgcgctgccgtcgggacggctggtcccctggtgctggaggagtggcctcctgttggctcccatgctgctgatctggggggtgggtttgctttgctttggggttcttctatttactttgttttctcgaagacaaactttcctctatgtctggaaaagcgtaggcatccggaggctttggaggggagtctggcagcccggctggcccaggccctgcagcggcagcctttccacagggcgcagcggcggcctttcgaggccctttctggggggtctgagggagacctggttgggaattggggctccagtgctcaggctggcttgggctgcatgaggacagccctgtgggaccctcgggagaccccgtggctgtctccgccccatcgaggaggaggcccgtcagccatggctgccatctggcttctgccctgtgaccccgtgaccccgtgaccccggaagtggtctggggctgatcttgccttgaggaagacccaggccatgttcccaaaggccagcgggggccctggattgtgatgcagcctcgggacagggctgaggcctgcgggggaagacctataccccacgcctgggcctggcttcacctcaccctaatcccccgggagggagctgactgatgcaaaaagctgagggggcctgctgggagtggctgtttttatgccccagccccgcaagttggggagtgtttgtgggggtccagagccctcccccagccaggagagaacctcccggaggggttctctgtggggccctgtgtcccctgctcgggagtaaggctggtcctggggtcctccctgcacggaccccactgggcctgccgagtgctgtgttcttcctcagtctggctgtgggcaggagcggcctgcccagtgtcacccagggtgagtgcaaaataaagacggcgagtgtggctctgtccatcccttccctcctggagggtggaggctcctggctgttggacacgg

SEQ ID NO: 2704 - DNA, 3503 bp, Homo sapiens
aatgctaatgagcgagttgccaggcgagacaggaacttctttccccttctctgtgtcaggatcgcagaaagtatgtcccttctctcaccatgagctggctctccagttcccagggagtggtactaacagcctaccaccccagcggcaaggaccagaccgtcgggaacagccatgcaaaggcaggggaggaagccacctcgagtcgcagatatggccagtacactatgaaccaggaaagcaccaccatcaaagttatggagaagcctccatttgatcgatcaatttcccaggattctttggatgaactatctatggaagactattggatagaactagaaaacatcaagaaatctagtgaaaacagccaagaagatcaagaggtggttgttgtcaaagagcctgatgagggagaattggaagaagagtggcttaaagaggccggtttatccaatctcttcggagagtctgctggagatccacaggaaagcattgtgtttttatcaacattgacgcggacccaggcagcagcagttcagaagcgagtagagacggtctcccagaccttgaggaaaaaaaacaaacagtaccagattcctgacgtcagagacatatttgctcaacagagagaatcaaaagaaacagctccaggtggcactgaatcgcagtcacttagaacaaatgaaaacaaataccaaggaagagatgacgaggcatctaaccttgttggtgaagagaagctgatcccacctgaggagacgcctgcccctgaaacagacatcaacctggaggtatcatttgccgagcaagcactcaatcagaaagagagctccaaggagaaaatccagaagagcaaaggcgatgatgccacattacctagtttcagattgccaaaagacaaaacgggtaccacaaggattggtgacctcgcaccccaggacatgaagaaagtttgccatttagccctaattgagctgactgccctctatgatgtattgggtattgagctgaaacaacaaaaagctgtgaaaatcaaaacaaaagattctggtcttttttgcgttccattgacagcgctattagaacaagatcagaggaaagtaccaggaatgcgaatacccttgatctttcaaaaactgatttctcgaattgaagagagaggtttggaaacagaaggcctcttacggatccctggagctgccattagaatcaagaatctttgccaagaactagaagcaaagttttatgaagggacttttaattgggaaagtgtcaaacagcatgatgccgccagcctgctgaagctcttcattcgggagttgccccagccactgctcagtgtggagtatctcaaagcctttcaggctgtccagaatcttccaaccaagaagcagcaactacaggctttgaaccttcttgtcatcctcctacctgatgcaaacagggacacactgaaggcccttcttgaatttctccaaagagtaatagataataaagaaaaaaataaaatgacagtcatgaatgtagcaatggtcatggccccgaatctctttatgtgtcatgcattgggattgaagtccagtgaacagcgagaatttgtaatggcagctgggacagcaaataccatgcacttattgattaagtaccaaaaacttctgtggacaattcccaagtttattgtaaaccaagtgaggaagcaaaacacggaaaatcataaaaaggataaaagagccatgaagaaattgctgaagaaaatggcttatgaccgagaaaaatatgaaaagcaagataagagtacaaatgatgctgacgttcctcagggagtgattcgagtgcaagctccccatctttcgaaagtttccatggcaatacagctaactgaagaactaaaagccagtgatgtacttgccaggtttctcagccaagaaagtggggttgcccagactctcaagaaaggagaagtttttttgtatgaaattggaggaaatattggggaacgctgccttgatgatgacacttacatgaaggatttatatcagcttaacccaaatgctgagtgggttataaagtcaaagccattgtagaagacttaacaagctgcagataaccatgtggacttctgtcataattcttgctgagtcaagagtgtaaataaaagaaatggcaggactcatattattcagttgtacccaagtatttaaaaatgactctcttaagccttaaaaagtcatagatttgtgctgctgccagaattatattaattattattaatgttattattagaaaaaaaatttctggagtgagagtaaagaggcttaattagtttgtgggcagttttcatatgctctgtgaaatgtgtccagatgtgacatagtttttttttttaatatgtggaaatgtcttctcttcccattcttttctcctaaaatcatatatactgtaatatatgctctctcacctctattacctcctcacatctaccctttcccagttaggtttgctttttgaccaaaaagataacaaataccaggtatggcaagttgtgaagacagcacattaaaacatacctaatttcacagtattcctgtcacgacagaatgttagtattcatctctttgaatcatttgctcaaataataacattccaccttttcctgctgtatcacaggaagtgatttgcattttttttcagttcatctgacttatgttcacagaaccgtatcagcgaccaagaaaataggactgtcagaagctgccagttattactgaaccattaaatacttatatactaagaataaataaaatatacccatgtgaaataataattggattatggataacaagagagtgaaagccaaagcactttctgtctactgtactcttctaaatggaattttaaaagtcatagctggctttacgtgttgtcattattagcattataaatatgcatgatagtataatccagtaatggttgaagaatgtattttacttaaagagggatttttttttttaagtcctgaataagtctactggaagaattattcttctgggtgaaaaagcttttgtttgtgttcttattttaaataatcggagtcaatttattaaaatgttcttgaaagtactattcccagggattttaatgcacaaaccatattgtgacaagagatgagcctctgtactgtaaataagaaatgaagtagagaaatgttaaatattttatgagtttagaatatagtaaataaaaggtgatgtaaatgaatgctgcacaaacggtgttcatgatacttttagtagtactttaggaaaaactacacattctcagaagctcttgatgtctctaatgaagggggggaatgctgttaatgagaacagtcataaatttttagcatataattacaagaacagcctgtggatatgatcacttaaatgattttgtggtgattcgtgccattgcttttttatttaaaagaaaattttgtaattaaatgcctttttctaaattaaaaa

SEQ ID NO: 2705 - DNA, 661 bp, Homo sapiens
gagcctccggccgcccgccgggtttgtcccgcgatccccgaccatgcccgccgacctcagcggtacttggaccctgctcagcagcgacaacttcgagggctacatgctggccctaggtattgactttgccactcgtaaaatagccaagttgctgaagccacagaaagtgattgagcagaatggggattcttttaccatccacacgaacagcagcctaaggaactactttgtgaaatttaaagttggagaagaatttgatgaagataacagaggcctggacaacagaaaatgcaagagtttggttatctgggacaatgacaggctcacctgtatccagaagggagaaaagaagaacagaggctggacccattggatcgaaggagacaaactccacctggaaatgttctgtgaaggtcaagtgtgcaaacagacattccagagagcctgatccacatccagcagcagagcccacttgtggctgcagctttatgccaaattatattgcagactgaacagacgtttatctatcccatttggcgacgaggactcgtggctggagagagccacacagcgtgtaacctgaagtcatctagattatggggaaactgctcagcttcaataaacctgtccacaatgaaaaaaaaaaaaaaaaaaaaaaaaa

SEQ ID NO: 2706 - DNA, 4264 bp, Homo sapiens
atttcccgccagcaggagccgcgcggtagatgcggtgcttttaggagctccgtccgacagaacggttgggccttgccggctgtcggtatgtcgcgacagagcaccctgtacagcttcttccccaagtctccggcgctgagtgatgccaacaaggcctcggccagggcctcacgcgaaggcggccgtgccgccgctgcccccggggcctctccttccccaggcggggatgcggcctggagcgaggctgggcctgggcccaggcccttggcgcgatccgcgtcaccgcccaaggcgaagaacctcaacggagggctgcggagatcggtagcgcctgctgcccccaccagttgtgacttctcaccaggagatttggtttgggccaagatggagggttacccctggtggccttgtctggtttacaaccacccctttgatggaacattcatccgcgagaaagggaaatcagtccgtgttcatgtacagttttttgatgacagcccaacaaggggctgggttagcaaaaggcttttaaagccatatacaggttcaaaatcaaaggaagcccagaagggaggtcatttttacagtgcaaagcctgaaatactgagagcaatgcaacgtgcagatgaagccttaaataaagacaagattaagaggcttgaattggcagtttgtgatgagccctcagagccagaagaggaagaagagatggaggtaggcacaacttacgtaacagataagagtgaagaagataatgaaattgagagtgaagaggaagtacagcctaagacacaaggatctaggcgaagtagccgccaaataaaaaaacgaagggtcatatcagattctgagagtgacattggtggctctgatgtggaatttaagccagacactaaggaggaaggaagcagtgatgaaataagcagtggagtgggggatagtgagagtgaaggcctgaacagccctgtcaaagttgctcgaaagcggaagagaatggtgactggaaatggctctcttaaaaggaaaagctctaggaaggaaacgccctcagccaccaaacaagcaactagcatttcatcagaaaccaagaatactttgagagctttctctgcccctcaaaattctgaatcccaagcccacgttagtggaggtggtgatgacagtagtcgccctactgtttggtatcatgaaactttagaatggcttaaggaggaaaagagaagagatgagcacaggaggaggcctgatcaccccgattttgatgcatctacactctatgtgcctgaggatttcctcaattcttgtactcctgggatgaggaagtggtggcagattaagtctcagaactttgatcttgtcatctgttacaaggtggggaaattttatgagctgtaccacatggatgctcttattggagtcagtgaactggggctggtattcatgaaaggcaactgggcccattctggctttcctgaaattgcatttggccgttattcagattccctggtgcagaagggctataaagtagcacgagtggaacagactgagactccagaaatgatggaggcacgatgtagaaagatggcacatatatccaagtatgatagagtggtgaggagggagatctgtaggatcattaccaagggtacacagacttacagtgtgctggaaggtgatccctctgagaactacagtaagtatcttcttagcctcaaagaaaaagaggaagattcttctggccatactcgtgcatatggtgtgtgctttgttgatacttcactgggaaagtttttcataggtcagttttcagatgatcgccattgttcgagatttaggactctagtggcacactatcccccagtacaagttttatttgaaaaaggaaatctctcaaaggaaactaaaacaattctaaagagttcattgtcctgttctcttcaggaaggtctgatacccggctcccagttttgggatgcatccaaaactttgagaactctccttgaggaagaatattttagggaaaagctaagtgatggcattggggtgatgttaccccaggtgcttaaaggtatgacttcagagtctgattccattgggttgacaccaggagagaaaagtgaattggccctctctgctctaggtggttgtgtcttctacctcaaaaaatgccttattgatcaggagcttttatcaatggctaattttgaagaatatattcccttggattctgacacagtcagcactacaagatctggtgctatcttcaccaaagcctatcaacgaatggtgctagatgcagtgacattaaacaacttggagatttttctgaatggaacaaatggttctactgaaggaaccctactagagagggttgatacttgccatactccttttggtaagcggctcctaaagcaatggctttgtgccccactctgtaaccattatgctattaatgatcgtctagatgccatagaagacctcatggttgtgcctgacaaaatctccgaagttgtagagcttctaaagaagcttccagatcttgagaggctactcagtaaaattcataatgttgggtctcccctgaagagtcagaaccacccagacagcagggctataatgtatgaagaaactacatacagcaagaagaagattattgattttctttctgctctggaaggattcaaagtaatgtgtaaaattatagggatcatggaagaagttgctgatggttttaagtctaaaatccttaagcaggtcatctctctgcagacaaaaaatcctgaaggtcgttttcctgatttgactgtagaattgaaccgatgggatacagcctttgaccatgaaaaggctcgaaagactggacttattactcccaaagcaggctttgactctgattatgaccaagctcttgctgacataagagaaaatgaacagagcctcctggaatacctagagaaacagcgcaacagaattggctgtaggaccatagtctattgggggattggtaggaaccgttaccagctggaaattcctgagaatttcaccactcgcaatttgccagaagaatacgagttgaaatctaccaagaagggctgtaaacgatactggaccaaaactattgaaaagaagttggctaatctcataaatgctgaagaacggagggatgtatcattgaaggactgcatgcggcgactgttctataactttgataaaaattacaaggactggcagtctgctgtagagtgtatcgcagtgttggatgttttactgtgcctggctaactatagtcgagggggtgatggtcctatgtgtcgcccagtaattctgttgccggaagataccccccccttcttagagcttaaaggatcacgccatccttgcattacgaagactttttttggagatgattttattcctaatgacattctaataggctgtgaggaagaggagcaggaaaatggcaaagcctattgtgtgcttgttactggaccaaatatggggggcaagtctacgcttatgagacaggctggcttattagctgtaatggcccagatgggttgttacgtccctgctgaagtgtgcaggctcacaccaattgatagagtgtttactagacttggtgcctcagacagaataatgtcaggtgaaagtacattttttgttgaattaagtgaaactgccagcatactcatgcatgcaacagcacattctctggtgcttgtggatgaattaggaagaggtactgcaacatttgatgggacggcaatagcaaatgcagttgttaaagaacttgctgagactataaaatgtcgtacattattttcaactcactaccattcattagtagaagattattctcaaaatgttgctgtgcgcctaggacatatggcatgcatggtagaaaatgaatgtgaagaccccagccaggagactattacgttcctctataaattcattaagggagcttgtcctaaaagctatggctttaatgcagcaaggcttgctaatctcccagaggaagttattcaaaagggacatagaaaagcaagagaatttgagaagatgaatcagtcactacgattatttcgggaagtttgcctggctagtgaaaggtcaactgtagatgctgaagctgtccataaattgctgactttgattaaggaattatagactgactacattggaagctttgagttgacttctgaccaaaggtggtaaattcagacaacattatgatctaataaactttattttttaaaaatga

SEQ ID NO: 2707 - DNA, 1206 bp, Homo sapiens
ctttttcagttctgcttgctgtcggcaccgctgcgttacccggaaccgccgggccgaacagcatgacgtccgctttggagaactacatcaaccgaactgttgccgttattacatcagatgggagaatgattgtgggaacactgaaaggttttgaccagaccattaatttgattttggatgaaagccatgaacgagtattcagctcttcacagggggtagaacaagtggtactaggattatacattgtaagaggtgacaacgttgcagtcattggagaaatcgatgaagaaacagattctgcgcttgatttggggaatattcgagcagaacctttaaattctgtagcacactgaggaaaaactacatacttggacatctgtaaatctttgtacagaaactgattattctgaggatgatatatggagtttttatgagtgtgtcactggattttgactccttattgattcattgtaatatgtaaattaaaatatttctacattttattgaaaaaaaaaaccttttttttttgcctaaatataagtttggtagcttggtttcttttttttattaaatagtgtgaaaatataatgggcattctgaaaacttttagaaaaaagtagtactttttgatactttagtatttatggaaactagtggaaaagagaaattagtgtgctatataaatcaggcattcaagtaacagtaatacaggatatatgtgttttctttccctgatgtttaggaaaatcacaggagggtaaatctttgctggagttatctgaatcattggcatttatccgattccactggtggtagtttgctagtgcttctaaaagttgctccctagcactgagaggtgtgggtaggtaaaaatgtgtttgcttgagaaaagcaaaaatgctaacaaggttttgatagattggcccaaaattctaacttgaatattaagaatgactaggaatggtagaattgacagagatgattagtaaagtctcttgatgcccaattggttaggtatgaaagtaatatgaacacattaatgttgaattttacagacagtatatttgaaaaaaattgattccatgtagtcttcaatttttaatttttaagaattggagaatttctaatgttaaagttagtttataaatgtgagtaaataaactctaagtttgtatcgaaaaaaaaaaaaaaaaaaaaaaaaaaaaa

SEQ ID NO: 2708 - DNA, 4042 bp, Homo sapiens
ctgcagggcctgcgagctgcccgtgcgcgtgcggagggaccgcatcctggaacacctgtcctcgggcaggcagcacggcctgcggacgcccattctcatgtaaatgtcagtgccaacgctggtgtttcaggagtcatcccagcgggctgcgggctattttaggattctctgccctgcaaacgtttccaaagtacgtggacaggccgcctgatgacactacgtttacgggatctgctagtggcttgcctacttagggagtaaaccctgtgaagtctcgcagttttgttaaagtgtgcgtggccacctgaatgctgccttatcacaagccagatacatactggtctgtagggtaactccccactgttgatcctctgagatgattgtggactgggtgctgtgagtcctgccactttgtttaagtgaatgtgtcttttgtccagctcagccgcctcggatctcgctgccaccagccttactgcacacccgtgccacccgcccttgccccgtcagcctcagcctcagctcattctctcaggcagtcccagcattggcacggtacctcctcccgctgtgggccacacgtctctgctccctgtcaaccctcctgccatcagcaccaccaccagcgacttgtctgcccgggaggatgcaacaccatctgcctccaccggccacctttcagtgtttcctgctttccaagtaaagataccagcagtgccctcagagcagaccagccagagtttttctgaagcctcccacagggtgctccccggaggaggcccgagatgctctcgtgactttggagccggggtggctggccaccttggcctgggcatctttggggtgggcttcgggagcccggcactgctgcagagtgtggtggatgagaacagctgctgcttgctgtacgtggtggaggaccagctgtgtgatgtggagcaagccttcagagctgagcatttgggccaacaccagagtggttcgggaacaggatgcagacattgtcctcaacgaccagcggcactttgatccggttttccagttcttgcacaagcaagtttgtgtcagccacgccctggggaggatccactggatcaccgccgtcactgcctgttcccggcggcctctccggcttccctaaagagagcaggtgggactttctacaacgctgctgtgcacgacgtggatgccgtatgcatgttgctgggggaagccactccggacactgtgttttctctgggacatgtcttctgcccagatatggccgccttaaaagatgcagatgctgttgtgatcagcatgaagtttccctgtgaggccgtggttagcgtggacatcagccagcactgcacagacagctgcgaccaggacgtcagccagcactgcacagacagctgcgaccagagactggaggtgacccttgcccttttccacccttcgccagtccactgtgaaaagctgggttgattgtgcgggttagatagaggtcatcagccgggttgattgtgtgggttagacagaggtcatcagccaggttgattgtgtgggttagatagagatcatcagcctggtagattgtgtgggttagatagaggtcatcagccaggttgattgtgcgggttagatagagatcatcagccgggttgattctacaggttagatagaggtcgtcagccgggttgattgtgcgggttagatagagatcatcagccgggttgattgtgcgggttagatagaggtcatcagctgggttgattgtgtgggttagatagagatcatcagctgggttgattgtgtgggttagatagaggtcgtcagctgggttgattgtgtgggttagatagaggtcatcagctgggttgattgtatgggttagatagaggtcatcagctgggttgattgtacgggttagatagaggtcgtcagccgggttgattccgcaggttagatagaggtcgttagctgggtgtgtgggtcccaaggcgtgctgcagatggagaatcagaattccttgggcatcaccgggcggggcatgtccctgtcccttcgctcccagacccaggctagccgctaccaggactcctatcgagagctcttcagacactttgtcagaacccttaaaggtgggtgacgttttcaggaggaacctgggatgtcctgatgctcaatgggtagatgccttccaggctgcagtcagtgcagatgatatgccaatttcaggtggaaaattgcattccagataccgggttcagatttgaaattgtccatctcagtgatcatttacgttgcgtgtacttgagggagattctgagagatgctcctttggggttctgtgcgtgtaccatgttgcctgacacgtcctgagaaatcttcttaaactctgagtttataaaataactacttctgaactcctgagatctagtggataccatgtatcctggaagataggacactttctaccctctgtcagtcctgggggtgactgggaaccagagaggttgagcagaattcctggacctgggtggggcttgtccaagaggggcaggtgggcctctctaggatcagtgtcccacccagaggccagtggccccttcacatgccccaacaagaggaagactgtctggctccgcagtgttgggttttgtcctgaatctgtgcaaatgtgcagggaaataacctcctgaaatcaccaaagagcagttcctcagggccttccgggtgaccgtggccgtggagcagtcgtggtgaaaccggtcagctgtggacctgccctgcgaatcggcagaggcctccgtggtgaagacagaagctccgtgaaccaactcgaggctggagccaagatcctgcctgatatccagttgcctgtttcacttgttactgttactgggagagggagacaaaacctcatggcaatcttgtcctcactggagactcagaaggggaagcattgggaaaccatgtatgtttcatttctggtttaaccaggcttttcaggatgggacttcagaccaaggacacaagttgggcttgcttaggtgttttgtgttgtgcgcaggcctcagagatgctcttccggtcagagttcccttggcagggccttggaggcctctggttggctctctcaggaagagggcaggtcagggattgggcggtgtaaattgactcagaaacctgcggtttcagcttttctgtggcaaacagggccgagggctggtgaagctgttaaggctaaatgtcgcatgcatgaggcgggctgcaggcctccttaggccttttttggggtaattacaccagtatttaaaaacatttttttttgtttgttttgagatggagtcttgccctgtcacccaggctggagtgcaatggtgcgatctcggctcactgcaacctccgtctcccaggttcaagcgattcttctgcctcagccttctgagtagctgggattacacgcgtgtgccaccacgctcggctaatttttgtatttttagtagagatgggatttcaccatgttggccaggctggtctcgaactactgacctcgtgatccacctgccacggcctcccaaagtgctgggattacaggcgtgagccaccatgctcggcctaaaaaacaattttcttgaagaatccgattttgtgcatagtaatgacacagcaccattcctgagaaataggaaatatatgtgtgtggtatgaaaagcccatattctgttcttgtcacctgaatctaggcttcctctttggatgtgaacgcgggaatgaacagtggctgttttccacccaaaggggcgtggagaccttttggaaacgggctttctcctttccattttgcagccgggggcgggtggaaaccttccttcgaagggtagtgccttggggagcagcagacctgctctgagtccagcttagctttccaaaattctgtgtggaacttactggagatgtttttatatatttgaaaataatggcctgtatttctcacgctatacttaaaaaaaataactaaccttttaaacaaagatattcaaactcaaaaaaaaaa

SEQ ID NO: 2709 - DNA, 4461 bp, Homo sapiens
ggcggtcggtcggtgaggctttcccggctgtggtttggctgcgggcggcttgggcagcccgcgggcgcctcaggtagaagaagaaaggtgccactccggcatgaagacagactcgcttagtcgccagtcacttaagctgagtgcattgtgatttccaataattgaggcagtggttctaaaagctgtctacattaatgaaaagagcaatgtggccagcttgactaagccgccagcgcacagcgcggcaggacgcgcccgggtctcagcggacttgtgcatgttagctgtgtagatttatgtgagggcttgtaaaactctggtcttgtaaactagtcttaagcgcttttaatatggagacagatgagagcccctctccgctcccgtgtgggcccgcaggagaagcggtgatggagagccgagctcgccccttccaagcgctgccccgtgagcagtctccaccacctcccctgcaaacgtccagtggtgcagaggtaatggacgttggctctggtggtgatggacagtccgaactccctgctgaggaccccttcaacttctacggagcttctcttctctccaaaggatccttctctaagggccgcctcctcatagacccgaactgtagtggccacagcccgcgcaccgcccggcacgcacctgcggtccggaagttctcccctgaccttaagttgcttaaggatgtaaagattagcgtgagctttaccgagagctgcaggagtaaggacaggaaggtgctgtacacaggagcagagcgcgacgtgcgggcggagtgcggtctgctccttagccctgtcagtggggacgtgcatgcttgtccctttggcgggagtgttggtgacggggtaggcatagggggtgagagtgctgataagaaggatgaggagaatgagctggatcaggaaaagagagtggagtatgcagtgctcgatgagttagaagattttactgacaatttggagctagatgaagaaggagcaggcgggttcacggctaaagcaatcgttcagagagacagagtggatgaagaggccttgaatttcccctacgaggatgactttgacaacgatgtggatgctctgctggaagaaggcctttgtgcccccaaaaagaggcgaacagaggaaaaatatggcggagacagcgaccatccgtccgatggagagacaagtgtgcagccgatgatgaccaagattaaaacagtgctcaaaagtcgtggccgcccacctacagagccgctgcccgacgggtggatcatgacattccataactctggagtcccggtgtacctacacagagagtctcgggtggtcacctggtccaggccatacttcttgggaacgggaagcatacggaaacacgaccctcctctgagtagcatcccttgtctgcattataagaaaatgaaggacaacgaggaacgggagcaaagcagtgacctcacccctagtggggatgtgtcccccgtcaagcccctgagccgatctgcagagctggagtttcccctggatgagcctgactctatgggtgctgacccggggcccccggacgagaaagacccactaggggctgaggcagcccctggggccctggggcaggtgaaggccaaagtcgaggtgtgcaaagatgaatccgttgatctcgaggaatttcgaagctacctggagaagcgttttgactttgagcaagttactgtgaaaaaattcaggacttgggctgagcggcggcaattcaatcgggaaatgaagcggaagcaggcggagtccgagaggcccatcttgccagccaatcagaagctcattactttatcagtgcaagatgcacccacaaagaaagagtttgttattaaccccaacgggaaatccgaggtctgcatcctgcacgagtacatgcagcgtgtcctcaaggtccgccctgtctataatttctttgaatgtgagaacccaagtgagccttttggtgcctcggtgaccattgatggtgtgacttacggatctggaactgcaagcagcaaaaaacttgcgaagaataaagctgcccgagctacactggaaatcctcatccctgactttgttaaacagacctctgaagagaagcccaaagacagtgaagaactcgagtattttaaccacatcagcatcgaggactcgcgggtctacgagctgaccagcaaggctgggctgttgtctccatatcagatcctccacgagtgccttaaaagaaaccatgggatgggtgacacgtctatcaagtttgaagtggttcctgggaaaaaccagaagagtgaatacgtcatggcgtgtggcaagcacacagtgcgcgggtggtgtaagaacaagagagttggaaagcagttagcctcacagaagatccttcagctgctgcacccacatgtcaagaactgggggtctttactgcgcatgtatggccgtgagagcagcaagatggtcaagcaggagacatcggacaagagtgtgattgagctgcagcagtatgccaagaagaacaagcccaacctgcacatcctcagcaagctccaagaggagatgaagaggctagctgaggaaagggaggagactcgaaagaagcccaagatgtccattgtggcgtccgcccagcctggcggtgagcccctgtgcaccgtggacgtgtgagggaggtggcacgggccagggcgcgggggccgccagccgcacttctgaggagaccagcagtcatgcatcgtgcaccacagtgtcaggcctccaacccacgctccttccctgtggccaacctgtgggcccggccttagggtggaggctttagtgtacagggacagccatggccacacagcacacatgtggagcagcggctctccctggaaagctccaggcctgaatggatggactcagcgactgcaccagtggcagctggtgactgtggacagtggtggaccctgcttctgtgcacctgctgcaggctctttttatgaaggctttcatgaattttagtatgtaatacgcactgacgacacatgatgcttggatgacagatgagaggggatggctgagtcctgtggctggcccgtgatgccaggtggcccatgtgcccagggcgcctgcagggctgctacagggacctggtcaggaggtgcacatggtgccctgccctcacccaccctctgtgtttccccttctttgaaaaggtagaagagaaaggaatattttaaacctttttggcttaaacagaattttagcatcagaactagctttctgggattggaggcaaaccatcaaggtggtccctctccagtctggacacgatgccagcaaggatgacgtcctgccacctcctggagttaccctggcctcctagggtccctttttctgatgaagtcttaattccctaaaagcgcctctttggacactgaggccctctctgcctttcctggcctccggcaacagttttttacaaagattttttgcagtcgagtccatatgtccacccattgatttttaaagcttttgtgatattttagcattttgaaagactttcacagtgagagtagaaggtagatttggaatcatgcattttagcaagtggacttgttgaaacaggaagcaagggccttcagtgtagcccattcttgatccagagctgttgcctgtgacagcggtttctctggatgtcaaaggcagctgcctggtgcccagcttgcttctcgactggtggcccctatgggtgggtgtgcgatggaaatgtgttcctgccggagtctgaggcaccagggtgtgctcaaaggctggccctggtggtggactggcacctgtgcagagtgccgtgtgcttgtggtgcgccatctgaagcaagagtccagcgttctgccgtgtctgtcccccaccatgccccctacaggcggtactgatggcgcttttttttttttttctgtcaggaaaacaatgttggcctgtgggccgcccacaacatatccttccctcactacctgtgtgaccaaggttggcttctgttgacctttaaaaaagaaaccctcaactcaaattgctataattagacacttgcttctgtcttgcctcctgtctgcagctgtgaatagtcatttgactgtgactgttgcccttagccagccagatgcgcctgtgaaccaaagcttcgtgcacatgtgttcccctaaaggttggggagcctcgctgtgtcttgctgttcccaggcaccaccacagcaggtgctgccatactcttgtggtctctgtgcgccccccccccccccccacccgtctgccaagcatgggtatgaatcgtgcacacagccatgcttcaaggccggggcaggggagcctgtgctgatgccatccagggcactgggctgtgcctggaaggcgagccttgattgtctgaacacataaagcaaactgtccagaagggaaaaaaaaaaaaaaaaaaaaaa

SEQ ID NO: 2710 - DNA, 2211 bp, Homo sapiens
cctgcgcggagggagccgcgagacaggtgcgcatgcgcagtgcgcgtctgcgagaccgacttggacggagccgagctgaggctcggcttcctgctgatggtcagggttttggcaactccccggtgtgagaggggtagggagtgctcccggcggcgacggggccgagttcaccagccgccggggcagtagtcgaaggcccggcgcggcatgtcctgggtgccgcggtgcgggcagtgaacgcgcgccgggcgggatgggccggcgccgggcgccagagctgtaccgggctccgttcccgttgtacgcgcttcaggtcgaccccagcactgggctgctcatcgctgcgggcggaggaggcgccgccaagacaggcataaagaatggcgtgcactttctgcagctagagctgattaatgggcgcttgagtgcctccttgctgcactcccatgacacagagacacgggccaccatgaacttggcactggctggtgacatccttgctgcagggcaggatgcccactgtcagctcctgcgcttccaggcacatcaacagcagggcaacaaggcagagaaggccggttccaaggagcaggggcctcgacaaaggaagggagcagccccagcagagaagaaatgtggagcggaaacccagcacgaggggctagaactcagggtagagaatttgcaggcggtgcagacagactttagctccgatccactgcagaaagttgtgtgcttcaaccacgataataccctgcttgccactggaggaacagatggctacgtccgtgtctggaaggtgcccagcctggagaaggttctggagttcaaagcccacgaaggggagattgaagacctggctttagggcctgatggcaagttggtaaccgtgggccgggaccttaaggcctctgtgtggcagaaggatcagctggtgacacagctgcactggcaagaaaatggacccaccttttccagcacaccttaccgctaccaggcctgcaggtttgggcaggttccagaccagcctgctggcctgcgactcttcacagtgcaaattccccacaagcgcctgcgccagccccctccctgctacctcacagcctgggatggctccaacttcttgccccttcggaccaagtcctgtggccatgaagtcgtctcctgcctcgatgtcagtgaatccggcaccttcctaggcctgggcacagtcactggctctgttgccatctacatagctttctctctccagtgcctctactacgtgagggaggcccatggcattgtggtgacggatgtggcctttctacctgagaagggtcgtggtccagagctccttgggtcccatgaaactgccctgttctctgtggctgtggacagtcgttgccagctgcatctgttgccctcacggcggagtgttcctgtgtggctcctgctcctgctgtgtgtcgggcttattattgtgaccatcctgctgctccagagtgcctttccaggtttcctttagcttccctgcttcctgggaatcaggagcctggacactgccatctctagagcagagtggaggcctggactccctttgctcactccattcgggtccacagctgaggttgcctctgacaagatgaatgggcactgcctgcccttctagtgaaaaggcttggctatggccctgtgtgactccaggtcccaggaaccttgccttcgtcatctgtggatccatccagaacagcggtatctgaagcccaggccatactccctgcctcctttcttctgcctaccagaggctccagagttgagcttgtccttatctagaaacatgtgaagatgcccaagagcctggaggcactgctgtccttcctgcagaaacagtttctcctcctcccctcagccttgtggccagttcctcttcacatgaagcccctggcatttgctggggaagggactggcctggtacttgctgttagggcaggaaggggcaaaaggaagacttgggtagtaatctgggggttcagatgggtagcactaagccagctggcctaaagatgcaataagttcctaggtagtctacccttaccttgaggaatgggaaaatgaacctcagcccattaggcaggaaaagttgatatttaataaacaaggaaagagtgaactgagaccccaaaaaaaaaaaaaaaaaaaaaaaaaaaaaaaaaaaaaaaaaaaaaaaaa

SEQ ID NO: 2711 - DNA, 9266 bp, Homo sapiens
gaaacagaaggtgggccggggcggggagaaacagaactcggtcaatttcccagtttgtcgggtctttaaaaatacaggcccctaaagcactaagggcatgccctcggtgaaacaggggagcgcttctgctgaatgagattaaagcgacagaaaagggaaaggagagcgcgggcaacgggatctaaagggagatagagacgcgggcctctgagggctggcaaacattcagcagcacaccctctcaagattgtttacttgcctttgctcctgttgagttacaacgcttggaagcaggagatgggctcagcagcagccaataggacatgatccaggaagagcagtaagggactgagctgctgaattcaactagagggcagccttgtggatggccccgaagcaagcctgatggaacaggatagaaccaaccatgttgagggcaacagactaagtccattcctgataccatcacctcccatttgccagacagaacctctggctacaaagctccagaatggaagcccactgcctgagagagctcatccagaagtaaatggagacaccaagtggcactctttcaaaagttattatggaataccctgtatgaagggaagccagaatagtcgtgtgagtcctgactttacacaagaaagtagagggtattccaagtgtttgcaaaatggaggaataaaacgcacagttagtgaaccttctctctctgggctccttcagatcaagaaattgaaacaagaccaaaaggctaatggagaaagacgtaacttcggggtgagccaagaaagaaatccaggtgaaagcagtcaaccaaatgtctccgatttgagtgataagaaagaatctgtgagttctgtagcccaagaaaatgcagttaaagatttcaccagtttttcaacacataactgcagtgggcctgaaaatccagagcttcagattctgaatgagcaggaggggaaaagtgctaattaccatgacaagaacattgtattacttaaaaacaaggcagtgctaatgcctaatggtgctacagtttctgcctcttccatggaacacacacatggtgaactcctggaaaaaacactgtctcaatattatccagattgtgtttccattgcggtgcagaaaaccacatctcacataaatgccattaacagtcaggctactaatgagttgtcctgtgagatcactcacccatcgcatacctcagggcagatcaattccgcacagacctctaactctgagctgcctccaaagccagctgcagtggtgagtgaggcctgtgatgctgatgatgctgataatgccagtaaactagctgcaatgctaaatacctgttcctttcagaaaccagaacaactacaacaacaaaaatcagtttttgagatatgcccatctcctgcagaaaataacatccagggaaccacaaagctagcgtctggtgaagaattctgttcaggttccagcagcaatttgcaagctcctggtggcagctctgaacggtatttaaaacaaaatgaaatgaatggtgcttacttcaagcaaagctcagtgttcactaaggattccttttctgccactaccacaccaccaccaccatcacaattgcttctttctccccctcctcctcttccacaggttcctcagcttccttcagaaggaaaaagcactctgaatggtggagttttagaagaacaccaccactaccccaaccaaagtaacacaacacttttaagggaagtgaaaatagagggtaaacctgaggcaccaccttcccagagtcctaatccatctacacatgtatgcagcccttctccgatgctttctgaaaggcctcagaataattgtgtgaacaggaatgacatacagactgcagggacaatgactgttccattgtgttctgagaaaacaagaccaatgtcagaacacctcaagcataacccaccaatttttggtagcagtggagagctacaggacaactgccagcagttgatgagaaacaaagagcaagagattctgaagggtcgagacaaggagcaaacacgagatcttgtgcccccaacacagcactatctgaaaccaggatggattgaattgaaggcccctcgttttcaccaagcggaatcccatctaaaacgtaatgaggcatcactgccatcaattcttcagtatcaacccaatctctccaatcaaatgacctccaaacaatacactggaaattccaacatgcctggggggctcccaaggcaagcttacacccagaaaacaacacagctggagcacaagtcacaaatgtaccaagttgaaatgaatcaagggcagtcccaaggtacagtggaccaacatctccagttccaaaaaccctcacaccaggtgcacttctccaaaacagaccatttaccaaaagctcatgtgcagtcactgtgtggcactagatttcattttcaacaaagagcagattcccaaactgaaaaacttatgtccccagtgttgaaacagcaattgaatcaacaggcttcagagactgagccattttcaaactcacaccttttgcaacataagcctcataaacaggcagcacaaacacaaccatcccagagttcacatctccctcaaaaccagcaacagcagcaaaaattacaaataaagaataaagaggaaatactccagacttttcctcacccccaaagcaacaatgatcagcaaagagaaggatcattctttggccagactaaagtggaagaatgttttcatggtgaaaatcagtattcaaaatcaagcgagttcgagactcataatgtccaaatgggactggaggaagtacagaatataaatcgtagaaattccccttatagtcagaccatgaaatcaagtgcatgcaaaatacaggtttcttgttcaaacaatacacacctagtttcagagaataaagaacagactacacatcctgaactttttgcaggaaacaagacccaaaacttgcatcacatgcaatattttccaaataatgtgatcccaaagcaagatcttcttcacaggtgctttcaagaacaggagcagaagtcacaacaagcttcagttctacagggatataaaaatagaaaccaagatatgtctggtcaacaagctgcgcaacttgctcagcaaaggtacttgatacataaccatgcaaatgtttttcctgtgcctgaccagggaggaagtcacactcagacccctccccagaaggacactcaaaagcatgctgctctaaggtggcatctcttacagaagcaagaacagcagcaaacacagcaaccccaaactgagtcttgccatagtcagatgcacaggccaattaaggtggaacctggatgcaagccacatgcctgtatgcacacagcaccaccagaaaacaaaacatggaaaaaggtaactaagcaagagaatccacctgcaagctgtgataatgtgcagcaaaagagcatcattgagaccatggagcagcatctgaagcagtttcacgccaagtcattatttgaccataaggctcttactctcaaatcacagaagcaagtaaaagttgaaatgtcagggccagtcacagttttgactagacaaaccactgctgcagaacttgatagccacaccccagctttagagcagcaaacaacttcttcagaaaagacaccaaccaaaagaacagctgcttctgttctcaataattttatagagtcaccttccaaattactagatactcctataaaaaatttattggatacacctgtcaagactcaatatgatttcccatcttgcagatgtgtaggtaagtgccagaaatgtactgagacacatggcgtttatccagaattagcaaatttatcttcagatatgggattttccttctttttttaaatcttgagtctggcagcaatttgtaaaggctcataaaaatctgaagcttacattttttgtcgagttaccgatgcttgtgtcttgtgaaagagaacttcacttacatgcagtttttccaaaagaattaaataatcgtgcatgtttatttttccctctcttcagatcctgtaaaatttgaatgtatctgttttagatcaattcgcctatttagctctttgtatattatctcctggagagacagctaggcagcaaaaaaacaatctattaaaatgagaaaataacgaccataggcagtctaatgtacgaactttaaatattttttaattcaaggtaaaatatattagtttcacaagatttctggctaatagggaaattattatcttcagtcttcatgagttgggggaaatgataatgctgacactcttagtgctcctaaagtttccttttctccatttatacatttggaatgttgtgatttatattcattttgattcccttttctctaaaatttcatctttttgattaagaaatatgatacaggcatacctcagagatattgtgggtttggctccataccacaataaaatgaatattacaataaagcaagttgtaaggactttttggtttctcactgtatgtaaaagttatttatatactatactgtaacatactaagtgtgcaatagcattgtgtctaaaaaatatatactttaaaaataatttattgttaaaaaaatgccaacaattatctgggcctttagtgagtgctaatctttttgctggtggagggtcgtgcttcagtattgatcgctgtggactgatcatggtggtagttgctgaaggttgctgggatggctgtgtgtgtggcaatttcttaaaataagacaacagtgaagtgctgtatcaattgatttttccattcacaaaagatttctctgtagcatgcaatgctgtttgatagcatttaacccacagcagaatttctttgaaaattggactcagtcctctcaaactgtgctgctgctttatcaactaagtttttgtaatattctgaatcctttgttgtcatttcagcagtttacagcatcttcattggaagtatattccatctcaaacattctttgttcatccataagaagcaacttcttatcaagttttttcatgacattgcagtaactcagccccatcttcaggctctacttctaattctggttctcttgctacatctccctcatctgcagtgacctctccacggaagtcttgaactcctcaaagtaatccatgagggttggaatcaacttctaaactcctgttaatgttgatatattgaccccctcccatgaattatgaatgttcttaataacttctaaatggtgatacctttccagaaggctttcaatgtactttgcccggatccatcagaagactatcttggcagctgtagactaacaatatatctcttaaatgataagacttgaaagtcaaaagtactccttaatccataggctgcagaatcaatgttgtattaacaggcacgaaaacagcattaatcttgtgcatctccatcggagctcttgggtgactaggtgccttgagcagtaatattttgaaaggaggttttggttttgttttttgtttttttgttttttttttttgttttttagcagtaagtctcaacactgggcttaaaatattcagtaaactatgttgtaaaaagatgtgttatcatccagactttgttgttccattactctacacaagcagggtacacttagcataattcttaagggccttggaattttcagaatggtaaatgagtatgggcttcaacttaaaatcatcaactgcattagcctgtaacaagagagtcagcctgtcctttgaagcaaggcattgacttctatctatgaaagtcttagatggcaccttgtttcaatagtaggctgtttagtacagccaccttcatcagtgatcttagctagatcttctgcataacttgctgcagcttctacatcagcacttgctgcctcaccttgtccttttatgttatagagacagctgcgcttcttaaactttataaaccaacttctgctagcttccaacttctcttctgcagcttcctcattctcttcatagaactgaagggagtcaaggccttgctctggattaagctttggcttaaggaatgttgtggctgacgtgatcttctatccagaccactaaagcgctctccatatcagcaataaggccgttttgctttcttacctttcatgtgttcactggagtaatttccttcaagaatttttcctttacattcacaacttggctaactggcatgcaaggcctagctttcagcctgtcttggcttttgacatgccttcctcacttagctcgtcatatctagcttttgatttaaagtggcaggcatacaactcttcctttcacttgaacacttagaggccactgtagggttattaattggcctaatttcaatattgctgtgttttagggaatagagaggcccagggagagggagagagcccaaacggctggttgatagagcaggcagaatgcacacaacatttatcagattatgtttgcaccatttaccagattatgggtacggtttgtggcaccccccaaaaattagaatagtaacatcaaagatcactgatcacagatcgccataacataaataataataaactttaaaatactgtgagaattaccaaaatgtgatacagagacatgaagtgagcacatgctgttgaaaaaaatgacactgatagacatacttaacacgtgggattgccacaaaccttcagtttgtaaaagtcacagtaactgtgactcacaaaagaacaaagcacaataaaacgaggtatgcctgtatttttaaaaaaagctttttgttaaaattcaggatatgtaataggtctgtaggaatagtgaaatatttttgctgatggatgtagatatatacgtggatagagatgaagatcttaattatagctatgcagcatagatttagtcaaagacatttgaaaagacaaatgttaaattagtgtggctaatgacctacccgtgccatgttttccctcttgcaatgagataccccacactgtgtagaaggatggagggaggactcctactgtccctctttgcgtgtggttattaagttgcctcactgggctaaaacaccacacatctcatagataatatttggtaagttgtaatcgtcttcactcttctcttatcacccacccctatcttcccacttttccatctttgttggtttgcaacagccccttctttttgcctgactctccaggattttctctcatcataaattgttctaaagtacatactaatatgggtctggattgactattcttatttgcaaaacagcaattaaatgttatagggaagtaggaagaaaaaggggtatccttgacaataaaccaagcaatattctgggggtgggatagagcaggaaattttatttttaatcttttaaaatccaagtaataggtaggcttccagttagctttaaatgttttttttttccagctcaaaaaattggattgtagttgatactacatataatacattctaattccctcactgtattctttgtttagtttcatttatttggtttaaaataattttttatcccatatctgaaatgtaatatatttttatccaacaaccagcatgtacatatacttaattatgtggcacattttctaatagatcagtccatcaatctactcattttaaagaaaaaaaaattttaaagtcacttttagagcccttaatgtgtagttgggggttaagctttgtggatgtagcctttatatttagtataattgaggtctaaaataataatcttctattatctcaacagagcaaattattgaaaaagatgaaggtcctttttatacccatctaggagcaggtcctaatgtggcagctattagagaaatcatggaagaaaggtaattaacgcaaaggcacagggcagattaacgtttatccttttgtatatgtcagaatttttccagccttcacacacaaagcagtaaacaattgtaaattgagtaattattagtaggcttagctattctagggttgccaacactacacactgtgctattcaccagagagtcacaatatttgacaggactaatagtctgctagctggcacaggctgcccactttgcgatggatgccagaaaacccaggcatgaacaggaatcggccagccaggctgccagccacaaggtactggcacaggctccaacgagaggtcccactctggctttcccacctgataataaagtgtcaaagcagaaagactggtaaagtgtggtataagaaaagaaccactgaattaaattcacctagtgttgcaaatgagtacttatctctaagttttcttttaccataaaaagagagcaagtgtgatatgttgaatagaaagagaaacatactatttacagctgcctttttttttttttttttcgctatcaatcacaggtatacaagtacttgcctttactcctgcatgtagaagactcttatgagcgagataatgcagagaaggcctttcatataaatttatacagctctgagctgttcttcttctagggtgccttttcattaagaggtaggcagtattattattaaagtacttaggatacattggggcagctaggacatattcagtatcattcttgctccatttccaaattattcatttctaaattagcatgtagaagttcactaaataatcatctagtggcctggcagaaatagtgaatttccctaagtgccttttttttgttgtttttttgttttgttttttaaacaagcagtaggtggtgctttggtcataagggaagatatagtctatttctaggactattccatattttccatgtggctggatactaactatttgccagcctccttttctaaattgtgagacattcttggaggaacagttctaactaaaatctattatgactccccaagttttaaaatagctaaatttagtaagggaaaaaatagtttatgttttagaagactgaacttagcaaactaacctgaattttgtgctttgtgaaattttatatcgaaatgagctttcccattttcacccacatgtaatttacaaaatagttcattacaattatctgtacattttgatattgaggaaaaacaaggcttaaaaaccattatccagtttgcttggcgtagacctgtttaaaaaataataaaccgttcatttctcaggatgtggtcatagaataaagttatgctcaaatgttcaaatatttaaagaaaaaaaaaaaaaaaaaa

SEQ ID NO: 2712 - DNA, 4980 bp, Homo sapiens
ggcggggctccgacgcccgcagcccggctgctactgccgcaccgcggcggccgtgaacctcctgctgggcgtcttccaggtcctgctgccctgctgtcgcccgggaggggctcagggacaagcgattgagccgttgccgaacgtggtggagctgtggcaggcagaagaaggggaactcctgctgcccactcagggtgattctgaagagggtctggaggagccttctcaagaacagagcttctcggacaaactatttagtggaaaaggcttacattttcagccatcagttttagattttggaatacagttcctgggacatcctgtagcaaagattctccatgcttacaaccctagtagggacagcgaggttgtggtgaattcagtgtttgcagctgctggacatttccatgtaccgccagttccctgcagggtaattccagcaatggggaaaacttccttcagaattattttcttacctactgaagaaggaagcattgaaagttccttatttattaatacctcttcgtatggagtcctttcctatcatgtatctggaattggcactcgtagaatctctacagaagggtctgcaaagcagctaccaaatgcttattttctgcttccaaaggtccagagcattcagctgtctcaaatgcaggcagaaaccactaatactagcctcttgcaggtgcaactggaatgcagtttacataataaagtgtgtcagcaattaaagggttgttatctggaatctgatgatgttttgcgtctacaaatgagcataatggtaacaatggaaaacttttcaaaagaatttgaagaaaacacacaacatttgttagatcatctctctattgtttacgtagctacagatgaatctgagacctcagatgattcagcagtaaatatgtatatattacattcaggaaacagccttatatggatacaggatatacgccatttctcacagagagatgctctgtctctgcagtttgaaccagtactactacctacttctacaacaaactttacaaaaattgcttcttttacctgcaaagcagctacatcatgtgacagtggaattatagaagatgtgaagaaaacaacacacactccaacactaaaagcatgcctcttctcttctgtggctcaggggtattttagaatggactcttctgcaacccagtttcacatagagactcatgagaacacatcaggactttggtcaatatggtaccgcaaccattttgaccgtagtgttgtattaaatgatgtgtttctttccaaggagaccaagcacatgttaaagattctgaatttcactggccctttatttctacctccaggctgttggaatatattttctttgaaacttgctgttaaagacattgccataaatctattcaccaatgtatttttgactacaaacataggtgccatttttgcaatacctctacagatttattcagcaccaaccaaggaagggagtctgggttttgaagtgatagcacattgtggcatgcattatttcatgggaaaatcaaaagcaggaaatcctaattggaatgggagcctttctctggatcaatctacctggaatgtggattctgaacttgcaaataaattgtatgaaagatggaagaaatataaaaatggtgacgtctgcaagaggaatgttttgggaacaactcgatttgctcacttgaagaaatccaaggagtcagagtcctttgttttctttttgcctcgtttgatcgcagagcctggcctcatgttaaacttcagcgcaactgcccttaggagcaggatgatcaagtactttgtggtgcagaacccgtcctcttggccggtctccttgcagctcctgcctctctccttgtaccctaaacccgaagccctagtgcacctgctccacagatggtttggcactgatatgcagatgattaatttcacaactggtgaattccagctcaccgaagcttgcccttacctgggtacgcattctgaggaatccaggtttggcatcctccacttacatctgcagcctttggaaatgaaaagggttggcgtagttttcacacctgctgactatggaaaagttacctcactcatactaatccggaataacttgactgttattgacatgattggcgtggaaggatttggagcaagagagttattaaaagtgggtggaagacttcctggtgcaggaggctcactccgatttaaggtgcccgagtccacgctgatggactgccgtagacaactgaaagacagtaagcaaattttatctattacaaagaactttaaagttgagaatattggacctcttcctataactgtttcgtctctgaaaattaatgggtataactgccaaggttatggattcgaggtgctggattgtcatcagttttccctggacccaaacacatcccgcgatatcagcattgtgttcactccagactttacctcctcctgggtaattcgggacctaagtcttgtaaccgcagcggacctagaatttcgcttcactctcaatgtgactctccctcatcacctgttgcccttgtgtgcagacgtggttccaggacccagctgggaggagtcattttggaggctcacggtcttctttgtcagtttgtccctgttgggtgtgattttaatagccttccaacaagcacagtacattctcatggaattcatgaaaacaagacagaggcaaaatgctagctcctcttcacagcaaaacaatggtcctatggatgtaatcagcccccattcttacaaaagcaattgcaagaactttctcgatacatatggcccctctgataaaggcagggggaagaactgccttccagtgaacactccccaaagcaggatccagaatgctgcaaagaggagcccagccacctatggtcattctcagaagaagcacaaatgctcagtgtattacagtaaacacaaaaccagcacagctgcggccagcagcaccagcacgactactgaggaaaaacagacttcacccctgggcagctcactgcctgctgctaaagaggacatttgcactgatgccatgcgtgagaactggatcagcctcagatatgcaagtggcataaatgtcaacctgcagaagaatttaacccttcccaaaaacttactgaataaagaagaaaacacactgaaaaacacaattgttttcagtaatccttcttcagaatgtagtatgaaggagggaatacagacatgtatgtttcctaaggaaactgacattaaaacttcagagaacacagccgagttcaaggaacgggagctctgtccactgaagacctccaagaaactacctgaaaaccatttaccaagaaactcacctcagtaccaccagccagacttgccagaaatttccaggaaaaataatgggaataaccagcaagtacctgtcaagaatgaagtagatcattgtgaaaatttgaagaaggtggacacaaagccttcttcagaaaagaagattcacaaaacatctagagaagacatgttttctgagaaacaggacatacctttcgtagagcaagaagatccttataggaagaaaaagcttcaggagaaaagagaaggaaatttacaaaatttaaattggagtaaaagtcgaacatgtagaaagaacaagaaaaggggtgttgctccagtctcaaggcctcctgaacagagtgatctaaagcttgtgtgcagtgactttgagaggtctgagctgagcagtgacatcaatgtaagaagctggtgtatacaggaaagcactagggaggtttgtaaagcagatgccgaaattgcaagcagtttacctgctgcccagagagaggcagaaggttactaccagaagcctgagaagaaatgtgtggacaagttctgctccgattccagctctgactgtgggagctcctctggcagcgtgcgtgccagccggggcagctgggggagctggagcagcaccagcagctccgacggggataagaagcccatggtggacgcccagcacttcctgccggccggagacagtgtttcacaaaatgattttccttctgaagctcccatctccttgaatctttctcataacatctgcaatcccatgaccgtgaatagtctcccacaatacgcagagccttcctgtcccagccttcctgccgggcccacaggtgttgaagaagataaaggtctttactcacctggagacctgtggcccactccgccagtgtgtgtgacaagcagcttaaactgcaccctggagaacggcgtgccttgtgtgattcaggagtcggccccggttcataatagtttcattgattggagtgcaacatgcgaaggccagttttccagcgcatactgtccattggaattgaacgattacaatgcctttccagaagaaaacatgaactatgccaatggcttcccctgtcctgcagatgttcagacagactttattgatcacaactctcagtctacctggaacaccccacccaacatgcctgctgcctggggacatgccagtttcatcagctctccgccctacctcacaagcacccgaagcttgtctccaatgtctggactttttggttccatctgggccccgcaaagcgatgtgtatgaaaattgctgccccatcaaccccaccacggaacattcgacccacatggaaaaccaagcggtcgtgtgcaaggaatactacccggggttcaacccgtttcgcgcctatatgaacctggacatatggactaccacagcgaataggaatgcaaatttcccactgtctagagactcgagttactgtgggaatgtgtgaaaataattggatttttaaacaatgtgaataaagaggcttgtgttttgattactagtgtaaactggttattgagatagattatgacattggtggatattttggcacttttatatgaaaataaattttttaatgaaaaaaaaaaaaaaaaa

SEQ ID NO: 2713 - DNA, 2065 bp, Homo sapiens
gctgagaagagttttgcacgtggatcgccgttcgggtgggcgagatggagacagcccccaagccgggcaaggatgtcccgcccaagaaagacaaacttcagaccaagagaaagaaaccgcggcgatactgggaggaagagaccgttccgaccacagccggagcctctccagggcctcctcgtaacaagaagaatcgggagctccgtcctcagagaccaaaaaatgcttacatcttaaagaagtctcggatctctaagaagcctcaggtcccgaagaaaccccgagaatggaagaacccggagtcccagcgcggcttgtccggggcccaagatccattcccaggccccgcccccgtccctgtggaagtggtccagaagttctgtcgcattgacaaatcccgaaagctaccacattctaaagccaaaactcgaagccgacttgaggtggctgaagctgaggaagaggaaacaagtatcaaagctgctcgttctgagctgctgcttgctgaagaacctgggtttctggaaggggaggatggggaagacacagcaaagatatgccaggctgacattgtggaggctgtggacattgcaagtgcagccaagcactttgacttgaatctgcggcagtttggaccctacagactaaactactctcgaactggaagacacctggcttttggagggcgccgaggtcatgtggctgcccttgattgggtaacaaagaagcttatgtgcgagatcaacgtcatggaggcggtgcgggacatccggtttctccattctgaggcactgcttgctgttgctcagaaccgctggctccacatctatgacaatcagggcattgagctccactgtatccgccgctgtgaccgagtaacacggcttgagttcctgcccttccacttcctcctggctacagcttcagaaacagggtttctaacctacctggatgtgtcagtggggaagattgtggcagctctgaatgctcgagctgggcggctcgatgttatgagtcagaacccttacaatgccgtcatccatctcggacacagcaatggtactgtgtctttatggagtccagctatgaaggagccactggcaaagattctctgtcatcgtggtggggtccgggctgtggcagtagattctacaggcacgtacatggccacctctggcctagaccaccagctgaagatctttgacttgcgagggacgtaccagcctctgagcactcggaccctgccccatggagcagggcacctggccttctcccagaggggactgctggtggcgggaatgggtgacgttgtcaacatctgggcagggcagggcaaggccagcccaccctcccttgaacagccctacctcacccaccggctctcaggccctgtgcatggccttcagttctgcccctttgaagatgtgctgggggtggggcacactgggggcatcaccagcatgctggtccctggggccggtgagcccaacttcgatggcctggagagtaatccatacagaagccggaagcagcgccaggagtgggaggtgaaggccctgctagagaaggtacctgcagagcttatttgtctggacccacgagccctggccgaggtggatgtcatctccctggagcagggaaagaaggagcagatagagaggctgggctatgacccgcaggctaaggctcccttccagccaaagccaaagcagaagggccgcagctccacggcaagcctggtgaagaggaagaggaaggtcatggatgaggaacacagggacaaggtccggcagagccttcagcagcagcatcataaggaggcgaaggccaagcccacgggggcccggccatctgccctggacagatttgtgcgctgagccagactccagggttgcctgggaacagtctctccccaagatcacctgtagggaaatgagtgttccctggaacaaggaggtgggggcagtgtggccccttccccaactgggggtggacagctgtctcctggggtgggttggtattaaagaggaaagcgattttttggaaaaaaaaaaaaaaaaaaaaa

SEQ ID NO: 2714 - DNA, 3017 bp, Homo sapiens
gaatggtgtgtgctgtgctatccaggaacacatttattatcattatcaagtattgtgtactgtacagaatgatgtgtgctgtgctatccaggaacacatttattatcattatcaagtattgtgtactgtacagaatgatgtgcgctgtgctatccaggaacacatttattatcattatcaagtattgtgtactgtacagaatggtgtgcgctgtgctatccaggaacacatttattatcattatcaagtattgtgtactgtacagaatggtgtgcgctgtgctatccaggaacacatttattatcattatcaagtattgtgtactgtacagaatggtgtgcgctgtgctatccaggaacacatttattatcattatcaagtattgtgtactgtacagaatggtgtgcgctgtgcttttatgcaagtggcagcacagtagctttacacgagcatcactagacacatgagtagcattgcactcggcaacaggaattttttcaggcccattattataatcttatgggaccgcatcctatatgcagtttgtcattgaccaaaatgtccttatgcgatgcatgactatatttgcaaaggactagtatctagaatacatttaaaagtcttaaaatagtaacaaaacaaagaatgcaattagaacatgagcaaaagatacaaagcaacatttcactggagaagatatacagattgcaaataagcacatgaaaagatgtttgataccattagggaaacgcttctttaaaccaggagatatcaccacgtgttagaatcaacaaaataaggccaggcatggtggctcacacctgtaatcccaacactttgggaggctggggcaggcagatcacatgagatcaggaattcaagaccaacctggccaacatggcaaaaccctgtctctgctgaaaacacaaaaattagccaggtgtggtggcacacgcctgtagtcctagcaccttgggaggctgaggcaagataattgcttaaacccaggagacggaggttgcagtaagctgagatcatgccactgcgctccagcctgggcgacagagcaagattatgtctcaaaaaaaaaaaaaaaaaaaagaatcaccaaaataaaaaatagtaacaatactattgtcaaggatgcaaaggaactgtaccactcaatcactgctgtgagaatttaaagtggtgcagccactctgggaaacagcttggctgtttttttttatgactgaatgtgcaactactatatgatgcagtaatttcatttttgcacatttatcccggagaaatgaaaacatatattcacacaaaacctgtatatgaatgctaataaaagtcaattggccaggtgtggtggctcatgcctgtaatcccagcactttgggaggctgaggcagtggatcacctgaggtcaggagtttgagaccagcctggccaacgtggtgaaaactcgtctctactaaaaatacagcaattagctgggtgtaatagtagccacctgtaatcccagctactggggaggctgaagcagaagaacctcttgaacccgggaggcagaggttgcagtgagctgagatcgtaccactgcactccagcctgggcgatagagtgagactctgtctcaaaaaataaaataaaataaataaaaagattagataatctgcaaagttcctgtgagcgctgtcattttgtcactctggtttttcagattcttcccctggaggctggagtttccaggatgtcaagattacctctgcttgggtgagctatttcaagcagctgggatacctgtgtcactcctgctgtctgccagtgactgcccaggtgtctgctggttcctccccaggagtagggaggaaccaggtgggctggctgggatgggtggatatttaaagaccaggccttggacgctgcagcacttctatctctgcttgatgcctgctgccacgtggctggtcctcctcctcctgctgtggctgagccttggggtgaagacagctgctcccaaccccagaacctttgctgtcttgggacggatcaccgctgcaagaggggaagttgctactgtgatgaattctgccatgtggcaccagactgccacccagaccacagtgtcctctgcaaccccggtaactcacatacaggcccgattccacctacagcaaagctggatgcgatggctggcagaggcaaaccctttgcctgcactgcaggccaaagccgggatgtggcctagatggttcctaaggtccctgacaatcctgagatcttgcatcttgtctatttcaggtcaaaggtgcctacatgctccctctagctttgtttccctgatgttccttgccacctgctactcctctctgagctacttttccaggttccacagggagaggttcagctgtccgtggtagacatgagggtagagaatgaggtggttgggttccacttacctttctatcatcttgcagtatggatgtctcttgactggtaccgtgtagacttttgagggcacacaggagtctgcagagagatactggggacattgagcagcagcagtggggttgggaggcagaaatgaggacaggaacatttaccttgtgtttctctcagcttctcagatgaccaagatggtgctgcagatggtgctgaggatggagaacccaccaagccccgctaggagccacctagactggatgcagagcatggttcagcgagttctccaaaccagcctcccaggaatgccattcaccatggctgtgaggagaataaagaagagagcctgactcctctcctgaggccccttccccaccctgagccagcaggatccacggagcagaggtcatctgtccccagcttggcccactgaggccagcatggctgggcccaggatgcttgtctctcagctcccatcctgtgtacttccacattggtttaaccagaggaaaaccgaaatctacaattgtcataaacacatttaaatgtgcgtagaatcagccatacaaattgtgaaacat

SEQ ID NO: 2715 - DNA, 3157 bp, Homo sapiens
cccttccctcccacagctacccacaaaggcagtgctattggcacccccattggacagagcaggagccgtcttggggtcaggtgacctgcccaaagtcactgctagggaaggacagtgccagggttcaggcccagcaaggtgaccccacggcccccgagccgtccatctggcacccagcaggttgctggagtcacctgctcccgccgggctcgttttcggttcacctgcgagccctggagtcccttttcccggccctgtggtggcttcttgcagatgccatttaagggcttgcatcagccctgggtcaggcagccgcagaagaccagggcagtaacgggcaaactgcctaagagcagagtgtggtccagctagtggggagctgcgaggatcctgcaggaaagagccactcttgccccttcccatccgttttggcattgaccacttccgggggcctcccctggccactgtccccaaggccccctttccccagtgctgccctagaacaagcactttggcttccccaggtggtgggccccttggaagtatccttgggagggtttgtggaaaagagcccaggagtgcctgcagatcccgccctggactccattttcccgtagtcctggtgctggagtttgtgtccactttcgccagctgattgcctggggagggatccgcatggtgtcctcatactgacgtgggttttgcggctctccccgcaggccgacgcctccccccagggtcagctgcgggctcccaggcctaggcgcccatgacccctacgccaacagccgcctggacaccgccgccgccactgcgacctagcgccgccgccgccggggcccaatgccggtcatgcccattccgcggcgggtgcgctccttccacggcccgcacaccacctgcctgcatgcggcctgcgggcccgtgcgcgcctcccacctggcccgcaccaagtacaacaacttcgacgtgtacatcaagacgcgctggctgtacggcttcatccgcttcctactctactttagctgcagcctgttcactgcggcgctctggggtgcgctggccgccctcttctgcctacagtacctgggcgttcgcgtcctgctgcgcttccagcgcaagctgtcggtgctgctgctgctgctgggccgccggcgcgtggacttccgcctggtgaacgagctgctcgtctatggcatccacgtcaccatgctgctggtcgggggcctgggctggtgcttcatggtcttcgtggacatgtgagggccgtgggtgcgagcttgatgtatcgtcccggcctgtggctgtgttctctccatgggtggggtcggccagcgccttcccttcgcccatcccccaggcagtcgctgctgcccggcgcccacggagagaaaagaaagggctgagacttctgtgatgggggcgcggacaccacccctaggctggcttcctggacccaccctccccgtatgcactctcaggggcagcgcccacctgccggtggctcctgctcacatgtcttcgggtcgtactgcggggtgggccctccgttccgcctctctgtgggcctctctccaggaccacagctgccagggactttagacatcaccctgggaggcccctggacacagagggctgtgtgcccaggagcaattccggaggggggccctcctggctgcacagccccttctgcgtgccctggccccagccccagccaacgggacacggaaggctcccctcgctgacacaccacactgccacaaagctgcttactctgccctgggccgcctgaggcctggcactgcccgcggaccaccctgtgtgtgtcatcctgaggggctgtgtgggtcctgagtccccagccagccttcagggtccccttggattgtgtagatgcagtctagcggggggccggagaagggctcaggtgggaggggcctcagcaggctcccagctcaggggctggcctggggggaaccctgggagccaggggctgactccagcaacactggcctgtctgcctgttctgggagggctgtgaggatgtcttgcagatgctctggatttctgcggaggcacctccattcctttctggctttttttgcgggggagggctttgggcctctttctttgagggaacaccgtcaaagaaagcctgggagatcgaggcttcagtgagccaggatggaaacgcgtgtcccaagtgtccggagcaggcggcagaggcctcagtgcggcaaacacagccccagagcctgtgtggcaccagcagcatcttagagccccaggtatatgctgagatcttatctcacgctgtcctccagtgtctggggggcccaaatgatggcacaggggcaggtgggctggaggggcgcagatgcctgtgttcagggagggtggccaccatgggccgaggtctcacccaggaccccttgctctgctcctcagccttgcagtcacggcagcactatggtggactgcccatggccgtgtgactttgggggcaagtgggagggcgccctgaataatgattgcaaggacaacaggcagaggctaccctagagcaggacacagggtgtggtactgacaaccctagtgtcacctcaaatccatgtccccacactctgggcatgggtgggacttgtgaccctaccctgtcaggcggaccagtggcccaggagccatgaggacagttgtgtgccactggaagagaaactttttgaaaaaccctaaatcaggtagagaaagcaaaaaatctctggccgtaaaccgtgctctctaatttatcggcagcttctgtggatgacctctgatgagcccgggctgcgtccacgccctgggcaggtaggcgggagcttccctgcgtgggcctcatttcttgctgcagagaatcttttgcactaagtcatgctgtttcctcaaagaagctttgttttttgttaacgtattactcagagtcacccaagcctcttggctgagggtgaaggtgggacgggaggcgggagggggctggtggtgccgctcgtgcggtgtcaacgctgcagggagttgtggcaccttggtgccctctgagcacctggccgcctgctgtccccggtgcctgtgaaattcgtcatgccatgacccacctgcattaaacctatttttttaatgtgtt

SEQ ID NO: 2716 - DNA, 2960 bp, Homo sapiens
ccctgcgcacggagccccgagggacaggggcacccgcaggcccggcccctagcaccgccggccggccccgaggtccgggacgccggcgccgccgcggagagggcaccgggtgagctgcggtcggggacccggcctaggcgggggccgtctccagggcaacgcgcggcgcgggacccggaagtggctccggcaggggctctgcagccagggggcccggcgcggcgcggcgcaggcccggtgctcacgcggagttggccggggcccgttgcgtctctgcggccccgaggaaacagtcctgggtccatgggccgggccgagcgggcgtctgcagaaacgcagggacccggatggagccgcgggccgcgagaccctgcggggacacagctccgccgagtcgcgtttgagtggcaccgccatggccggggtcccggccggggcgagctccaggccaaggccggccttaaatagggccgctctggcccctgcaccccgtggaggagccgggcggagggagagggcgaggccgacgcctccccccagggtcagctgcgggctcccaggcctaggcgcccatgacccctacgccaacagccgcctggacaccgccgccgccactgcgacctagcgccgccgccgccggggcccaatgccggtcatgcccattccgcggcgggtgcgctccttccacggcccgcacaccacctgcctgcatgcggcctgcgggcccgtgcgcgcctcccacctggcccgcaccaagtacaacaacttcgacgtgtacatcaagacgcgctggctgtacggcttcatccgcttcctactctactttagctgcagcctgttcactgcggcgctctggggtgcgctggccgccctcttctgcctacagtacctgggcgttcgcgtcctgctgcgcttccagcgcaagctgtcggtgctgctgctgctgctgggccgccggcgcgtggacttccgcctggtgaacgagctgctcgtctatggcatccacgtcaccatgctgctggtcgggggcctgggctggtgcttcatggtcttcgtggacatgtgagggccgtgggtgcgagcttgatgtatcgtcccggcctgtggctgtgttctctccatgggtggggtcggccagcgccttcccttcgcccatcccccaggcagtcgctgctgcccggcgcccacggagagaaaagaaagggctgagacttctgtgatgggggcgcggacaccacccctaggctggcttcctggacccaccctccccgtatgcactctcaggggcagcgcccacctgccggtggctcctgctcacatgtcttcgggtcgtactgcggggtgggccctccgttccgcctctctgtgggcctctctccaggaccacagctgccagggactttagacatcaccctgggaggcccctggacacagagggctgtgtgcccaggagcaattccggaggggggccctcctggctgcacagccccttctgcgtgccctggccccagccccagccaacgggacacggaaggctcccctcgctgacacaccacactgccacaaagctgcttactctgccctgggccgcctgaggcctggcactgcccgcggaccaccctgtgtgtgtcatcctgaggggctgtgtgggtcctgagtccccagccagccttcagggtccccttggattgtgtagatgcagtctagcggggggccggagaagggctcaggtgggaggggcctcagcaggctcccagctcaggggctggcctggggggaaccctgggagccaggggctgactccagcaacactggcctgtctgcctgttctgggagggctgtgaggatgtcttgcagatgctctggatttctgcggaggcacctccattcctttctggctttttttgcgggggagggctttgggcctctttctttgagggaacaccgtcaaagaaagcctgggagatcgaggcttcagtgagccaggatggaaacgcgtgtcccaagtgtccggagcaggcggcagaggcctcagtgcggcaaacacagccccagagcctgtgtggcaccagcagcatcttagagccccaggtatatgctgagatcttatctcacgctgtcctccagtgtctggggggcccaaatgatggcacaggggcaggtgggctggaggggcgcagatgcctgtgttcagggagggtggccaccatgggccgaggtctcacccaggaccccttgctctgctcctcagccttgcagtcacggcagcactatggtggactgcccatggccgtgtgactttgggggcaagtgggagggcgccctgaataatgattgcaaggacaacaggcagaggctaccctagagcaggacacagggtgtggtactgacaaccctagtgtcacctcaaatccatgtccccacactctgggcatgggtgggacttgtgaccctaccctgtcaggcggaccagtggcccaggagccatgaggacagttgtgtgccactggaagagaaactttttgaaaaaccctaaatcaggtagagaaagcaaaaaatctctggccgtaaaccgtgctctctaatttatcggcagcttctgtggatgacctctgatgagcccgggctgcgtccacgccctgggcaggtaggcgggagcttccctgcgtgggcctcatttcttgctgcagagaatcttttgcactaagtcatgctgtttcctcaaagaagctttgttttttgttaacgtattactcagagtcacccaagcctcttggctgagggtgaaggtgggacgggaggcgggagggggctggtggtgccgctcgtgcggtgtcaacgctgcagggagttgtggcaccttggtgccctctgagcacctggccgcctgctgtccccggtgcctgtgaaattcgtcatgccatgacccacctgcattaaacctatttttttaatgtgtt

SEQ ID NO: 2717 - DNA, 2811 bp, Homo sapiens
cgacgagtccgggacgcccagcgcgggcccggagcagggggaagggaagtgcggctcggtcggcgcgggtggagggggcgtgaggccgccctacggtggccgtcgagggacggcgctacggctcccacgctaggccaaacgcctccggcggccgcgcccgagagccccttcacctgcagggcgaccccagccggcgacgcgtgaaccacgccctcagccgccttgccagcgcccccagccgcgcgccccagcaccatgcggccgccctgcgcacggagccccgagggacaggggcacccgcaggcccggcccctagcaccgccggccggccccgaggtccgggacgccggcgccgccgcggagagggcaccgggccgacgcctccccccagggtcagctgcgggctcccaggcctaggcgcccatgacccctacgccaacagccgcctggacaccgccgccgccactgcgacctagcgccgccgccgccggggcccaatgccggtcatgcccattccgcggcgggtgcgctccttccacggcccgcacaccacctgcctgcatgcggcctgcgggcccgtgcgcgcctcccacctggcccgcaccaagtacaacaacttcgacgtgtacatcaagacgcgctggctgtacggcttcatccgcttcctactctactttagctgcagcctgttcactgcggcgctctggggtgcgctggccgccctcttctgcctacagtacctgggcgttcgcgtcctgctgcgcttccagcgcaagctgtcggtgctgctgctgctgctgggccgccggcgcgtggacttccgcctggtgaacgagctgctcgtctatggcatccacgtcaccatgctgctggtcgggggcctgggctggtgcttcatggtcttcgtggacatgtgagggccgtgggtgcgagcttgatgtatcgtcccggcctgtggctgtgttctctccatgggtggggtcggccagcgccttcccttcgcccatcccccaggcagtcgctgctgcccggcgcccacggagagaaaagaaagggctgagacttctgtgatgggggcgcggacaccacccctaggctggcttcctggacccaccctccccgtatgcactctcaggggcagcgcccacctgccggtggctcctgctcacatgtcttcgggtcgtactgcggggtgggccctccgttccgcctctctgtgggcctctctccaggaccacagctgccagggactttagacatcaccctgggaggcccctggacacagagggctgtgtgcccaggagcaattccggaggggggccctcctggctgcacagccccttctgcgtgccctggccccagccccagccaacgggacacggaaggctcccctcgctgacacaccacactgccacaaagctgcttactctgccctgggccgcctgaggcctggcactgcccgcggaccaccctgtgtgtgtcatcctgaggggctgtgtgggtcctgagtccccagccagccttcagggtccccttggattgtgtagatgcagtctagcggggggccggagaagggctcaggtgggaggggcctcagcaggctcccagctcaggggctggcctggggggaaccctgggagccaggggctgactccagcaacactggcctgtctgcctgttctgggagggctgtgaggatgtcttgcagatgctctggatttctgcggaggcacctccattcctttctggctttttttgcgggggagggctttgggcctctttctttgagggaacaccgtcaaagaaagcctgggagatcgaggcttcagtgagccaggatggaaacgcgtgtcccaagtgtccggagcaggcggcagaggcctcagtgcggcaaacacagccccagagcctgtgtggcaccagcagcatcttagagccccaggtatatgctgagatcttatctcacgctgtcctccagtgtctggggggcccaaatgatggcacaggggcaggtgggctggaggggcgcagatgcctgtgttcagggagggtggccaccatgggccgaggtctcacccaggaccccttgctctgctcctcagccttgcagtcacggcagcactatggtggactgcccatggccgtgtgactttgggggcaagtgggagggcgccctgaataatgattgcaaggacaacaggcagaggctaccctagagcaggacacagggtgtggtactgacaaccctagtgtcacctcaaatccatgtccccacactctgggcatgggtgggacttgtgaccctaccctgtcaggcggaccagtggcccaggagccatgaggacagttgtgtgccactggaagagaaactttttgaaaaaccctaaatcaggtagagaaagcaaaaaatctctggccgtaaaccgtgctctctaatttatcggcagcttctgtggatgacctctgatgagcccgggctgcgtccacgccctgggcaggtaggcgggagcttccctgcgtgggcctcatttcttgctgcagagaatcttttgcactaagtcatgctgtttcctcaaagaagctttgttttttgttaacgtattactcagagtcacccaagcctcttggctgagggtgaaggtgggacgggaggcgggagggggctggtggtgccgctcgtgcggtgtcaacgctgcagggagttgtggcaccttggtgccctctgagcacctggccgcctgctgtccccggtgcctgtgaaattcgtcatgccatgacccacctgcattaaacctatttttttaatgtgtt

SEQ ID NO: 2718 - DNA, 2307 bp, Homo sapiens
cgacgagtccgggacgcccagcgcgggcccggagcagggggaagggaagtgcggctcggtcggcgcgggtggagggggcgtgaggccgccctacggtggccgtcgagggacggcgctacggctcccacgctaggccaaacgcctccggcggccgcgcccgagagccccttcacctgcagggcgaccccagccggcgacgcgtgaaccacgccctcagccgccttgccagcgcccccagccgcgcgccccagcaccatgcggccgccctgcgcacggagccccgagggacaggggcacccgcaggcccggcccctagcaccgccggccggccccgaggtccgggacgccggcgccgccgcggagagggcaccgggccgacgcctccccccagggtcagctgcgggctcccaggcctaggcgcccatgacccctacgccaacagccgcctggacaccgccgccgccactgcgacctagcgccgccgccgccggggcccaatgccggtcatgcccattccgcggcgggtgcgctccttccacggcccgcacaccacctgcctgcatgcggcctgcgggcccgtgcgcgcctcccacctggcccgcaccaagtacaacaacttcgacgtgtacatcaagacgcgctggctgtacggcttcatccgcttcctactctactttagctgcagcctgttcactgcggcgctctggggtgcgctggccgccctcttctgcctacagtacctgggcgttcgcgtcctgctgcgcttccagcgcaagctgtcggtgctgctgctgctgctgggccgccggcgcgtggacttccgcctggtgaacgagctgctcgtctatggcatccacgtcaccatgctgctggtcgggggcctgggctggtgcttcatggtcttcgtggacatgtgagggccgtgggtgcgagcttgatgtatcgtcccggcctgtggctgtgttctctccatgggtggggtcggccagcgccttcccttcgcccatcccccaggcagtcgctgctgcccggcgcccacggagagaaaagaaagggctgagacttctgtgatgggggcgcggacaccacccctaggctggcttcctggacccaccctccccgtatgcactctcaggggcagcgcccacctgccggtggctcctgctcacatgtcttcgggtcgtactgcggggtgggccctccgttccgcctctctgtgggcctctctccaggaccacagctgccagggactttagacatcaccctgggaggcccctggacacagagggctgtgtgcccaggagcaattccggaggggggccctcctggctgcacagccccttctgcgtgccctggccccagccccagccaacgggacacggaaggctcccctcgctgacacaccacactgccacaaagctgcttactctgccctgggccgcctgaggcctggcactgcccgcggaccaccctgtgtgtgtcatcctgaggggctgtgtgggtcctgagtccccagccagccttcagggtccccttggattgtgtagatgcagtctagcggggggccggagaagggctcaggtgggaggggcctcagcaggctcccagctcaggggctggcctggggggaaccctgggagccaggggctgactccagcaacactggcctgtctgcctgttctgggagggctgtgaggatgtcttgcagatgctctggatttctgcggaggcacctccattcctttctggctttttttgcgggggagggctttgggcctctttctttgagggaacaccgtcaaagaaagcctgggagatcgaggcttcagtgagccaggatggaaacgcgtgtcccaagtgtccggagcaggcggcagaggcctcagtgcggcaaacacagccccagagcctgtgtggcaccagcagcatcttagagccccagcttctgtggatgacctctgatgagcccgggctgcgtccacgccctgggcaggtaggcgggagcttccctgcgtgggcctcatttcttgctgcagagaatcttttgcactaagtcatgctgtttcctcaaagaagctttgttttttgttaacgtattactcagagtcacccaagcctcttggctgagggtgaaggtgggacgggaggcgggagggggctggtggtgccgctcgtgcggtgtcaacgctgcagggagttgtggcaccttggtgccctctgagcacctggccgcctgctgtccccggtgcctgtgaaattcgtcatgccatgacccacctgcattaaacctatttttttaatgtgttg

SEQ ID NO: 2719 - DNA, 2295 bp, Homo sapiens
cgacgagtccgggacgcccagcgcgggcccggagcagggggaagggaagtgcggctcggtcggcgcgggtggagggggcgtgaggccgccctacggtggccgtcgagggacggcgctacggctcccacgctaggccaaacgcctccggcggccgcgcccgagagccccttcacctgcagggcgaccccagccggcgacgcgtgaaccacgccctcagccgccttgccagcgcccccagccgcgcgccccagcaccatgcggccgccctgcgcacggagccccgagggacaggggcacccgcaggcccggcccctagcaccgccggccggccccgaggtccgggacgccggcgccgccgcggagagggcaccgggccgacgcctccccccagggtcagctgcgggctcccaggcctaggcgcccatgacccctacgccaacagccgcctggacaccgccgccgccactgcgacctagcgccgccgccgccggggcccaatgccggtcatgcccattccgcggcgggtgcgctccttccacggcccgcacaccacctgcctgcatgcggcctgcgggcccgtgcgcgcctcccacctggcccgcaccaagtacaacaacttcgacgtgtacatcaagacgcgctggctgtacggcttcatccgcttcctactctactttagctgcagcctgttcactgcggcgctctggggtgcgctggccgccctcttctgcctacagtacctgggcgttcgcgtcctgctgcgcttccagcgcaagctgtcggtgctgctgctgctgctgggccgccggcgcgtggacttccgcctggtgaacgagctgctcgtctatggcatccacgtcaccatgctgctggtcgggggcctgggctggtgcttcatggtcttcgtggacatgtgagggccgtgggtgcgagcttgatgtatcgtcccggcctgtggctgtgttctctccatgggtggggtcggccagcgccttcccttcgcccatcccccaggcagtcgctgctgcccggcgcccacggagagaaaagaaagggctgagacttctgtgatgggggcgcggacaccacccctaggctggcttcctggacccaccctccccgtatgcactctcaggggcagcgcccacctgccggtggctcctgctcacatgtcttcgggtcgtactgcggggtgggccctccgttccgcctctctgtgggcctctctccaggaccacagctgccagggactttagacatcaccctgggaggcccctggacacagagggctgtgtgcccaggagcaattccggaggggggccctcctggctgcacagccccttctgcgtgccctggccccagccccagccaacgggacacggaaggctcccctcgctgacacaccagcagcatcttagagccccaggtatatgctgagatcttatctcacgctgtcctccagtgtctggggggcccaaatgatggcacaggggcaggtgggctggaggggcgcagatgcctgtgttcagggagggtggccaccatgggccgaggtctcacccaggaccccttgctctgctcctcagccttgcagtcacggcagcactatggtggactgcccatggccgtgtgactttgggggcaagtgggagggcgccctgaataatgattgcaaggacaacaggcagaggctaccctagagcaggacacagggtgtggtactgacaaccctagtgtcacctcaaatccatgtccccacactctgggcatgggtgggacttgtgaccctaccctgtcaggcggaccagtggcccaggagccatgaggacagttgtgtgccactggaagagaaactttttgaaaaaccctaaatcaggtagagaaagcaaaaaatctctggccgtaaaccgtgctctctaatttatcggcagcttctgtggatgacctctgatgagcccgggctgcgtccacgccctgggcaggtaggcgggagcttccctgcgtgggcctcatttcttgctgcagagaatcttttgcactaagtcatgctgtttcctcaaagaagctttgttttttgttaacgtattactcagagtcacccaagcctcttggctgagggtgaaggtgggacgggaggcgggagggggctggtggtgccgctcgtgcggtgtcaacgctgcagggagttgtggcaccttggtgccctctgagcacctggccgcctgctgtccccggtgcctgtgaaattcgtcatgccatgacccacctgcattaaacctatttttttaatgtgtt

SEQ ID NO: 2720 - DNA, 2508 bp, Homo sapiens
acgcgtgaaccacgccctcagccgccttgccagcgcccccagccgcgcgccccagcaccatgcggccgccctgcgcacggagccccagggtcagctgcgggctcccaggcctaggcgcccatgacccctacgccaacagccgcctggacaccgccgccgccactgcgacctagcgccgccgccgccggggcccaatgccggtcatgcccattccgcggcgggtgcgctccttccacggcccgcacaccacctgcctgcatgcggcctgcgggcccgtgcgcgcctcccacctggcccgcaccaagtacaacaacttcgacgtgtacatcaagacgcgctggctgtacggcttcatccgcttcctactctactttagctgcagcctgttcactgcggcgctctggggtgcgctggccgccctcttctgcctacagtacctgggcgttcgcgtcctgctgcgcttccagcgcaagctgtcggtgctgctgctgctgctgggccgccggcgcgtggacttccgcctggtgaacgagctgctcgtctatggcatccacgtcaccatgctgctggtcgggggcctgggctggtgcttcatggtcttcgtggacatgtgagggccgtgggtgcgagcttgatgtatcgtcccggcctgtggctgtgttctctccatgggtggggtcggccagcgccttcccttcgcccatcccccaggcagtcgctgctgcccggcgcccacggagagaaaagaaagggctgagacttctgtgatgggggcgcggacaccacccctaggctggcttcctggacccaccctccccgtatgcactctcaggggcagcgcccacctgccggtggctcctgctcacatgtcttcgggtcgtactgcggggtgggccctccgttccgcctctctgtgggcctctctccaggaccacagctgccagggactttagacatcaccctgggaggcccctggacacagagggctgtgtgcccaggagcaattccggaggggggccctcctggctgcacagccccttctgcgtgccctggccccagccccagccaacgggacacggaaggctcccctcgctgacacaccacactgccacaaagctgcttactctgccctgggccgcctgaggcctggcactgcccgcggaccaccctgtgtgtgtcatcctgaggggctgtgtgggtcctgagtccccagccagccttcagggtccccttggattgtgtagatgcagtctagcggggggccggagaagggctcaggtgggaggggcctcagcaggctcccagctcaggggctggcctggggggaaccctgggagccaggggctgactccagcaacactggcctgtctgcctgttctgggagggctgtgaggatgtcttgcagatgctctggatttctgcggaggcacctccattcctttctggctttttttgcgggggagggctttgggcctctttctttgagggaacaccgtcaaagaaagcctgggagatcgaggcttcagtgagccaggatggaaacgcgtgtcccaagtgtccggagcaggcggcagaggcctcagtgcggcaaacacagccccagagcctgtgtggcaccagcagcatcttagagccccaggtatatgctgagatcttatctcacgctgtcctccagtgtctggggggcccaaatgatggcacaggggcaggtgggctggaggggcgcagatgcctgtgttcagggagggtggccaccatgggccgaggtctcacccaggaccccttgctctgctcctcagccttgcagtcacggcagcactatggtggactgcccatggccgtgtgactttgggggcaagtgggagggcgccctgaataatgattgcaaggacaacaggcagaggctaccctagagcaggacacagggtgtggtactgacaaccctagtgtcacctcaaatccatgtccccacactctgggcatgggtgggacttgtgaccctaccctgtcaggcggaccagtggcccaggagccatgaggacagttgtgtgccactggaagagaaactttttgaaaaaccctaaatcaggtagagaaagcaaaaaatctctggccgtaaaccgtgctctctaatttatcggcagcttctgtggatgacctctgatgagcccgggctgcgtccacgccctgggcaggtaggcgggagcttccctgcgtgggcctcatttcttgctgcagagaatcttttgcactaagtcatgctgtttcctcaaagaagctttgttttttgttaacgtattactcagagtcacccaagcctcttggctgagggtgaaggtgggacgggaggcgggagggggctggtggtgccgctcgtgcggtgtcaacgctgcagggagttgtggcaccttggtgccctctgagcacctggccgcctgctgtccccggtgcctgtgaaattcgtcatgccatgacccacctgcattaaacctatttttttaatgtgtt

SEQ ID NO: 2721 - DNA, 3157 bp, Homo sapiens; identical to SEQ ID NO: 2715

SEQ ID NO: 2722 - DNA, 2959 bp, Homo sapiens
ccctgcgcacggagccccgagggacaggggcacccgcaggcccggcccctagcaccgccggccggccccgaggtccgggacgccggcgccgccgcggagagggcaccgggtgagctgcggtcggggacccggcctaggcgggggccgtctccagggcaacgcgcggcgcgggacccggaagtggctccggcaggggctctgcagccagggggcccggcgcggcgcggcgcaggcccggtgctcacgcggagttggccggggcccgttgcgtctctgcggccccgaggaaacagtcctgggtccatgggccgggccgagcgggcgtctgcagaaacgcagggacccggatggagccgcgggcgcgagaccctgcggggacacagctccgccgagtcgcgtttgagtggcaccgccatggccggggtcccggccggggcgagctccaggccaaggccggccttaaatagggccgctctggcccctgcaccccgtggaggagccgggcggagggagagggcgaggccgacgcctccccccagggtcagctgcgggctcccaggcctaggcgcccatgacccctacgccaacagccgcctggacaccgccgccgccactgcgacctagcgccgccgccgccggggcccaatgccggtcatgcccattccgcggcgggtgcgctccttccacggcccgcacaccacctgcctgcatgcggcctgcgggcccgtgcgcgcctcccacctggcccgcaccaagtacaacaacttcgacgtgtacatcaagacgcgctggctgtacggcttcatccgcttcctactctactttagctgcagcctgttcactgcggcgctctggggtgcgctggccgccctcttctgcctacagtacctgggcgttcgcgtcctgctgcgcttccagcgcaagctgtcggtgctgctgctgctgctgggccgccggcgcgtggacttccgcctggtgaacgagctgctcgtctatggcatccacgtcaccatgctgctggtcgggggcctgggctggtgcttcatggtcttcgtggacatgtgagggccgtgggtgcgagcttgatgtatcgtcccggcctgtggctgtgttctctccatgggtggggtcggccagcgccttcccttcgcccatcccccaggcagtcgctgctgcccggcgcccacggagagaaaagaaagggctgagacttctgtgatgggggcgcggacaccacccctaggctggcttcctggacccaccctccccgtatgcactctcaggggcagcgcccacctgccggtggctcctgctcacatgtcttcgggtcgtactgcggggtgggccctccgttccgcctctctgtgggcctctctccaggaccacagctgccagggactttagacatcaccctgggaggcccctggacacagagggctgtgtgcccaggagcaattccggaggggggccctcctggctgcacagccccttctgcgtgccctggccccagccccagccaacgggacacggaaggctcccctcgctgacacaccacactgccacaaagctgcttactctgccctgggccgcctgaggcctggcactgcccgcggaccaccctgtgtgtgtcatcctgaggggctgtgtgggtcctgagtccccagccagccttcagggtccccttggattgtgtagatgcagtctagcggggggccggagaagggctcaggtgggaggggcctcagcaggctcccagctcaggggctggcctggggggaaccctgggagccaggggctgactccagcaacactggcctgtctgcctgttctgggagggctgtgaggatgtcttgcagatgctctggatttctgcggaggcacctccattcctttctggctttttttgcgggggagggctttgggcctctttctttgagggaacaccgtcaaagaaagcctgggagatcgaggcttcagtgagccaggatggaaacgcgtgtcccaagtgtccggagcaggcggcagaggcctcagtgcggcaaacacagccccagagcctgtgtggcaccagcagcatcttagagccccaggtatatgctgagatcttatctcacgctgtcctccagtgtctggggggcccaaatgatggcacaggggcaggtgggctggaggggcgcagatgcctgtgttcagggagggtggccaccatgggccgaggtctcacccaggaccccttgctctgctcctcagccttgcagtcacggcagcactatggtggactgcccatggccgtgtgactttgggggcaagtgggagggcgccctgaataatgattgcaaggacaacaggcagaggctaccctagagcaggacacagggtgtggtactgacaaccctagtgtcacctcaaatccatgtccccacactctgggcatgggtgggacttgtgaccctaccctgtcaggcggaccagtggcccaggagccatgaggacagttgtgtgccactggaagagaaactttttgaaaaaccctaaatcaggtagagaaagcaaaaaatctctggccgtaaaccgtgctctctaatttatcggcagcttctgtggatgacctctgatgagcccgggctgcgtccacgccctgggcaggtaggcgggagcttccctgcgtgggcctcatttcttgctgcagagaatcttttgcactaagtcatgctgtttcctcaaagaagctttgttttttgttaacgtattactcagagtcacccaagcctcttggctgagggtgaaggtgggacgggaggcgggagggggctggtggtgccgctcgtgcggtgtcaacgctgcagggagttgtggcaccttggtgccctctgagcacctggccgcctgctgtccccggtgcctgtgaaattcgtcatgccatgacccacctgcattaaacctatttttttaatgtgtt

SEQ ID NO: 2723 - DNA, 2811 bp, Homo sapiens; identical to SEQ ID NO: 2717

SEQ ID NO: 2724 - DNA, 2307 bp, Homo sapiens; identical to SEQ ID NO: 2718

SEQ ID NO: 2725 - DNA, 2295 bp, Homo sapiens; identical to SEQ ID NO: 2719

SEQ ID NO: 2726 - DNA, 2508 bp, Homo sapiens; identical to SEQ ID NO: 2720

SEQ ID NO: 2727 - DNA, 1580 bp, Homo sapiens
gcgcgaggacctgcggggcggggcgggagagaaggctgccgggaccggccctagacactgagccgcggtgggatccccaccggctctgcgaggccctgcgagcgccagggaggcgccacgagggagccgggcagccgcgggccacttcaggggggcccgcctcgccgcccgggcggtcgagagatccttgggggcacatctcggggtgcggtgacccgcccggcgcatttcgggggtcggggcgcaattgccaggggacatctggagcccggccctgcttctgtcgggctccagggtacccctggatggctgcgctgtgccctcgccggccgcccgggcgccgcagcggctgagttcgccgggatcgccgggccgccgcccttgccacccgctgcatgctcggcgcccgggtcgcggcccacctggacgcactgggccccctggtcccctacgtgccgccgccgctgctgccctctatgttctacgtgggcctgttcttcgtcaatgtgctgatcctgtactacgccttcctcatggagtacatcgtcctcaacgtgggcctcgtcttcctgcccgaggacatggaccaggcgctcgtggacctcggcgtgctctccgaccccggctcgggcctttacgatgctgactcggagctcgacgtctttgatgcgtacttggagtagggtctcgactgctgttcccctcttccctacacgatccgcaacccatgccctggaccagccgcccagatcatgccgccgcagctggttgggggcaccatctggacggggatggttccccaggaggagaccctcccctgcctccgaggcctacctgctcccctcaaaagcttcgtgccaacagagaggttcctgtttgaacccaggagagtggaagagagattgggactgagtgctgaggttgggaaggcacctgctcccacagaagggggaacgcaagaggcatcccaagacctcatctgcctgcagtgtcaaatcgatggcctggccttggcttctgattatttgcagctgcgatggatgtttacaggaacccagccagagtttgcctccctgcacttcatcccggagcgcacctgcttcccccacttcaccttcggagaggacacttcaaactgcggacacacgcaaaagcgactcccagctccgtttgatgtgagttgagccttcaggccagctgggtttagcccgaggctggtcttagatgcagcgactgtttcaggggtgactcagaagaaaaagaagctgaggaagctgttggggggctgagggtgggattctcgctccttcatttcaggttactcgttcttcagcaagttggcaaaacagacatcatgctggtgagtgccacgttactcccctggctggaaatgcttttctgaaagtatgagtgttgtgcctacttaattctgataaacctgtctaagcaatacttaggaggcttacttctttggattaaaaaaaaatgtatgcaactccaaaaaaaaaaaaaaaaaaaaaaaaaaaaaaaaaaaaaaaaaaaaaaaaaaaaaaaaaaaaaaaaaaaaaaaaaaaaaaaaa

SEQ ID NO: 2728 - DNA, 1904 bp, Homo sapiens
tttccggcggttgcaccgggccggggtgccagcgcccgccttcccgtttcctcccgttccgcagcgcgcccacggcctgtgaccccggcgaccgctccccagtgacgagagagcggggccgggcgctgctccggcctgacctgcgaagggacctcggtccagtcccctgttgcgccgcgcccccgtccgtccgtgcgcgggccagtcaggggccagtgtctcgagcggtcgaggtcgcagacctagaggcgccccacaggccggcccggggcgctgggagcgccggccgcgggccgggtggggatgcctctgcacgtgaagtggccgttccccgcggtgccgccgctcacctggaccctggccagcagcgtcgtcatgggcttggtgggcacctacagctgcttctggaccaagtacatgaaccacctgaccgtgcacaacagggaggtgctgtacgagctcatcgagaagcgaggcccggccacgcccctcatcaccgtgtccaatcaccagtcctgcatggacgaccctcatctctgggggatcctgaaactccgccacatctggaacctgaagttgatgcgttggacccctgcagctgcagacatctgcttcaccaaggagctacactcccacttcttcagcttgggcaagtgtgtgcctgtgtgccgaggagcagaatttttccaagcagagaatgaggggaaaggtgttctagacacaggcaggcacatgccaggtgctggaaaaagaagagagaaaggagatggcgtctaccagaaggggatggacttcattttggagaagctcaaccatggggactgggtgcatatcttcccagaagggaaagtgaacatgagttccgaattcctgcgtttcaagtggggaatcgggcgcctgattgctgagtgtcatctcaaccccatcatcctgcccctgtggcatgtcggaatgaatgacgtccttcctaacagtccgccctacttcccccgctttggacagaaaatcactgtgctgatcgggaagcccttcagtgccctgcctgtactcgagcggctccgggcggagaacaagtcggctgtggagatgcggaaagccctgacggacttcattcaagaggaattccagcatctgaagactcaggcagagcagctccacaaccacctccagcctgggagataggccttgcttgctgccttctggattcttggcccgcacagagctggggctgagggatggactgatgcttttagctcaaacgtggcttttagacagatttgttcatagaccctctcaagtgccctctccgagctggtaggcattccagctcctccgtgcttcctcagttacacaaaggacctcagctgcttctcccacttggccaagcagggaggaagaagcttaggcagggctctctttccttcttgccttcagatgttctctcccaggggctggcttcaggagggagcatagaaggcaggtgagcaaccagttggctaggggagcagggggcccaccagagctgtggagaggggaccctaagactcctcggcctggctcctacccaccgcccttgccgaaccaggagctgctcactacctcctcagggatggccgttggccacgtcttccttctgcctgagcttcccccccaccacaggccctttcctcaggcaaggtctggcctcaggtgggccgcaggcgggaaaagcagcccttggccagaagtcaagcccagccacgtggagcctagagtgagggcctgaggtctggctgcttgcccccatgctggcgccaacaacttctccatcctttctgcctctcaacatcacttgaatcctagggcctgggttttcatgtttttgaaacagaaccataaagcatatgtgttggcttgttgtaaaa

SEQ ID NO: 2729 - DNA, 1814 bp, Homo sapiens
tttccggcggttgcaccgggccggggtgccagcgcccgccttcccgtttcctcccgttccgcagcgcgcccacggcctgtgaccccggcgaccgctccccagtgacgagagagcggggccgggcgctgctccggcctgacctgcgaagggacctcggtccagtcccctgttgcgccgcgcccccgtccgtccgtgcgcgggccagtcaggggccagtgtctcgagcggtcgaggtcgcagacctagaggcgccccacaggccggcccggggcgctgggagcgccggccgcgggccgggtggggatgcctctgcacgtgaagtggccgttccccgcggtgccgccgctcacctggaccctggccagcagcgtcgtcatgggcttggtgggcacctacagctgcttctggaccaagtacatgaaccacctgaccgtgcacaacagggaggtgctgtacgagctcatcgagaagcgaggcccggccacgcccctcatcaccgtgtccaatcaccagtcctgcatggacgaccctcatctctgggggatcctgaaactccgccacatctggaacctgaagttgatgcgttggacccctgcagctgcagacatctgcttcaccaaggagctacactcccacttcttcagcttgggcaagtgtgtgcctgtgtgccgaggagatggcgtctaccagaaggggatggacttcattttggagaagctcaaccatggggactgggtgcatatcttcccagaagggaaagtgaacatgagttccgaattcctgcgtttcaagtggggaatcgggcgcctgattgctgagtgtcatctcaaccccatcatcctgcccctgtggcatgtcggaatgaatgacgtccttcctaacagtccgccctacttcccccgctttggacagaaaatcactgtgctgatcgggaagcccttcagtgccctgcctgtactcgagcggctccgggcggagaacaagtcggctgtggagatgcggaaagccctgacggacttcattcaagaggaattccagcatctgaagactcaggcagagcagctccacaaccacctccagcctgggagataggccttgcttgctgccttctggattcttggcccgcacagagctggggctgagggatggactgatgcttttagctcaaacgtggcttttagacagatttgttcatagaccctctcaagtgccctctccgagctggtaggcattccagctcctccgtgcttcctcagttacacaaaggacctcagctgcttctcccacttggccaagcagggaggaagaagcttaggcagggctctctttccttcttgccttcagatgttctctcccaggggctggcttcaggagggagcatagaaggcaggtgagcaaccagttggctaggggagcagggggcccaccagagctgtggagaggggaccctaagactcctcggcctggctcctacccaccgcccttgccgaaccaggagctgctcactacctcctcagggatggccgttggccacgtcttccttctgcctgagcttcccccccaccacaggccctttcctcaggcaaggtctggcctcaggtgggccgcaggcgggaaaagcagcccttggccagaagtcaagcccagccacgtggagcctagagtgagggcctgaggtctggctgcttgcccccatgctggcgccaacaacttctccatcctttctgcctctcaacatcacttgaatcctagggcctgggttttcatgtttttgaaacagaaccataaagcatatgtgttggcttgttgtaaaa

SEQ ID NO: 2730 - DNA, 1862 bp, Homo sapiens
tttccggcggttgcaccgggccggggtgccagcgcccgccttcccgtttcctcccgttccgcagcgcgcccacggcctgtgaccccggcgaccgctccccagtgacgagagagcggggccgggcgctgctccggcctgacctgcgaagggacctcggtccagtcccctgttgcgccgcgcccccgtccgtccgtgcgcgggccagtcaggggccagtgtctcgagcggtcgaggtcgcagacctagaggcgccccacaggccggcccggggcgctgggagcgccggccgcgggccgggtggggatgcctctgcacgtgaagtggccgttccccgcggtgccgccgctcacctggaccctggccagcagcgtcgtcatgggcttggtgggcacctacagctgcttctggaccaagtacatgaaccacctgaccgtgcacaacagggaggtgctgtacgagctcatcgagaagcgaggcccggccacgcccctcatcaccgtgtccaatcaccagtcctgcatggacgaccctcatctctgggggatcctgaaactccgccacatctggaacctgaagttgatgcgttggacccctgcagctgcagacatctgcttcaccaaggagctacactcccacttcttcagcttgggcaagtgtgtgcctgtgtgccgaggagcagaatttttccaagcagagaatgaggggaaaggtgttctagacacaggcaggcacatgccaggtgctggaaaaagaagagagaaaggagatggcgtctaccagaaggggatggacttcattttggagaagctcaaccatggggactgggtgcatatcttcccagaaggaatcgggcgcctgattgctgagtgtcatctcaaccccatcatcctgcccctgtggcatgtcggaatgaatgacgtccttcctaacagtccgccctacttcccccgctttggacagaaaatcactgtgctgatcgggaagcccttcagtgccctgcctgtactcgagcggctccgggcggagaacaagtcggctgtggagatgcggaaagccctgacggacttcattcaagaggaattccagcatctgaagactcaggcagagcagctccacaaccacctccagcctgggagataggccttgcttgctgccttctggattcttggcccgcacagagctggggctgagggatggactgatgcttttagctcaaacgtggcttttagacagatttgttcatagaccctctcaagtgccctctccgagctggtaggcattccagctcctccgtgcttcctcagttacacaaaggacctcagctgcttctcccacttggccaagcagggaggaagaagcttaggcagggctctctttccttcttgccttcagatgttctctcccaggggctggcttcaggagggagcatagaaggcaggtgagcaaccagttggctaggggagcagggggcccaccagagctgtggagaggggaccctaagactcctcggcctggctcctacccaccgcccttgccgaaccaggagctgctcactacctcctcagggatggccgttggccacgtcttccttctgcctgagcttcccccccaccacaggccctttcctcaggcaaggtctggcctcaggtgggccgcaggcgggaaaagcagcccttggccagaagtcaagcccagccacgtggagcctagagtgagggcctgaggtctggctgcttgcccccatgctggcgccaacaacttctccatcctttctgcctctcaacatcacttgaatcctagggcctgggttttcatgtttttgaaacagaaccataaagcatatgtgttggcttgttgtaaaa

SEQ ID NO: 2731 - DNA, 1772 bp, Homo sapiens
tttccggcggttgcaccgggccggggtgccagcgcccgccttcccgtttcctcccgttccgcagcgcgcccacggcctgtgaccccggcgaccgctccccagtgacgagagagcggggccgggcgctgctccggcctgacctgcgaagggacctcggtccagtcccctgttgcgccgcgcccccgtccgtccgtgcgcgggccagtcaggggccagtgtctcgagcggtcgaggtcgcagacctagaggcgccccacaggccggcccggggcgctgggagcgccggccgcgggccgggtggggatgcctctgcacgtgaagtggccgttccccgcggtgccgccgctcacctggaccctggccagcagcgtcgtcatgggcttggtgggcacctacagctgcttctggaccaagtacatgaaccacctgaccgtgcacaacagggaggtgctgtacgagctcatcgagaagcgaggcccggccacgcccctcatcaccgtgtccaatcaccagtcctgcatggacgaccctcatctctgggggatcctgaaactccgccacatctggaacctgaagttgatgcgttggacccctgcagctgcagacatctgcttcaccaaggagctacactcccacttcttcagcttgggcaagtgtgtgcctgtgtgccgaggagatggcgtctaccagaaggggatggacttcattttggagaagctcaaccatggggactgggtgcatatcttcccagaaggaatcgggcgcctgattgctgagtgtcatctcaaccccatcatcctgcccctgtggcatgtcggaatgaatgacgtccttcctaacagtccgccctacttcccccgctttggacagaaaatcactgtgctgatcgggaagcccttcagtgccctgcctgtactcgagcggctccgggcggagaacaagtcggctgtggagatgcggaaagccctgacggacttcattcaagaggaattccagcatctgaagactcaggcagagcagctccacaaccacctccagcctgggagataggccttgcttgctgccttctggattcttggcccgcacagagctggggctgagggatggactgatgcttttagctcaaacgtggcttttagacagatttgttcatagaccctctcaagtgccctctccgagctggtaggcattccagctcctccgtgcttcctcagttacacaaaggacctcagctgcttctcccacttggccaagcagggaggaagaagcttaggcagggctctctttccttcttgccttcagatgttctctcccaggggctggcttcaggagggagcatagaaggcaggtgagcaaccagttggctaggggagcagggggcccaccagagctgtggagaggggaccctaagactcctcggcctggctcctacccaccgcccttgccgaaccaggagctgctcactacctcctcagggatggccgttggccacgtcttccttctgcctgagcttcccccccaccacaggccctttcctcaggcaaggtctggcctcaggtgggccgcaggcgggaaaagcagcccttggccagaagtcaagcccagccacgtggagcctagagtgagggcctgaggtctggctgcttgcccccatgctggcgccaacaacttctccatcctttctgcctctcaacatcacttgaatcctagggcctgggttttcatgtttttgaaacagaaccataaagcatatgtgttggcttgttgtaaaa

SEQ ID NO: 2732 - DNA, 1934 bp, Homo sapiens
tttccggcggttgcaccgggccggggtgccagcgcccgccttcccgtttcctcccgttccgcagcgcgcccacggcctgtgaccccggcgaccgctccccagtgacgagagagcggggccgggcgctgctccggcctgacctgcgaagggacctcggtccagtcccctgttgcgccgcgcccccgtccgtccgtgcgcgggccagtcaggggccagtgtctcgagcggtcgaggtcgcagacctagaggcgccccacaggccggcccggggcgctgggagcgccggccgcgggccgggtggggatgcctctgcacgtgaagtggccgttccccgcggtgccgccgctcacctggaccctggccagcagcgtcgtcatgggcttggtgggcacctacagctgcttctggaccaagtacatgaaccacctgaccgtgcacaacagggaggtgctgtacgagctcatcgagaagcgaggcccggccacgcccctcatcaccgtgtccaatcaccagtcctgcatggacgaccctcatctctgggggatcctgaaactccgccacatctggaacctgaagttgatgcgttggtgaggaggaatgggcccctcgaagtgggccgggccggccccacctgcctctgcccagatttgccctcctcctgctctgcccaggaggtggcgtccagcagtccaggacccctgcagctgcagacatctgcttcaccaaggagctacactcccacttcttcagcttgggcaagtgtgtgcctgtgtgccgaggagatggcgtctaccagaaggggatggacttcattttggagaagctcaaccatggggactgggtgcatatcttcccagaagggaaagtgaacatgagttccgaattcctgcgtttcaagtggggaatcgggcgcctgattgctgagtgtcatctcaaccccatcatcctgcccctgtggcatgtcggaatgaatgacgtccttcctaacagtccgccctacttcccccgctttggacagaaaatcactgtgctgatcgggaagcccttcagtgccctgcctgtactcgagcggctccgggcggagaacaagtcggctgtggagatgcggaaagccctgacggacttcattcaagaggaattccagcatctgaagactcaggcagagcagctccacaaccacctccagcctgggagataggccttgcttgctgccttctggattcttggcccgcacagagctggggctgagggatggactgatgcttttagctcaaacgtggcttttagacagatttgttcatagaccctctcaagtgccctctccgagctggtaggcattccagctcctccgtgcttcctcagttacacaaaggacctcagctgcttctcccacttggccaagcagggaggaagaagcttaggcagggctctctttccttcttgccttcagatgttctctcccaggggctggcttcaggagggagcatagaaggcaggtgagcaaccagttggctaggggagcagggggcccaccagagctgtggagaggggaccctaagactcctcggcctggctcctacccaccgcccttgccgaaccaggagctgctcactacctcctcagggatggccgttggccacgtcttccttctgcctgagcttcccccccaccacaggccctttcctcaggcaaggtctggcctcaggtgggccgcaggcgggaaaagcagcccttggccagaagtcaagcccagccacgtggagcctagagtgagggcctgaggtctggctgcttgcccccatgctggcgccaacaacttctccatcctttctgcctctcaacatcacttgaatcctagggcctgggttttcatgtttttgaaacagaaccataaagcatatgtgttggcttgttgtaaaaaaaaaaaaaaaaaa

SEQ ID NO: 2733 - DNA, 702 bp, Homo sapiens
gaagcagcagctgaggagactccggtgttcaccatggccaacgaaaagcccacagaagaagtcaagactgagaacaacaatcatattaatttgaaggtggcgggacaggatggttctgtggtgcagtttaagattaagaggcagacaccacttagtaaactaatgaaagcctattgtgaaccacggggattgtcagtgaagcagatcagattccgatttggtgggcaaccaatcagtggaacagacaaacctgcacagttggaaatggaagatgaagatacaattgatgtgtttcaacagcctacgggaggtgtctactgaaaagggaacctgcttctttactccagaacgctgttctttaaagaccaagattactgcattctcaattagaaaactgcaatttggttccaccacattctgactactacagtatagttttctctattcttttgtttcccccttccacattcttttattatacatgaagtaactggtatgtgtacacaagcatattgcttttttcttcaaaccaaacagccaatggtatgttttgattgacatcaagtggagacaggatgggaaaaaatactgattctgtgaaaataccccctttatccattagtggcatgttcattcaggtcttatctttatattctagtaagttattttgctctcactgttttaacaaaaaaaaaaaaaaaa

SEQ ID NO: 2734 - DNA, 587 bp, Homo sapiens
taaatcttttctgcttactgaaaaggaagagtctgatgattagttactgatcctctttgcatttgtaaagctttggagatattgaatcatgttaccatttctgtttttttccaccctgttttcttccatatttactgaagctcagaagcagtattgggtctgcaactcatccgatgcaagtatttcatacacctactgtgataaaatgcaatacccaatttcaattaatgttaacccctgtatagaattgaaaggatccaaaggattattgcacattttctacattccaaggagagatttaaagcaattatatttcaatctctatataactgtcaacaccatgaatcttccaaagcgcaaagaagttatttgccgaggatctgatgacgattactctttttgcagagctctgaagggagagactgtgaatacaacaatatcattctccttcaagggaataaaattttctaagggaaaatacaaatgtgttgttgaagctatttctgggagcccagaagaaatgctcttttgcttggagtttgtcatcctacaccaacctaattcaaattagaataaattgagtattt

SEQ ID NO: 2735 - DNA, 9410 bp, Homo sapiens
cgccctcgagtggaggacgagaaggaaagcaccatgacgtccatccatttcgtggttcacccgctgccgggcaccgaggaccagctcaatgacaggttacgagaagtttctgagaagctgaacaaatataatttaaacagccacccccctttgaatgtattggaacaggctactattaaacagtgtgtggtgggaccaaatcatgctgcctttcttcttgaggatggtagagtttgcaggattggtttttcagtacagccagacagattggaattgggtaaacctgataataatgatgggtcaaagttgaacagcaactcgggggcagggaggacgtcaaggcctggtaggacaagcgactctccatggtttctctcaggttctgagactctaggcaggctggcaggcaacaccttaggaagccgctggagttctggagtgggtggaagtggtggaggatcctctggtaggtcatcagctggagctcgagattcccgccggcagactcgagttattcggacaggacgggatcgagggtctgggcttttgggcagtcagccccagccagttattccagcatctgtcattccagaggagctgatttcacaggcccaagttgttttacaaggcaaatccagaagtgtcattattcgagaacttcagagaacaaatcttgatgtgaaccttgctgtaaataatttacttagccgggatgatgaagatggagatgatggggatgatacagccagcgaatcttatttgcctggagaggatcttatgtctctccttgatgccgacattcattctgcccacccaagtgtcattattgatgcagatgccatgttttctgaagacattagctattttggttacccttcttttcgtcgttcatcactttccaggctaggctcatctcgagttctccttcttcccttagagagagactctgagctgttgcgtgaacgtgaatccgttttacgtttacgtgaacgaaggtggcttgatggagcctcatttgataatgaaaggggttctaccagcaaggaaggagagccaaacttggataagaagaatacacctgttcaaagtccagtatctctaggagaagatttgcagtggtggcctgataaggatggaacaaaattcatctgtattggggctctgtattctgaacttctggctgtcagcagtaaaggagaactttatcagtggaaatggagtgaatctgagccttacagaaatgcccagaatccttcattacatcatccacgagcaacatttttggggttaaccaatgaaaagatagtcctcctgtctgcaaatagcataagagcaactgtagctacagaaaataacaaggttgctacatgggtggatgaaactttaagttctgtggcttctaaattagagcacactgctcagacttactctgaacttcaaggagagcggatagtttctttacattgctgtgccctttacacctgcgctcagctggaaaacagtttatattggtggggtgtagttccttttagtcaaaggaagaaaatgttagagaaagctagagcaaaaaataaaaagcctaaatccagtgctggtatttcttcaatgccgaacatcactgttggtacccaggtatgcttgagaaataatcctctttatcatgctggagcagttgcattttcaattagtgctgggattcctaaagttggtgtcttaatggagtcagtttggaatatgaatgacagctgtagatttcaacttagatctcctgaaagcttgaaaaacatggaaaaagctagcaaaactactgaagctaagcctgaaagtaagcaggagccagtgaaaacagaaatgggtcctccaccatctccagcatccacgtgtagtgatgcatcctcaattgccagcagtgcatcaatgccatacaaacgacgacggtcaacccctgcaccaaaagaagaggaaaaggtgaatgaagagcagtggtctcttcgggaagtggtttttgtggaagatgtcaagaatgttcctgttggcaaggtgctaaaagtagatggtgcctatgttgctgtaaaatttccaggaacctccagtaatactaactgtcagaacagctctggtccagatgctgacccttcttctctcctgcaggattgtaggttacttagaattgatgaattgcaggttgtcaaaactggtggaacaccgaaggttcccgactgtttccaaaggactcctaaaaagctttgtatacctgaaaaaacagaaatattagcagtgaatgtagattccaaaggtgttcatgctgttctgaagactggaaattgggtacgatactgtatctttgatcttgctacaggaaaagcagaacaggaaaataattttcctacaagcagcattgctttccttggtcagaatgagaggaatgtagccattttcactgctggacaggaatctcccattattcttcgagatggaaatggtaccatctacccaatggccaaagattgcatgggaggaataagggatcccgattggctggatcttccacctattagtagtcttggaatgggtgtgcattctttaataaatcttcctgccaattcaacaatcaaaaagaaagctgctgttatcatcatggctgtagagaaacaaaccttaatgcaacacattctgcgctgtgactatgaggcctgtcgacaatatctaatgaatcttgagcaagcggttgttttagagcagaatctacagatgctgcagacattcatcagccacagatgtgatggaaatcgaaatattttgcatgcttgtgtatcagtttgctttccaaccagcaataaagaaactaaagaagaagaggaagcggagcgttctgaaagaaatacatttgcagaaaggctttctgctgttgaggccattgcaaatgcaatatcagttgtttcaagtaatggcccaggtaatcgggctggatcatcaagtagccgaagtttgagattacgggaaatgatgagacgttcgttgagagcagctggtttgggtagacatgaagctggagcttcatccagtgaccaccaggatccagtttcaccccccatagctccccctagttgggttcctgaccctcctgcgatggatcctgatggtgacattgattttatcctggcccccgctgtgggatctcttaccacagcagcaaccggtactggtcaaggaccaagcacctccactattccaggtccttccacagagccatctgtagtagaatccaaggatcgaaaggcgaatgctcattttatattgaaattgttatgtgacagtgtggttctccagccctatctacgagaacttctttctgccaaggatgcaagagggatgaccccatttatgtcagctgtaagtggccgagcttatcctgctgcaattaccatcttagaaactgctcagaaaattgcaaaagctgaaatatcctcaagtgaaaaagaggaagatgtattcatgggaatggtttgcccatcaggtaccaaccctgatgactctcctttatatgttttatgttgtaatgacacttgcagttttacatggactggagcagagcacattaaccaggatatttttgagtgtcgaacttgtggcttgctggagtcactgtgttgttgtacggaatgtgcaagggtttgtcataaaggtcatgattgcaaactcaaacggacatcaccaacagcctactgtgattgttgggagaaatgtaaatgtaaaactcttattgctggacagaaatctgctcgtcttgatctactttatcgcctgctcactgctactaatctggttactctgccaaacagcaggggagagcacctcttactattcttagtacagacagtcgcaaggcagacggtggagcattgtcaatacaggccacctcgaatcagggaagatcgtaaccgaaaaacagccagtcctgaagattcagatatgccagatcatgatttagagcctccaagatttgcccagcttgcattggagcgtgttctacaggactggaatgccttgaaatctatgattatgtttgggtcgcaggagaataaagaccctcttagtgccagcagtagaataggccatcttttgccagaagagcaagtatacctcaatcagcaaagtggcacaattcggctggactgtttcactcattgccttatagttaagtgtacagcagatattttgcttttagatactctactaggtacactagtgaaagaactccaaaacaaatatacacctggacgtagagaagaagctattgctgtgacaatgaggtttctacgttcagtggcaagagtttttgttattctgagtgtggaaatggcttcatccaaaaagaaaaacaactttattccacagccaattggaaaatgcaagcgtgtattccaagcattgctaccttacgctgtggaagaattgtgcaacgtagcagagtcactgattgttcctgtcagaatggggattgctcgtccaactgcaccatttaccctggctagtactagcatagatgccatgcagggcagtgaagaattattttcagtggaaccactaccaccacgaccatcatctgatcagtctagcagctccagtcagtctcagtcatcctacatcatcaggaatccacagcagaggcgcatcagccagtcacagcccgttcggggcagagatgaagaacaggatgatattgtttcagcagatgtggaagaggttgaggtggtggagggtgtggctggagaagaggatcatcatgatgaacaggaagaacacggggaagaaaatgctgaggcagagggacaacatgatgagcatgatgaagacgggagtgatatggagctggacttgttagcagcagctgaaacagaaagtgatagtgaaagtaaccacagcaaccaagataatgctagtgggcgcagaagcgttgtcactgcagcaactgctggttcagaagcaggagcaagcagtgttcctgccttcttttctgaagatgattctcaatcgaatgactcaagtgattctgatagcagtagtagtcagagtgacgacatagaacaggagacctttatgcttgatgagccattagaaagaaccacaaatagctcccatgccaatggtgctgcccaagctccccgttcaatgcagtgggctgtccgcaacacccagcatcagcgagcagccagtacagccccttccagtacatctacaccagcagcaagttcagcgggtttgatttatattgatccttcaaacttacgccggagtggtaccatcagtacaagtgctgcagctgcagcagctgctttggaagctagcaacgccagcagttacctaacatctgcaagcagtttagccagggcttacagcattgtcattagacaaatctcggacttgatgggccttattcctaagtataatcacctagtatactctcagattccagcagctgtgaaattgacttaccaagatgcagtaaacttacagaactatgtagaagaaaagcttattcccacttggaactggatggtcagtattatggattctactgaagctcaattacgttatggttctgcattagcatctgctggtgatcctggacatccaaatcatcctcttcacgcttctcagaattcagcgagaagagagaggatgactgcgcgagaagaagctagcttacgaacacttgaaggcagacgacgtgccaccttgcttagcgcccgtcaaggaatgatgtctgcacgaggagacttcctaaattatgctctgtctctaatgcggtctcataatgatgagcattctgatgttcttccagttttggatgtttgctcattgaagcatgtggcatatgtttttcaagcacttatatactggattaaggcaatgaatcagcagacaacattggatacacctcaactagaacgcaaaaggacgcgagaactcttggaactgggtattgataatgaagattcagaacatgaaaatgatgatgacaccaatcaaagtgctactttgaatgataaggatgatgactctcttcctgcagaaactggccaaaaccatccatttttccgacgttcagactccatgacattccttgggtgtatacccccaaatccatttgaagtgcctctggctgaagccatccccttggctgatcagccacatctgttgcagccaaatgctagaaaggaggatctttttggccgtccaagtcagggtctttattcttcatctgccagtagtgggaaatgtttaatggaggttacagtggatagaaactgcctagaggttcttccaacaaaaatgtcttatgctgccaatctgaaaaatgtaatgaacatgcaaaaccggcaaaaaaaagaaggggaagaacagcccgtgctgccagaagaaactgagagttcaaaaccagggccatctgctcatgatcttgctgcacaattaaaaagtagcttactagcagaaataggacttactgaaagtgaagggccacctctcacatctttcaggccacagtgtagctttatgggaatggttatttcccatgatatgctgctaggacgttggcgcctttctttagaactgttcggcagggtattcatggaagatgttggagcagaacctggatcaatcctaactgaattgggtggttttgaggtaaaagaatcaaaattccgcagagaaatggaaaaactgagaaaccagcagtcaagagatttgtcactagaggttgatcgggatcgagatcttctcattcagcagactatgaggcagcttaacaatcactttggtcgaagatgtgctactacaccaatggctgtacacagagtaaaagtcacatttaaggatgagccaggagagggcagtggtgtagcacgaagtttttatacagccattgcacaagcatttttatcaaatgaaaaattgccaaatctagagtgtatccaaaatgccaacaaaggcacccacacaagtttaatgcagagattaaggaaccgaggagagagagaccgggaaagggagagagaaagggaaatgaggaggagtagtggtttgcgagcaggttctcggagggaccgggatagagactttagaagacagctttccatcgacactaggccctttagaccagcctctgaagggaatcctagcgatgatcctgagcctttgccagcacatcggcaggcacttggagagaggctttatcctcgtgtacaagcaatgcaaccagcatttgcaagtaaaatcactggcatgttgttggaattatccccagctcagctgcttctccttctagcaagtgaggattctctgagagcaagagtggatgaggccatggaactcattattgcacatggacgggaaaatggagctgatagtatcctggatcttggattagtagactcctcagaaaaggtacagcaggaaaaccgaaagcgccatggctctagtcgaagtgtagtagatatggatttagatgatacagatgatggtgatgacaatgcccctttgttttaccaacctgggaaaagaggattttatactccaaggcctggcaagaacacagaagcaaggttgaattgtttcagaaacattggcaggattcttggactatgtctgttacagaatgaactatgtcctatcacattgaatagacatgtaattaaagtattgcttggtagaaaagtcaattggcatgattttgctttttttgatcctgtaatgtatgagagtttgcggcaactaatcctcgcgtctcagagttcagatgctgatgctgttttctcagcaatggatttggcatttgcaattgacctgtgtaaagaagaaggtggaggacaggttgaactcattcctaatggtgtaaatataccagtcactccacagaatgtatatgagtatgtgcggaaatacgcagaacacagaatgttggtagttgcagaacagcccttacatgcaatgaggaaaggtctactagatgtgcttccaaaaaattcattagaagatttaacggcagaagattttaggcttttggtaaatggctgcggtgaagtcaatgtgcaaatgctgatcagttttacctctttcaatgatgaatcaggagaaaatgctgagaagcttctgcagttcaagcgttggttctggtcaatagtagagaagatgagcatgacagaacgacaagatcttgtttacttttggacatcaagcccatcactgccagccagtgaagaaggattccagcctatgccctcaatcacaataagaccaccagatgaccaacatcttcctactgcaaatacttgcatttctcgactttacgtcccactctattcctctaaacagattctcaaacagaaattgttactcgccattaagaccaagaattttggttttgtgtagagtataaaaagtgtgtattgctgtgtaatattactagcaaattttgtagatttttttccatttgtctataaaagtttatggaagttaatgctgtcatacccccctggtggtaccttaaagagataaaatgcagacattccttgctgagtttatagcttaaaggcctaaggagcactagcaacatttggctatattggtttgctagtcaccaacttctgggtctaaccccagccaaagatgacagcagaacaacataatttacactgtgatttatctttttgctgagggggaaaaaatgtaaatgttctgaaaattcactgctgcctttgtggaaactgtttcagcaaaggttcttgtatagagggaatagggaatttcaaaataaaaaattaagtatgttctgtgttttcattttaactttttttatggtgtttaatttgtggttggctgcaactgtgtatcatgtatatggaacttgtaaaaaagttctcgacattcagatcttaagagatgaaatcacttttacctataaaaaccacttttattgcggtttgactgcattgagctctaggatattaaatgatatcactaatattttgcatgtaatttgctcatttgagtgagggcactttttttgtacatatgatggggccaatgcacaatacttttatcacaatcaactttttctttgtatccctatttcaatgagcagtcagtctcaagaggttactgcacttcagttctaactagacatttgtactaaggtatttcagttatgtaaactcagcctgggcactttctgataactgtaaaatgttttataagatcatgattattgaagatacattttggaaaattttaaatgttcgtgagcagcttaactacttttgtatctagccttttttaagtatcttgttacatttacttttttaaataaagaaattacagaagaaatgtcaagaaaaaaaaaaaaaaaa

SEQ ID NO: 2736 - DNA, 1776 bp, Homo sapiens
gggggctgtagctggtgagaggaagtcctagaggctatggacactctgctgctgggatcaccgagatgagcagcagctgctcagggctgagcagggtcctggtggccgtggctacagccctggtgtctgcctcctccccctgcccccaggcctggggccccccaggggtccagtatgggcagccaggcaggtccgtgaagctgtgttgtcctggagtgactgccggggacccagtgtcctggtttcgggatggggagccaaagctgctccagggacctgactctgggctagggcatgaactggtcctggcccaggcagacagcactgatgagggcacctacatctgccagaccctggatggtgcacttgggggcacagtgaccctgcagctgggctaccctccagcccgccctgttgtctcctgccaagcagccgactatgagaacttctcttgcacttggagtcccagccagatcagcggtttacccacccgctacctcacctcctacaggaagaagacagtcctaggagctgatagccagaggaggagtccatccacagggccctggccatgcccacaggatcccctaggggctgcccgctgtgttgtccacggggctgagttctggagccagtaccggattaatgtgactgaggtgaacccactgggtgccagcacacgcctgctggatgtgagcttgcagagcatcttgcgccctgacccaccccagggcctgcgggtagagtcagtaccaggttacccccgacgcctgcgagccagctggacataccctgcctcctggccgtgccagccccacttcctgctcaagttccgtttgcagtaccgtccggcgcagcatccagcctggtccacggtggagccagctggactggaggaggtgatcacagatgctgtggctgggctgccccatgctgtacgagtcagtgcccgggactttctagatgctggcacctggagcacctggagcccggaggcctggggaactccgagcactgggaccataccaaaggagataccagcatggggccagctacacacgcagccagaggtggagcctcaggtggacagccctgctcctccaaggccctccctccaaccacaccctcggctacttgatcacagggactctgtggagcaggtagctgtgctggcgtctttgggaatcctttctttcctgggactggtggctggggccctggcactggggctctggctgaggctgagacggggtgggaaggatggatccccaaagcctgggttcttggcctcagtgattccagtggacaggcgtccaggagctccaaacctgtagaggacccaggagggcttcggcagattccacctataattctgtcttgctggtgtggatagaaaccaggcaggacagtagatccctatggttggatctcagctggaagttctgtttggagcccatttctgtgagaccctgtatttcaaatttgcagctgaaaggtgcttgtacctctgatttcaccccagagttggagttctgctcaaggaacgtgtgtaatgtgtacatctgtgtccatgtgtgaccatgtgtctgtgaggcagggaacatgtattctctgcatgcatgtatgtaggtgcctggggagtgtgtgtgggtccttggctcttggcctttccccttgcaggggttgtgcaggtgtgaataaagagaataaggaagttcttggaaaaaaaaaaaaaaaaaaaaaaaaaaaaaaaaaaaaaaaaaaaaaaaaaaaaaa

SEQ ID NO: 2737 - DNA, 1458 bp, Homo sapiens
gggggctgtagctggtgagaggaagtcctagaggctatggacactctgctgctgggatcaccgagatgagcagcagctgctcagggctgagcagggtcctggtggccgtggctacagccctggtgtctgcctcctccccctgcccccaggcctggggccccccaggggtccagtatgggcagccaggcaggtccgtgaagctgtgttgtcctggagtgactgccggggacccagtgtcctggtttcgggatggggagccaaagctgctccagggacctgactctgggctagggcatgaactggtcctggcccaggcagacagcactgatgagggcacctacatctgccagaccctggatggtgcacttgggggcacagtgaccctgcagctgggctaccctccagcccgccctgttgtctcctgccaagcagccgactatgagaacttctcttgcacttggagtcccagccagatcagcggtttacccacccgctacctcacctcctacaggaagaagacagtcctaggagctgatagccagaggaggagtccatccacagggccctggccatgcccacaggatcccctaggggctgcccgctgtgttgtccacggggctgagttctggagccagtaccggattaatgtgactgaggtgaacccactgggtgccagcacacgcctgctggatgtgagcttgcagagcatcttgcgccctgacccaccccagggcctgcgggtagagtcagtaccaggttacccccgacgcctgcgagccagctggacataccctgcctcctggccgtgccagccccacttcctgctcaagttccgtttgcagtaccgtccggcgcagcatccagcctggtccacggtggagccagctggactggaggaggtgatcacagatgctgtggctgggctgccccatgctgtacgagtcagtgcccgggactttctagatgctggcacctggagcacctggagcccggaggcctggggaactccgagcactgggaccataccaaaggagataccagcatggggccagctacacacgcagccagaggtggagcctcaggtggacagccctgctcctccaaggccctccctccaaccacaccctcggctacttgatcacagggactctgtggagcaggtagctgtgctggcgtctttgggaatcctttctttcctgggactggtggctggggccctggcactggggctctggtaagtgactgccattggtccctcagcctctgatcctcacacatgctctgatgcccatagaccacattcatctccacccttcatgactgcccgctgaacctgtctgattctggaactacctccccatacctccatcccccatgccccacttgattttaactgattcctctcctgaccctttactaataaaccctttggcggagactgagataacccacaaaaaa

SEQ ID NO: 2738 - DNA, 1837 bp, Homo sapiens
cgctgaggagactccggtcactgtcctcgccccgcctcccccttccctccccttggggaccaccgggcgccacgccgcgaacgtaatagctcttcaagtctgcaataaaaaatggcctccaacaaaactacattgcaaaaaatgggaaaaaaacagaatggaaagagtaaaaaagttgaagaggcagagcctgaagaatttgtcgtggaaaaagtactagatcgacgtgtagtgaatgggaaagtggaatatttcctgaagtggaagggatttacagatgctgacaatacttgggaacctgaagaaaatttagattgtccagaattgattgaagcgtttcttaactctcagaaagctggcaaagaaaaagatggtacaaaaagaaaatctttatctgacagtgaatctgatgacagcaaatcaaagaagaaaagagatgctgctgacaaaccaagaggatttgccagaggtcttgatcctgaaagaataattggtgccacagacagcagtggagaattgatgtttctcatgaaatggaaagattcagatgaggcagacttggtgctggcgaaagaggcaaatatgaagtgtcctcaaattgtaattgctttttatgaagagagactaacttggcattcttgtccagaagatgaagctcaataattgttcacattgttcttttatatatatttatatatatatataaaaattgggtcttagattttgatttactagtgtgacaaaataactacatcctaatgaaaatcaagtttgatatgtttgttttgaaagtagcgttggaagagttgttgggggttttttgcatccatagcactggttactttgaacaaataaataaaagctttctgtagttgcttcctttatcagaaaagaacatttgataccatggtatatcatttcctcttcattaaagaacagcttttctaaatgttgggggaaatgtccatagtcattactcagtcaaaacttgtgttctcatgagcctaaggaccattctagatttattacgtgttttttgtgtgtgtgtgtgtgtgtgtgtgtgtgtgtatccataaaatgcatatgtaaatttttttttgtttttaagcattcacccaaacaaaaaaatcacaggtaaacccatgtttctgagatgccattattccaagcaaaataagagataatcccttcaagttaaattgaaaattttcctgaaaccatacatttcaagtgaaataagtaattctagataggacaatttaaattggataattttaaagtgtctataattgcagtggtttatttgcaaaattcctaaaaggaaaaattttatcactgccatcacagcaggtttcctcatccagatgaggaaactagacaaatgctagtgtgttttaactagctaaacaaaactaagttaaatgaacatttaaaagtttccctagcgggccattccttagcaaaatgttggaatccctgttgctacattgactaaaaggtcatgatgaatggaatatgtaagacttggctcatagaaacctaatcagatggttagaggtgttggcagtttaggacctgctgtcataaatgtgtgaacaaccttttgtaacctaacctattgacctgcatgttttttctttaccccaattcattacatggaggctcaatcttgagtttgctttactggttcagcaaaagccaggaagaacaactttgtagtaatcaaaatgttatccaactgtatattgtttactttattgtaaatactggtgaacagtggttaataaatagttttatattcctttatgcaaaaaaaaaaaaaaaaaaaaaaaaaaaa

SEQ ID NO: 2739 - DNA, 1851 bp, Homo sapiens
tccccccggcggccccgcgcgcagctcccggctccctcccccttcggatgtggcttgagctgtaggcgcggagggccggagacgctgcagacccgcgacccggagcagctcggaggcggtgaataatagctcttcaagtctgcaataaaaaatggcctccaacaaaactacattgcaaaaaatgggaaaaaaacagaatggaaagagtaaaaaagttgaagaggcagagcctgaagaatttgtcgtggaaaaagtactagatcgacgtgtagtgaatgggaaagtggaatatttcctgaagtggaagggatttacagatgctgacaatacttgggaacctgaagaaaatttagattgtccagaattgattgaagcgtttcttaactctcagaaagctggcaaagaaaaagatggtacaaaaagaaaatctttatctgacagtgaatctgatgacagcaaatcaaagaagaaaagagatgctgctgacaaaccaagaggatttgccagaggtcttgatcctgaaagaataattggtgccacagacagcagtggagaattgatgtttctcatgaaatggaaagattcagatgaggcagacttggtgctggcgaaagaggcaaatatgaagtgtcctcaaattgtaattgctttttatgaagagagactaacttggcattcttgtccagaagatgaagctcaataattgttcacattgttcttttatatatatttatatatatatataaaaattgggtcttagattttgatttactagtgtgacaaaataactacatcctaatgaaaatcaagtttgatatgtttgttttgaaagtagcgttggaagagttgttgggggttttttgcatccatagcactggttactttgaacaaataaataaaagctttctgtagttgcttcctttatcagaaaagaacatttgataccatggtatatcatttcctcttcattaaagaacagcttttctaaatgttgggggaaatgtccatagtcattactcagtcaaaacttgtgttctcatgagcctaaggaccattctagatttattacgtgttttttgtgtgtgtgtgtgtgtgtgtgtgtgtgtgtatccataaaatgcatatgtaaatttttttttgtttttaagcattcacccaaacaaaaaaatcacaggtaaacccatgtttctgagatgccattattccaagcaaaataagagataatcccttcaagttaaattgaaaattttcctgaaaccatacatttcaagtgaaataagtaattctagataggacaatttaaattggataattttaaagtgtctataattgcagtggtttatttgcaaaattcctaaaaggaaaaattttatcactgccatcacagcaggtttcctcatccagatgaggaaactagacaaatgctagtgtgttttaactagctaaacaaaactaagttaaatgaacatttaaaagtttccctagcgggccattccttagcaaaatgttggaatccctgttgctacattgactaaaaggtcatgatgaatggaatatgtaagacttggctcatagaaacctaatcagatggttagaggtgttggcagtttaggacctgctgtcataaatgtgtgaacaaccttttgtaacctaacctattgacctgcatgttttttctttaccccaattcattacatggaggctcaatcttgagtttgctttactggttcagcaaaagccaggaagaacaactttgtagtaatcaaaatgttatccaactgtatattgtttactttattgtaaatactggtgaacagtggttaataaatagttttatattcctttatgcaa

SEQ ID NO: 2740 - DNA, 1889 bp, Homo sapiens
atgatgctggctggttattttgcaggtttatgtggatacttcattgtatcattgcagtctgtttactcttccttacagatgctgcagttagctgggggtccactctacaccctggttgcctcagtttttcctgtacttggaggtatcagcagtgaatgctatgaaacagcaaagatggcagcctgccccttcccctggaagctccatcccagggcggtactgtcctgttgccagcatgagcacacagtatgtagggggtggctggagaccccagttgggacatctcacctagtcaggaggaacgggatcagggatccacttaaagaagcagttgggctgtttttgatagagcagttgtgctgtgttggggatcccatcagccccttgttggtttgggctctccgaggcccacaggctgaactggctgaggtgcccaacagccaagttggtggcccgccttcccctctgggcactctgtcccagggaaaaattagaagtctgttggccacagaacatgggcgggggtggctggataccccagctggcatgatctacccgtcaaggaaaagtggatcagggtcccacttaaagaagccatctggccatgcctcaatagaacagccttgttgtgctgggaaactgcttctgcccttgttggcttggactctctaaagcccactggttggaatggctgagtcattcaaacagccagcttggtggccctcctttcctcccctcctcccctcccctcctccttccctcctcgcctcccctcgggcatgctattccagaaagagatcaggatccgtttgtggaatacaggcagagatggctggaggccccggttgggaggtccctcccagtgaagaggaatggattggggccccacttaaagaagcaacctggccacgttcaggcaatgccgctgtagtgttctgggaagacccttccttgtttgaaccatatggattctccgaagcccatagactgaaatggctgagtcaaccaaacagtagagatggcagcccacccctcccactggggactctgtcccatcacagtatgaaagttttcaagacgcctacaagtggaaaatgcactcctcccagccaaatcaagcttcgccagattccttacagctgtgtgcagtgaaatgactaatgaaagagccctctgctgctggtggaactttcacatatggcactgttatgccactcagcaggacccgaccctggtatttacatattggatgtcaccccaaaagcccctgaccagggggtttccgggatgtaataagaatgccactctgggctttggaaggtgcaccgtatgcacacccatactatagggcaggggttagcatttcagacccctgttcctcccttgacaagcaagtgcttttctccagggaagacgttcaggttcattcatagatccattggtgccgtgggcagctcagtaacaatagctctgctgcctaccagctgctggtggaggtgttgagaatacctaatgaggaagtcagggcccctgcgtgcttcagcagagctggatgcctggcatggcaatcaatggacacaaacctttggataatttccgtccttggcggtgtgttctatagcataggtatgaagtgggtgctctgggagctcagaagaggggctcttctcttaacttatgggtggccagggaaggcttcctggagctcaaatgactgagtggagtcttcaacattaaaaaaaaaaaaaagaaaaaaaaagtgcttccctcccacccccagttaaaaaggtaatacacctcattgaaataatttaaactttacagaaatgtgttcctttaaagttcagagagtaaagaggaagtaataaagctgaaatagtagaatttct

SEQ ID NO: 2741 - DNA, 6090 bp, Homo sapiens
agtcgaccgtggaccgcgctgcgagcctcggagacgccgtagaaggagacctgcttccgggactggaccaggcgcctgcgactcttctcagacgccgacgtgcacgagtgactactattaattctatttaaaatgggtgtaaagaagaagaaagaaatgcaagttgctgcgctgaccatttgccatcaggaccttgaaactttgaaatcttttgctgatgtggaagggaaaaatctagcttctttgctgttacattgtgtgcaactcacggatggagtgtcacaaatccattatattaaacagattgtgcctctgctggagaaagcagataaaaatggcatgtgtgatcccactattcaaagttgtttggatatcttagcaggcatttatctttctttgagtctaaagaatcccttgaagaaagtattggcaagctcactaaatagcctgcctgatttttttctacctgaggctatgcaccgttttacttctcgtcttcaggaagaattgaatactactgacttatactcttacaggaaagttactgacaatatttcttcctgtatggagaactttaacttgggtagagcaagtgttaataatctgcttaaaaatgtgcttcattttctgcagaagagtttaattgaaatcctggaagaaaatagaaaatgtgctggaaatcatattattcaaacacagttgatgaatgacttactggtaggcattagagtttcaatgatgttagtacagaaagtacaagatttccagggaaatctttggaagacttccgattctcccatatggcaaaatatgtgtggattgctgagtatttttaccaaggttttaagcgatgatgatctgttacagactgtacagagcacatctggattagctattattctttttattaagactatgtttcacccgtctgaaaagattcctcatttgattagcagtgtgctgcttcgttcagtggactgcaccagtgtccccgagtggtttatgagcagctgcaggagcctctgttgtggtgacatctctcagtcagctgtcttattcctctgtcaggggacacttgccatgttggactggcagaacggaagcatgggtcggagtggggaggccctgctcttggatactgcacatgttttgttcaccttgagttcacagattaaagagccaacgctggaaatgtttctgtctagaatcttagcatcctggactaattcagccatacaagtccttgaatcaagttccccgagcctaacggacagcctgaatgggaattcaagtatagttgggagacttttggaatatgtctatacccattgggaacatccattggatgctctgagacaccaaaccaaaatcatgttcaaaaaccttctccaaatgcaccggctcactgtggaaggtgcagatttcgtccctgatcctttctttgtggaattgactgagagtcttttacgattggaatggcatattaaaggaaagtacacgtgccttggttgtttggtagagtgcataggagttgaacatattttggctatagataaaactattccatctcaaatcttagaggtgatgggagaccagtcattggtaccttatgcaagtgacctcttggaaaccatgtttagaaatcataagagtcatttgaaatcccagactgctgagagttcttggattgaccagtggcatgagacttgggtttctcctctcctttttatattgtgtgaaggaaacttggatcaaaaatcttacgtgattgattattacttgccaaaattattaagttacagccctgaaagcttacagtacatggtaaagattcttcagacttctattgatgctaaaactggacaagagcaatctttcccatccttagggtcttgtaatagcaggggggctctgggagctttgatggcatgtctgcgaatagctagagctcatggacatcttcagtctgcaactgatacctgggagaacctcgtgtctgatgcaagaataaagcaaggcttaattcatcagcattgccaagtaaggatagatacattaggcttgctttgtgaaagtaatcggagcacagaaattgtttccatggaagaaatgcagtggattcagttctttattacatacaatcttaacagccagtctccaggagtgcggcaacagatctgttctcttcttaaaaagttgttttgtaggatacaggaaagttctcaggtactttataaattggagcagagtaaatccaaacgtgaaccagagaatgagttaaccaaacagcacccttctgtttctttacagcagtataagaatttcatgtcatccatttgtaacagtctttttgaagcattgtttcctggatcttcctactcgactagattttcagctttaaccattttaggttcaatagctgaagtttttcatgtcccagaaggcagaatttatacagtatatcagctgagtcatgatattgatgttggtcgtttccaaacactaatggaatgttttaccagcacttttgaagacgtgaaaattttagcatttgatcttctgatgaagttatcaaaaacagctgtacattttcaggattcggggaaactgcaaggcttatttcaggcagcattggagctcagcacaagcaccaaaccatacgactgtgtgacagcttcctacctgctgaacttcttaatctggcaggatgctctaccgtcatccttgtctgcctacttaactcagcaagttgcatgtgataatggagataggcctgctgctgtggtggaaaggaacacattaatggttatcaaatgcttgatggaaaatcttgaggaagaagtatctcaggctgaaaattctctgcttcaggcagcagcagcatttccaatgtatgggcgagtccactgtataacaggagctttgcagaagttatctctaaacagcctgcagttggtgagcgagtggagacctgtggtagagaagctccttttgatgtcctacaggctttccactgtggtgtctccagtcattcagagctcatcccctgaaggcctcatcccaatggacactgattcagagtcagcaagccgcttacagatgattctgaatgagattcagcctcgagatactaatgattattttaaccaagccaaaatattgaaagaacatgatagctttgatatgaaggacttgaatgctagtgtggtgaatattgatacttctacagaaatcaaaggtaaagaagtaaaaacatgtgatgtaactgcgcagatggtgctggtatgttgttggagaagtatgaaggaagttgctttacttttaggcatgttgtgccagcttctgcccatgcagcctgtgccagaatcttctgatggattattgacggtggagcaggtaaaagaaataggagattactttaaacaacaccttttgcagtccaggcacagaggagcatttgaattggcttatactggttttgtgaaactcactgaagtactaaacaggtgcccaaatgtgagtctgcaaaagctgccagaacagtggctatggagtgttttagaggaaattaaatgcagtgatccttcatctaaactctgtgctacaaggcgcagtgctggaattcctttctacatacaggcactgttggcatctgaaccaaagaaaggcagaatggatttgttgaaaataacaatgaaagagttaatctctttggctgggcctacagatgacatacagagtacagtcccccaggttcatgctttaaatatccttagagcattgttcagagatacgcgcctgggagaaaatattattccttatgttgctgatggagctaaggctgcaattctgggttttacatcaccggtctgggcagtgcgaaattcatccacacttctctttagtgccttgatcacaagaatttttggagttaaaagggcaaaggatgaacattccaaaacaaatagaatgacagggagagagtttttctctcgtttcccagaactctatccttttcttctcaaacagttggaaactgtagccaatacagtagacagtgatatgggagaaccaaatcgtcatccaagcatgtttctcttacttttggtgttggagagactctacgcttccccgatggatggtacttcttctgctctcagcatgggaccttttgttcccttcattatgaggtgtggtcactcacctgtctaccactcccgtgaaatggcagctcgtgccttggtcccatttgttatgatagatcacattcctaataccattcgaactctgttgtccacactccccagctgcactgaccagtgtttccggcaaaaccacattcatgggacacttctccaggtttttcatttgttgcaagcctactcagactccaaacacggaacgaattcagacttccagcacgagctgactgacatcactgtttgtaccaaagccaaactctggctggccaagaggcaaaatccatgtttggtgaccagagctgtatatattgatattctcttcctattgacttgctgcctcaacagatctgcaaaggacaaccagccagttctggagagtcttggcttctgggaggaagtcagagggattatctcaggatcagagctgataacgggattcccttgggccttcaaggtgccaggcctgccccagtacctccagagcctcaccagactagccattgctgcagtgtgggccgcggcagccaagagtggagagcgggagacgaatgtccccatctctttctctcagctgttagaatctgccttccctgaagtgcgctcactaacactggaagccctcttggaaaagttcttagcagcagcctctggacttggagagaagggcgtgccacccttgctgtgcaacatgggagagaagttcttattgttggccatgaaggaaaatcacccagaatgcttctgcaagatactgaaaattctccactgcatggaccctggtgagtggcttccccagacggagcactgtgtccatctgaccccaaaggagttcttgatctggacgatggatattgcttccaatgaaagatctgaaattcagagtgtagctctgagacttgcttccaaagtcatttcccaccacatgcagacatgtgtggagaacagggaattgatagctgctgagctgaagcagtgggttcagctggtcatcttgtcatgtgaagaccatcttcctacagagtctaggctggccgtcgttgaagtcctcaccagtactacaccacttttcctcaccaacccccatcctattcttgagttgcaggatacacttgctctctggaagtgtgtccttacccttctgcagagtgaggagcaagctgttagagatgcagccacggaaaccgtgacaactgccatgtcacaagaaaatacctgccagtcaacagagtttgccttctgccaggtggatgcctccatcgctctggccctggccctggccgtcctgtgtgatctgctccagcagtgggaccagttggcccctggactgcccatcctgctgggatggctgttgggagagagtgatgacctcgtggcctgtgtggagagcatgcatcaggtggaagaagactacctgtttgaaaaagcagaagtcaacttttgggccgagaccctgatctttgtgaaatacctctgcaagcacctcttctgtctcctctcaaagtccggctggcgtcccccaagccctgagatgctctgtcaccttcaaaggatggtgtcagagcagtgccacctcctgtctcagttcttcagagagcttccaccagctgctgagtttgtgaagacagtggagttcacaagactacgcattcaagaggaaaggactttggcttgcttgaggctgctggcctttttggaaggaaaggaaggggaagacaccctagttctcagtgtttgggactcttatgcagaatcgaggcagttaactcttccaagaacagaagcggcatgttgaagaaaatctgggggattgggatgggggtatgtgtggatttttcctccactaaatctgcaggaaacatgttgaacataaattcaaaaattttatccc

SEQ ID NO: 2742 - DNA, 5900 bp, Homo sapiens
agtcgaccgtggaccgcgctgcgagcctcggagacgccgtagaaggagacctgcttccgggactggaccaggcgcctgcgactcttctcagacgccgacgtgcacgagtgactactattaattctatttaaaatgggtgtaaagaagaagaaagaaatgcaagttgctgcgctgaccatttgccatcaggaccttgaaactttgaaatcttttgctgatgtggaagggaaaaatctagcttctttgctgttacattgtgtgcaactcacggatggagtgtcacaaatccattatattaaacagattgtgcctctgctggagaaagcagataaaaatggcatgtgtgatcccactattcaaagttgtttggatatcttagcaggcatttatctttctttgagtctaaagaatcccttgaagaaagtattggcaagctcactaaatagcctgcctgatttttttctacctgaggctatgcaccgttttacttctcgtcttcaggaagaattgaatactactgacttatactcttacaggaaagttactgacaatatttcttcctgtatggagaactttaacttgggtagagcaagtgttaataatctgcttaaaaatgtgcttcattttctgcagaagagtttaattgaaatcctggaagaaaatagaaaatgtgctggaaatcatattattcaaacacagttgatgaatgacttactggtaggcattagagtttcaatgatgttagtacagaaagtacaagatttccagggaaatctttggaagacttccgattctcccatatggcaaaatatgtgtggattgctgagtatttttaccaaggttttaagcgatgatgatctgttacagactgtacagagcacatctggattagctattattctttttattaagactatgtttcacccgtctgaaaagattcctcatttgtgtgctgcttcgttcagtggactgcaccagtgtccccgagtggtttatgagcagctgcaggagcctctgttgtggtgacatctctcagtcagctgtcttattcctctgtcaggggacacttgccatgttggactggcagaacggaagcatgggtcggagtggggaggccctgctcttggatactgcacatgttttgttcaccttgagttcacagattaaagagccaacgctggaaatgtttctgtctagaatcttagcatcctggactaattcagccatacaagtccttgaatcaagttccccgagcctaacggacagcctgaatgggaattcaagtatagttgggagacttttggaatatgtctatacccattgggaacatccattggatgctctgagacaccaaaccaaaatcatgttcaaaaaccttctccaaatgcaccggctcactgtggaaggtgcagatttcgtccctgatcctttctttgtggaattgactgagagtcttttacgattggaatggcatattaaaggaaagtacacgtgccttggttgtttggtagagtgcataggagttgaacatattttggctatagataaaactattccatctcaaatcttagaggtgatgggagaccagtcattggtaccttatgcaagtgacctcttggaaaccatgtttagaaatcataagagtcatttgaaatcccagactgctgagagttcttggattgaccagtggcatgagacttgggtttctcctctcctttttatattgtgtgaaggaaacttggatcaaaaatcttacgtgattgattattacttgccaaaattattaagttacagccctgaaagcttacagtacatggtaaagattcttcagacttctattgatgctaaaactggacaagagcaatctttcccatccttagggtcttgtaatagcaggggggctctgggagctttgatggcatgtctgcgaatagctagagctcatggacatcttcagtctgcaactgatacctgggagaacctcgtgtctgatgcaagaataaagcaaggcttaattcatcagcattgccaagtaaggatagatacattaggcttgctttgtgaaagtaatcggagcacagaaattgtttccatggaagaaatgcagtggattcagttctttattacatacaatcttaacagccagtctccaggagtgcggcaacagatctgttctcttcttaaaaagttgttttgtaggatacaggaaagttctcaggtactttataaattggagcagagtaaatccaaacgtgaaccagagaatgagttaaccaaacagcacccttctgtttctttacagcagtataagaatttcatgtcatccatttgtaacagtctttttgaagcattgtttcctggatcttcctactcgactagattttcagctttaaccattttaggttcaatagctgaagtttttcatgtcccagaaggcagaatttatacagtatatcagctgagtcatgatattgatgttggtcgtttccaaacactaatggaatgttttaccagcacttttgaagacgtgaaaattttagcatttgatcttctgatgaagttatcaaaaacagctgtacattttcaggattcggggaaactgcaaggcttatttcaggcagcattggagctcagcacaagcaccaaaccatacgactgtgtgacagcttcctacctgctgaacttcttaatctggcaggatgctctaccgtcatccttgtctgcctacttaactcagcaagttgcatgtgataatggagataggcctgctgctgtggtggaaaggaacacattaatggttatcaaatgcttgatggaaaatcttgaggaagaagtatctcaggctgaaaattctctgcttcaggcagcagcagcatttccaatgtatgggcgagtccactgtataacaggagctttgcagaagttatctctaaacagcctgcagttggtgagcgagtggagacctgtggtagagaagctccttttgatgtcctacaggctttccactgtggtgtctccagtcattcagagctcatcccctgaaggcctcatcccaatggacactgattcagagtcagcaagccgcttacagatgattctgaatgagattcagcctcgagatactaatgattattttaaccaagccaaaatattgaaagaacatgatagctttgatatgaaggacttgaatgctagtgtggtgaatattgatacttctacagaaatcaaaggtaaagaagtaaaaacatgtgatgtaactgcgcagatggtgctggtatgttgttggagaagtatgaaggaagttgctttacttttaggcatgttgtgccagcttctgcccatgcagcctgtgccagaatcttctgatggattattgacggtggagcaggtaaaagaaataggagattactttaaacaacaccttttgcagtccaggcacagaggagcatttgaattggcttatactggttttgtgaaactcactgaagtactaaacaggtgcccaaatgtgagtctgcaaaagctgccagaacagtggctatggagtgttttagaggaaattaaatgcagtgatccttcatctaaactctgtgctacaaggcgcagtgctggaattcctttctacatacaggcactgttggcatctgaaccaaagaaaggcagaatggatttgttgaaaataacaatgaaagagttaatctctttggctgggcctacagatgacatacagagtacagtcccccaggttcatgctttaaatatccttagagcattgttcagagatacgcgcctgggagaaaatattattccttatgttgctgatggagctaaggctgcaattctgggttttacatcaccggtctgggcatgatatgggagaaccaaatcgtcatccaagcatgtttctcttacttttggtgttggagagactctacgcttccccgatggatggtacttcttctgctctcagcatgggaccttttgttcccttcattatgaggtgtggtcactcacctgtctaccactcccgtgaaatggcagctcgtgccttggtcccatttgttatgatagatcacattcctaataccattcgaactctgttgtccacactccccagctgcactgaccagtgtttccggcaaaaccacattcatgggacacttctccaggtttttcatttgttgcaagcctactcagactccaaacacggaacgaattcagacttccagcacgagctgactgacatcactgtttgtaccaaagccaaactctggctggccaagaggcaaaatccatgtttggtgaccagagctgtatatattgatattctcttcctattgacttgctgcctcaacagatctgcaaaggacaaccagccagttctggagagtcttggcttctgggaggaagtcagagggattatctcaggatcagagctgataacgggattcccttgggccttcaaggtgccaggcctgccccagtacctccagagcctcaccagactagccattgctgcagtgtgggccgcggcagccaagagtggagagcgggagacgaatgtccccatctctttctctcagctgttagaatctgccttccctgaagtgcgctcactaacactggaagccctcttggaaaagttcttagcagcagcctctggacttggagagaagggcgtgccacccttgctgtgcaacatgggagagaagttcttattgttggccatgaaggaaaatcacccagaatgcttctgcaagatactgaaaattctccactgcatggaccctggtgagtggcttccccagacggagcactgtgtccatctgaccccaaaggagttcttgatctggacgatggatattgcttccaatgaaagatctgaaattcagagtgtagctctgagacttgcttccaaagtcatttcccaccacatgcagacatgtgtggagaacagggaattgatagctgctgagctgaagcagtgggttcagctggtcatcttgtcatgtgaagaccatcttcctacagagtctaggctggccgtcgttgaagtcctcaccagtactacaccacttttcctcaccaacccccatcctattcttgagttgcaggatacacttgctctctggaagtgtgtccttacccttctgcagagtgaggagcaagctgttagagatgcagccacggaaaccgtgacaactgccatgtcacaagaaaatacctgccagtcaacagagtttgccttctgccaggtggatgcctccatcgctctggccctggccctggccgtcctgtgtgatctgctccagcagtgggaccagttggcccctggactgcccatcctgctgggatggctgttgggagagagtgatgacctcgtggcctgtgtggagagcatgcatcaggtggaagaagactacctgtttgaaaaagcagaagtcaacttttgggccgagaccctgatctttgtgaaatacctctgcaagcacctcttctgtctcctctcaaagtccggctggcgtcccccaagccctgagatgctctgtcaccttcaaaggatggtgtcagagcagtgccacctcctgtctcagttcttcagagagcttccaccagctgctgagtttgtgaagacagtggagttcacaagactacgcattcaagaggaaaggactttggcttgcttgaggctgctggcctttttggaaggaaaggaaggggaagacaccctagttctcagtgtttgggactcttatgcagaatcgaggcagttaactcttccaagaacagaagcggcatgttgaagaaaatctgggggattgggatgggggtatgtgtggatttttcctccactaaatctgcaggaaacatgttgaacataaattcaaaaattttatccc

SEQ ID NO: 2743 - DNA, 2253 bp, Homo sapiens
gctgcgccgccattaagagctagccctcagaactatcctctctaaggtttcacagtcctgcccaagatggccgtctcggctctggcaccgcccccactcctgcctctcccaacatggcgaccctgagtctccgttcccggtgcggaacgtacgaccggaagtgacggggtccagaaatttccgctttctttctgcagcaggaaccgcggctgctggacaagaggggtgcggtggatactgacctttgctccggcctcgtcgtgaagacacagcgcatctccccgctgtaggcttcctcccacagaacccgtttcgggcctcagagcgtctggtgagatgctgttgccgctgctgctgctgctacccatgtgctgggccgtggaggtcaagaggccccggggcgtctccctcaccaatcatcacttctacgatgagtccaagcctttcacctgcctggacggttcggccaccatcccatttgatcaggtcaacgatgactattgcgactgcaaagatggctctgacgagccaggcacggctgcctgtcctaatggcagcttccactgcaccaacactggctataagcccctgtatatcccctccaaccgggtcaacgatggtgtttgtgactgctgcgatggaacagacgagtacaacagcggcgtcatctgtgagaacacctgcaaagagaagggccgtaaggagagagagtccctgcagcagatggccgaggtcacccgcgaagggttccgtctgaagaagatccttattgaggactggaagaaggcacgggaggagaagcagaaaaagctcattgagctacaggctgggaagaagtctctggaagaccaggtggagatgctgcggacagtgaaggaggaagctgagaagccagagagagaggccaaagagcagcaccagaagctgtgggaagagcagctggctgctgccaaggcccaacaggagcaggagctggcggctgatgccttcaaggagctggatgatgacatggacgggacggtctcggtgactgagctgcagactcacccggagctggacacagatggggatggggcgttgtcagaagcggaagctcaggccctcctcagtggggacacacagacagacgccacctctttctacgaccgcgtctgggccgccatcagggacaagtaccggtccgaggcactgcccaccgaccttccagcaccttctgcccctgacttgacggagcccaaggaggagcagccgccagtgccctcgtcgcccacagaggaggaggaggaggaggaggaggaggaggaagaagaggctgaagaagaggaggaggaggaggattccgaggtgcagggggagcagcccaagccggccagccctgctgaggaagacaaaatgccgccctacgacgagcagacgcaggccttcatcgatgctgcccaggaggcccgcaacaagttcgaggaggccgagcggtcgctgaaggacatggaggagtccatcaggaacctggagcaagagatttcttttgactttggccccaacggggagtttgcttacctgtacagccagtgctacgagctcaccaccaacgaatacgtctaccgcctctgccccttcaagcttgtctcgcagaaacccaaactcgggggctctcccaccagccttggcacctggggctcatggattggccccgaccacgacaagttcagtgccatgaagtatgagcaaggcacgggctgctggcagggccccaaccgctccaccaccgtgcgcctcctgtgcgggaaagagaccatggtgaccagcaccacagagcccagtcgctgcgagtacctcatggagctgatgacgccagccgcctgcccggagccaccgcctgaagcacccaccgaagacgaccatgacgagctctagctggatgggcgcagagaacctcaagaaggcatgaagccagcccctgcagtgccgtccacccgcccctctgggcctgcctgtggctctgttgccctcctctgtggcggcaggacctttgtggggcttcgtgccctgctctggggcccaggcggggctggtccacattcccaggccccaacagccttcaaagatgggtaaaggagcttgccctccctgggccccccaccttggtgactcgccccaccacccccagccctgtccctgccacccctcctagtggggactagtgaatgacttgacctgtgacctcaatacaataaatgtgatcccccacccaaa

SEQ ID NO: 2744 - DNA, 2262 bp, Homo sapiens
gctgcgccgccattaagagctagccctcagaactatcctctctaaggtttcacagtcctgcccaagatggccgtctcggctctggcaccgcccccactcctgcctctcccaacatggcgaccctgagtctccgttcccggtgcggaacgtacgaccggaagtgacggggtccagaaatttccgctttctttctgcagcaggaaccgcggctgctggacaagaggggtgcggtggatactgacctttgctccggcctcgtcgtgaagacacagcgcatctccccgctgtaggcttcctcccacagaacccgtttcgggcctcagagcgtctggtgagatgctgttgccgctgctgctgctgctacccatgtgctgggccgtggaggtcaagaggccccggggcgtctccctcaccaatcatcacttctacgatgagtccaagcctttcacctgcctggacggttcggccaccatcccatttgatcaggtcaacgatgactattgcgactgcaaagatggctctgacgagccaggcacggctgcctgtcctaatggcagcttccactgcaccaacactggctataagcccctgtatatcccctccaaccgggtcaacgatggtgtttgtgactgctgcgatggaacagacgagtacaacagcggcgtcatctgtgagaacacctgcaaagagaagggccgtaaggagagagagtccctgcagcagatggccgaggtcacccgcgaagggttccgtctgaagaagatccttattgaggactggaagaaggcacgggaggagaagcagaaaaagctcattgagctacaggctgggaagaagtctctggaagaccaggtggagatgctgcggacagtgaaggaggaagctgagaagccagagagagaggccaaagagcagcaccagaagctgtgggaagagcagctggctgctgccaaggcccaacaggagcaggagctggcggctgatgccttcaaggagctggatgatgacatggacgggacggtctcggtgactgagctgcagactcacccggagctggacacagatggggatggggcgttgtcagaagcggaagctcaggccctcctcagtggggacacacagacagacgccacctctttctacgaccgcgtctgggccgccatcagggacaagtaccggtccgaggcactgcccaccgaccttccagcaccttctgcccctgacttgacggagcccaaggaggagcagccgccagtgccctcgtcgcccacagaggaggaggaggaggaggaggaggaggaggaagaagaggctgaagaagaggaggaggaggaggattccgaggaggccccaccgccactgtcacccccgcagccggccagccctgctgaggaagacaaaatgccgccctacgacgagcagacgcaggccttcatcgatgctgcccaggaggcccgcaacaagttcgaggaggccgagcggtcgctgaaggacatggaggagtccatcaggaacctggagcaagagatttcttttgactttggccccaacggggagtttgcttacctgtacagccagtgctacgagctcaccaccaacgaatacgtctaccgcctctgccccttcaagcttgtctcgcagaaacccaaactcgggggctctcccaccagccttggcacctggggctcatggattggccccgaccacgacaagttcagtgccatgaagtatgagcaaggcacgggctgctggcagggccccaaccgctccaccaccgtgcgcctcctgtgcgggaaagagaccatggtgaccagcaccacagagcccagtcgctgcgagtacctcatggagctgatgacgccagccgcctgcccggagccaccgcctgaagcacccaccgaagacgaccatgacgagctctagctggatgggcgcagagaacctcaagaaggcatgaagccagcccctgcagtgccgtccacccgcccctctgggcctgcctgtggctctgttgccctcctctgtggcggcaggacctttgtggggcttcgtgccctgctctggggcccaggcggggctggtccacattcccaggccccaacagccttcaaagatgggtaaaggagcttgccctccctgggccccccaccttggtgactcgccccaccacccccagccctgtccctgccacccctcctagtggggactagtgaatgacttgacctgtgacctcaatacaataaatgtgatcccccacccaaa

SEQ ID NO: 2745 - DNA, 4666 bp, Homo sapiens
agtaccttggtccagctcttcctgcaacggcccaggagctcagagctccacatctgaccttctagtcatgaccaggaccagggcagcactcctcctgttcacagccttagcaacttctctaggtttcaacttggacacagaggagctgacagccttccgtgtggacagcgctgggtttggagacagcgtggtccagtatgccaactcctgggtggtggttggagccccccaaaagataacagctgccaaccaaacgggtggcctctaccagtgtggctacagcactggtgcctgtgagcccatcggcctgcaggtgcccccggaggccgtgaacatgtccctgggcctgtccctggcgtctaccaccagcccttcccagctgctggcctgcggccccaccgtgcaccacgagtgcgggaggaacatgtacctcaccggactctgcttcctcctgggccccacccagctcacccagaggctcccggtgtccaggcaggagtgcccaagacaggagcaggacattgtgttcctgatcgatggctcaggcagcatctcctcccgcaactttgccacgatgatgaacttcgtgagagctgtgataagccagttccagagacccagcacccagttttccctgatgcagttctccaacaaattccaaacacacttcactttcgaggaattcaggcgcagctcaaaccccctcagcctgttggcttctgttcaccagctgcaagggtttacatacacggccaccgccatccaaaatgtcgtgcaccgattgttccatgcctcatatggggcccgtagggatgccgccaaaattctcattgtcatcactgatgggaagaaagaaggcgacagcctggattataaggatgtcatccccatggctgatgcagcaggcatcatccgctatgcaattggggttggattagcttttcaaaacagaaattcttggaaagaattaaatgacattgcatcgaagccctcccaggaacacatatttaaagtggaggactttgatgctctgaaagatattcaaaaccaactgaaggagaagatctttgccattgagggtacggagaccacaagcagtagctccttcgaattggagatggcacaggagggcttcagcgctgtgttcacacctgatggccccgttctgggggctgtggggagcttcacctggtctggaggtgccttcctgtaccccccaaatatgagccctaccttcatcaacatgtctcaggagaatgtggacatgagggactcttacctgggttactccaccgagctggccctctggaaaggggtgcagagcctggtcctgggggccccccgctaccagcacaccgggaaggctgtcatcttcacccaggtgtccaggcaatggaggatgaaggccgaagtcacggggactcagatcggctcctacttcggggcctccctctgctccgtggacgtagacagcgacggcagcaccgacctggtcctcatcggggccccccattactacgagcagacccgagggggccaggtgtctgtgtgtcccttgcccagggggtggagaaggtggtggtgtgatgctgttctctacggggagcagggccacccctggggtcgctttggggcggctctgacagtgctgggggatgtgaatggggacaagctgacagacgtggtcatcggggccccaggagaggaggagaaccggggtgctgtctacctgtttcacggagtcttgggacccagcatcagcccctcccacagccagcggatcgcgggctcccagctctcctccaggctgcagtattttgggcaggcactgagcgggggtcaagacctcacccaggatggactggtggacctggctgtgggggcccggggccaggtgctcctgctcaggaccagacctgtgctctgggtgggggtgagcatgcagttcatacctgccgagatccccaggtctgcgtttgagtgtcgggagcaggtggtctctgagcagaccctggtacagtccaacatctgcctttacattgacaaacgttctaagaacctgcttgggagccgtgacctccaaagctctgtgaccttggacctggccctcgaccctggccgcctgagtccccgtgccaccttccaggaaacaaagaaccggagtctgagccgagtccgagtcctcgggctgaaggcacactgtgaaaacttcaacctgctgctcccgagctgcgtggaggactctgtgacccccattaccttgcgtctgaacttcacgctggtgggcaagcccctccttgccttcagaaacctgcggcctatgctggccgccgatgctcagagatacttcacggcctccctaccctttgagaagaactgtggagccgaccatatctgccaggacaatctcggcatctccttcagcttcccaggcttgaagtccctgctggtggggagtaacctggagctgaacgcagaagtgatggtgtggaatgacggggaagactcctacggaaccaccatcaccttctcccaccccgcaggactgtcctaccgctacgtggcagagggccagaaacaagggcagctgcgttccctgcacctgacatgtgacagcgccccagttgggagccagggcacctggagcaccagctgcagaatcaaccacctcatcttccgtggcggcgcccagatcaccttcttggctacctttgacgtctcccccaaggctgtcctgggagaccggctgcttctgacagccaatgtgagcagtgagaacaacactcccaggaccagcaagaccaccttccagctggagctcccggtgaagtatgctgtctacactgtggttagcagccacgaacaattcaccaaatacctcaacttctcagagtctgaggagaaggaaagccatgtggccatgcacagataccaggtcaataacctgggacagagggacctgcctgtcagcatcaacttctgggtgcctgtggagctgaaccaggaggctgtgtggatggatgtggaggtctcccacccccagaacccatcccttcggtgctcctcagagaaaatcgcacccccagcatctgacttcctggcgcacattcagaagaatcccgtgctggactgctccattgctggctgcctgcggttccgctgtgacgtcccctccttcagcgtccaggaggagctggatttcaccctgaagggcaacctcagctttggctgggtccgccagatattgcagaagaaggtgtcggtcgtgagtgtggctgaaattacgttcgacacatccgtgtactcccagcttccaggacaggaggcatttatgagagctcagacgacaacggtgctggagaagtacaaggtccacaaccccacccccctcatcgtaggcagctccattgggggtctgttgctgctggcactcatcacagcggtactgtacaaagttggcttcttcaagcgtcagtacaaggaaatgatggaggaggcaaatggacaaattgccccagaaaacgggacacagacccccagcccgcccagtgagaaatgatcccctctttgccttggacttcttctcccccgcgagttttccccacttacttaccctcacctgtcaggcctgacggggaggaaccactgcaccaccgagagaggctgggatgggcctgcttcctgtctttgggagaaaacgtcttgcttgggaaggggcctttgtcttgtcaaggttccaactggaaacccttaggacagggtccctgctgtgttccccaaaggacttgacttgcaatttctacctagaaatacatggacaatacccccaggcctcagtctcccttctcccatgaggcacgaatgatctttctttcctttctttttttttttttttcttttcttttttttttttttgagacggagtctcgctctgtcacccaggctggagtgcaatggcgtgatctcggctcactgcaacctccgcctcccgggttcaagtaattctgctgtctcagcctcctgagtagctgggactacaggcacacgccacctcgcccggcccgatctttctaaaatacagttctgaatatgctgctcatccccacctgtcttcaacagctccccattaccctcaggacaatgtctgaactctccagcttcgcgtgagaagtccccttccatcccagagggtgggcttcagggcgcacagcatgagaggctctgtgcccccatcaccctcgtttccagtgaattagtgtcatgtcagcatcagctcagggcttcatcgtggggctctcagttccgatttcccaggctgaattgggagtgagatgcctgcatgctgggttctgcacagctggcctcccgcgttgggcaacattgctggctggaagggaggagcgccctctagggagggacatggccccggtgcggctgcagctcacccagccccaggggcagaagagacccaaccacttctattttttgaggctatgaatatagtacctgaaaaaatgccaagacatgattatttttttaaaaagcgtactttaaatgtttgtgttaataaattaaaacatgcacaaaaagatgcatctaccgctcttgggaaatatgtcaaaggtctaaaaataaaaaagccttctgtgaaaaaaaaaaaaaaaaa

SEQ ID NO: 2746 - DNA, 2698 bp, Homo sapiens
cccggcctggccagggcggagcggcgcccagtagggacccattcattgtgccggcgcctcactgggcacggggcccaagctgacggcgtgcacgggagcctgcggagcctgggtgggaagaacaggcccctggagggcacttgaccttaagcctcttttcctccgcagagaggaagcgggagaggagcccacgtcgcctgtcacccaatatctccagccgcgcagtcccgaagagtgtaagatgttcgcctgcgccaagctcgcctgcaccccctctctgatccgagctggatccagagttgcatacagaccaatttctgcatcagtgttatctcgaccagaggctagtaggactggagagggctctacggtatttaatggggcccagaatggtgtgtctcagctaatccaaagggagtttcagaccagtgcaatcagcagagacattgatactgctgccaaatttattggtgcaggtgctgcaacagtaggagtggctggttctggtgctggtattggaacagtctttggcagccttatcattggttatgccagaaacccttcgctgaagcagcagctgttctcatatgctatcctgggatttgccttgtctgaagctatgggtctcttttgtttgatggttgctttcttgattttgtttgccatgtaacaaattactgcttgacatgttggcattcatattaattacggatgtaattctgtgtatcttactgtgactccgaaaactgtagtattggtgtcatgggaatgtacgttatttccaaagtcatttcattaaagatgaaaactttaatttcttctgtgatttgtacttacactaagtttagattatcacaaagaagaacgtgcattcaggcagatgctgtcccattcagaggaagctacagcagttgctccactgatgaaaaatattccaatgtaatttttatgggaattcttttatatagtgttctgcatattgtaattcatagggcttttgtttattcatataaaggataaatatttgggtgttttgagcttctataaaatatgattaattaaaggtagttaatactcaagatggtcttgagtttttaaggtctaacatcagttagaatacttcaaatcagaatcaccttccaagactgacttgacaggtggttctaaaaataaatcacgtcagctttttaggaaatgaagccttaagctagggggtaatgtgacttttgtttttcagtaagtctcacattaagcaattgtgtgcctctaatgaatcttccatgtcttttcagaacaggctcagtccaactagcagctagtttcttacttgaacaagactattaaaaaccaaatatcaaaaaactgaattggctagatttttacagccaaaaattgctgtaaggcagtgtgtatcactgttgctaacatgtttatagtgggagtcttggggatgatagctggttcaacagtattttgctgctaatactttatgttgcttcttggtcaaacttttcccattcaaaggaagaagatggtgctactatagacagtttttcccctagcaaatatattgtaccataatatctatcatccaagtttcagggttttttgaaagttgataattaggaaagtgacattttacttttcttagtgccctttgcctgtttgatttccattgagaaagagcagtcaccaaagttcctcaagtgtcggaagaccacctccatcagaatcagtgcttgtttaaaaaataaaaatccctaggttccagacctactgaattggactctttggacatgagactcagcaatctacatctttaaaaaggcttcccaggtggtttttgtgcatactgtttgagagtcactaagttatatatatatcctaccttctgtaaagtgaaatgaggccccaaaaagctaaagaggtagagctgctacctcgtttttagttgattcatcatctagtctatatcacccaaaagaattggaaataggtattcaaacaaaaacctgtatacaagtattcatagaagcactacttacaatagccgaaaggtagaaacaaccaaatgtctatcagctgatgaatggataagtaaaatacatccatataatggaatattcagccatgaaaaggaatgaggcactgatacataatgaatagatgtgagtgaaccctaagaaagcatgctaagtggaagaagccagccacatgattccatttatatgaaatatccaaaataggcaaatccacggtgacaaagccaattagtagttatcaggaactagggagggggtgaaaagggagtgactgcgtaatgcgtatggggattccttttaggatgatgaaaattggatgaattacagctggtctgatggtagtgggttatcagaacttattaacattagtgtcattaaagttggtatatagcccctcactgctaaatctggctcaaaaattaaaagattattaaaatttgatgaattagtggtgatggttgcacaacattgtaaatataataaatgtcactgaattgtacactttaaggtggttaaaatggcaaattttacatgtcttactgaaactactatttaatacaaagtacatagtataaaattttaaaagtgataggaaaatgcttagattaatattcacctattccaagtatattttaaataaaaacagtcttggtaaa

SEQ ID NO: 2747 - DNA, 2622 bp, Homo sapiens
gcggcgcgaataagagccggaccgcgcttgcgcattgagtcccactccttcgacctctgccgcagcccgtgccgccgccgcctcctgggaagagaggaagcgggagaggagcccacgtcgcctgtcacccaatatctccagccgcgcagtcccgaagagtgtaagatgttcgcctgcgccaagctcgcctgcaccccctctctgatccgagctggatccagagttgcatacagaccaatttctgcatcagtgttatctcgaccagaggctagtaggactggagagggctctacggtatttaatggggcccagaatggtgtgtctcagctaatccaaagggagtttcagaccagtgcaatcagcagagacattgatactgctgccaaatttattggtgcaggtgctgcaacagtaggagtggctggttctggtgctggtattggaacagtctttggcagccttatcattggttatgccagaaacccttcgctgaagcagcagctgttctcatatgctatcctgggatttgccttgtctgaagctatgggtctcttttgtttgatggttgctttcttgattttgtttgccatgtaacaaattactgcttgacatgttggcattcatattaattacggatgtaattctgtgtatcttactgtgactccgaaaactgtagtattggtgtcatgggaatgtacgttatttccaaagtcatttcattaaagatgaaaactttaatttcttctgtgatttgtacttacactaagtttagattatcacaaagaagaacgtgcattcaggcagatgctgtcccattcagaggaagctacagcagttgctccactgatgaaaaatattccaatgtaatttttatgggaattcttttatatagtgttctgcatattgtaattcatagggcttttgtttattcatataaaggataaatatttgggtgttttgagcttctataaaatatgattaattaaaggtagttaatactcaagatggtcttgagtttttaaggtctaacatcagttagaatacttcaaatcagaatcaccttccaagactgacttgacaggtggttctaaaaataaatcacgtcagctttttaggaaatgaagccttaagctagggggtaatgtgacttttgtttttcagtaagtctcacattaagcaattgtgtgcctctaatgaatcttccatgtcttttcagaacaggctcagtccaactagcagctagtttcttacttgaacaagactattaaaaaccaaatatcaaaaaactgaattggctagatttttacagccaaaaattgctgtaaggcagtgtgtatcactgttgctaacatgtttatagtgggagtcttggggatgatagctggttcaacagtattttgctgctaatactttatgttgcttcttggtcaaacttttcccattcaaaggaagaagatggtgctactatagacagtttttcccctagcaaatatattgtaccataatatctatcatccaagtttcagggttttttgaaagttgataattaggaaagtgacattttacttttcttagtgccctttgcctgtttgatttccattgagaaagagcagtcaccaaagttcctcaagtgtcggaagaccacctccatcagaatcagtgcttgtttaaaaaataaaaatccctaggttccagacctactgaattggactctttggacatgagactcagcaatctacatctttaaaaaggcttcccaggtggtttttgtgcatactgtttgagagtcactaagttatatatatatcctaccttctgtaaagtgaaatgaggccccaaaaagctaaagaggtagagctgctacctcgtttttagttgattcatcatctagtctatatcacccaaaagaattggaaataggtattcaaacaaaaacctgtatacaagtattcatagaagcactacttacaatagccgaaaggtagaaacaaccaaatgtctatcagctgatgaatggataagtaaaatacatccatataatggaatattcagccatgaaaaggaatgaggcactgatacataatgaatagatgtgagtgaaccctaagaaagcatgctaagtggaagaagccagccacatgattccatttatatgaaatatccaaaataggcaaatccacggtgacaaagccaattagtagttatcaggaactagggagggggtgaaaagggagtgactgcgtaatgcgtatggggattccttttaggatgatgaaaattggatgaattacagctggtctgatggtagtgggttatcagaacttattaacattagtgtcattaaagttggtatatagcccctcactgctaaatctggctcaaaaattaaaagattattaaaatttgatgaattagtggtgatggttgcacaacattgtaaatataataaatgtcactgaattgtacactttaaggtggttaaaatggcaaattttacatgtcttactgaaactactatttaatacaaagtacatagtataaaattttaaaagtgataggaaaatgcttagattaatattcacctattccaagtatattttaaataaaaacagtcttggtaaa

SEQ ID NO: 2748 - DNA, 935 bp, Homo sapiens
gaagtgggtaagggtaatatggaggagcttccggcaggccccggcggctgaaagccggggcagaagtgctggtctcggtcgggattccgggcttggtcccaccgaggcggcgactgcggtaggagggaagaggttttggacgcgctggcctcccgccgctgtgcattgcagcattatttcagttcaaaatgaactatatgcctggcaccgccagcctcatcgaggacattgacaaaaagcacttggttctgcttcgagatggaaggacacttataggctttttaagaagcattgatcaatttgcaaacttagtgctacatcagactgtggagcgtattcatgtgggcaaaaaatacggtgatattcctcgagggatttttgtggtcagaggagaaaatgtggtcctactaggagaaatagacttggaaaaggagagtgacacacccctccagcaagtatccattgaagaaattctagaagaacaaagggtggaacagcagaccaagctggaagcagagaagttgaaagtgcaggccctgaaggaccgaggtctttccattcctcgagcagatactcttgatgagtactaatcttttgcccagaggctgttggctcttgaagagtaggggctgtcactgagtgaaagtgacatcctggccacctcacgcatttgatcacagactgtagagttttgaaaagtcacttttatttttaattattttacatatgcaacatgaagaaatcgtgtaggtgggttttttttttaataacaaaatcactgtttaaagaaacagtggcatagactccttcacacatcactgtggcaccagcaactacttctttatattgttcttcatatcccaaattagagtttacagggacagtcttcatttacttgtaaataaaatatgaatctcaaaaaaaaaaaaaaaaaa

SEQ ID NO: 2749 - DNA, 3204 bp, Homo sapiens
ccgtgagtctgaccttaggtgtctcgtgtctggggttgatccgagctgtcgccgccgccgccgcaatgggcaaaacggccaactctccgggttcgggagcccgacccgacccggtgcggagcttcaatcgctggaagaaaaaacacagccataggcagaacaaaaagaagcagttgaggaagcaactgaagaaacccgaatggcaggtcgagcgcgagagtatcagccgcctcatgcagaactatgaaaagataaatgtaaatgaaatcacaagattttcagattttcccttgtccaaaaaaacattgaaaggtttgcaagaagctcagtaccgtttggtgactgagatacagaagcagaccattggattggctttgcaaggtaaagatgtacttggagcggccaaaactggatctggcaagactctggcttttcttgttccagtgctggaagccttatatcgtctgcaatggacttcaacagatgggctgggggttctcataatatcacctacgagagaactggcctatcagacctttgaggttctccgaaaagtaggaaagaatcatgacttctcagctggtctcatcattggtggaaaggatctaaaacacgaagctgagaggatcaacaacataaatatactcgtgtgcacaccaggtcggcttcttcaacacatggatgaaacagtatcttttcatgctaccgacctccaaatgttagttcttgatgaagcagatagaatcttggatatgggctttgctgataccatgaatgctgttattgaaaatctccccaagaaacgtcagactttacttttctcagcaacacaaactaaatctgtaaaggaccttgcacgcttgagtttgaaaaaccctgagtatgtctgggttcatgaaaaagcaaaatatagcacccctgccactttggaacagaactacatagtctgtgagctgcagcaaaaaataagtgtgctgtattcctttttgagaagccatctgaagaagaagagcattgtatttttttccagttgcaaagaggtccagtatctgtaccgagtgttttgccggctacgtcctggtgtttctatccttgcactccatggtcgacagcagcaaatgagaagaatggaagtctataatgagtttgtccgtaagagagctgcagtactctttgctactgatattgcagccaggggtctggatttcccggccgtgaattgggttcttcagtttgattgtcctgaggatgccaacacatatattcacagagcaggtagaactgccaggtacaaagaggatggtgaagctttgctaattttgctaccctcagaaaaagctatggtgcagcagcttcttcagaagaaagtacctgtgaaggaaatcaaaatcaatccagaaaaacttatagatgtccagaaaaaattggaatctattttagctcaagatcaagatttaaaagaaagagctcaaaggtgtttcgtctcctatgtacgatctgtatatctgatgaaggataaagaagtatttgatgtgagcaagttacctatacctgaatatgccctgtctcttggtcttgctgtggcaccacgcgtaagatttcttcagaaaatgcagaaacaacccaccaaagaattggtaaggagccaagccgataaagtaattgagccaagggctccctccctcaccaatgacgaagtggaagaatttagagcctacttcaatgagaaaatgtccatccttcaaaaaggtggaaaaagactcgaagggacagagcacagacaggataatgatactggtaatgaagaacaggaagaagaagaagacgatgaagaagaaatggaagagaaactggcaaaagcaaaaggatctcaagccccatctcttcctaacaccagtgaggcacagaagatcaaggaagttcctacacagttcttggacagagatgaggaggaagaagatgctgatttcttgaaggtgaagcggcataatgtgtttggattggaccttaaagacgagaaaacattacagaagaaagaaccttctaaatccagcatcaagaaaaaaatgaccaaagttgcagaagcaaaaaaagtaatgaagagaaattttaaagtgaataagaagataacatttactgatgaaggggagttggttcagcagtggccacaaatgcagaaatctgccatcaaggatgctgaggaagatgatgacacaggtggtatcaacttacataaagcaaaggaaagacttcaggaagaggacaaatttgacaaagaagaatataggaaaaaaattaaggcaaagcatcgggagaaaagactgaaagaaagggaagccagaagagaagccaacaagagacaagcaaaggccaaagatgaagaggaagcctttctggattggagtgatgatgatgatgatgatgatgatggatttgatccaagcacactcccagatccagataaatacagaagctctgaagattcagatagtgaagatatggaaaataaaataagtgataccaagaagaagcaggggatgaagaagaggagcaacagtgaagtggaagacgtgggaccaacaagtcataacagaaagaaggccaggtgggacactttagagcctttggataccggcctgtctttagcagaggatgaagagctggtgttacatctgctaagaagtcaaagctaaatacttcctgcgcctgccttctccttgaaaccttggttatgactgcgtaggcaagaagttgaaaaacagttgatttgggggcacttaggtaccatatgccccattcccaaagggcacatttctggatagaagcgatcgtatctccaagtccctctcacaggacatgctttgtgccatcactgagcatactcagatcgagggtggatgataccatttcctgaccccgttttccagcatgtgttctgttagatttttatccatgggttcctacgccttgtcattggaaacactgcctttgtcttactggcaagttctggagctcttgtgtcattgttagaaatccctgtcttgcttactgtacagaagtttctgttgctgttaaaattgctcatgatttcgacgtatttaatattttcaaagagactatgatggaccagccctgagaaagaatgagtatttttgaattgagatgatcaataataaacatatttcctataaaaaaaaaaaaaaa

SEQ ID NO: 2750 - DNA, 3750 bp, Homo sapiens
ggcggcgcgcgcggccccggcgagcaggggaagccggtggccgcggctgcggaacgggcggaggctgccggtttcgtaaccgtcgctcctcctcgctgactcgcgggctgtgaggcctgggtcggctcgggccgcaccgcgcggggccgctcggagtggaggccgcctgggggcaggcgggctagaggagcaggtacatgtgaagattttttggcagcttagcgtggaaaccattgatcaccctgctctcatttctacctgttctgtgttggcaagggagagtgcccaaatgagcaagatatcgcagcaaaacagcactccaggggtgaacggaattagtgttatccatacccaggcacatgccagcggcttacagcaggttcctcagctggtgcctgctggccctgggggaggaggcaaagctgtggctcccagcaagcagagcaaaaagagttcgcccatggatcgaaacagtgacgagtatcggcaacgccgagagaggaacaacatggctgtgaaaaagagccggttgaaaagcaagcagaaagcacaagacacactgcagagagtcaatcagctcaaagaagagaatgaacggttggaagcaaaaatcaaattgctgaccaaggaattaagtgtactcaaagatttgtttcttgagcatgcacacaaccttgcagacaacgtacagtccattagcactgaaaatacgacagcagatggcgacaatgcaggacagtagacctcaccctttccagactttagagcttgtggcttgaatgttaaaggtgtgaccaccgacaccactcatgtcaatggctgaaagttgtccatttccatgactcaaagacccattggaggctattttctgggatcagcactgaagagttgattagctaaaaatgttagccttgtaattcgaatatctggttttaaatgatagaggtttttgtgggaatcaaaatcccccaaatgttaaggtatatggtaaaaaaagaaatatctgggatcccgatgttcttaataaatcctgacttcccaagaaatgcttcttttttaagttgacaaaaggaatggggaactggcaggccgcgcagaaggttcttggttttaatggataggctgaattggattaagaaaagttgaatgccacctatggtaatctatttgtgattttcttctaaattatgtattataaattcgtagagctatagaaagcaatgagtgtgtaatttggagtgattttatatatggcataaactttgttttaacataattagtactgttttcccccaaaagtacaagtttttgagtagcaatgtcaggttaagtaaagaaacttcatcacatcttataggtagtgtgtggccaattgacttaaaaaatacaaataacatttaggaagcaaatagattaaacacaaaaataaaactaaagcataggaattatgtttttgagatacctttgggcttagattggcattgttttattctaaaaacccaactcagtggtgtagagaaacttgtgtaccaaaattttagtttctgcagatgctagtgtttttttggatacaattttgacaaccaagttagtaaacaaaatatcttaacagtttgatgacacaagctactgatgagggtttggaatattaattcagaaggtagtttctcttgtgttcaaaatagctgccatggggctgttacttttaaagtcaaaattttcttctgaaggctcattttggtatttgatcttaaccaagtgattattagagaaatgtatcaactccatgccatctcccaaaataattgtctaagaaaacttgaaagtgtaaggttttaacctttaatttatttctcttaaatacatcttttgatattgttgttgtgacatttctttttctggttagtgggctttccagactttgtaccactgcttctgtttattcatttatatgcttttgtgtcccataaattatttcagaaaatgctgataaaactcaggatattgacatttttgttgagactaaaaaatggcagtcgctaaagtagggactctagagtctggcttacgtcagtgttggtagtttagattgtctttgtcaacgttttttcttctctcttttgctttcttttctttctctttttttcttagcacagttctagctcaaatttgtgtattttttgtgtgcctgggctggagatgagagactgagtcataactgatttaaaagtttgtgttatcaggtatcttatttgaacatggtcatttttggccacattgctgtttcatactaggacttgggatgatgtagccagaataaaactcaagttgcaccctccggttggtggaagattgctgaccgtgccgtttctgggcaggagaagacatcatggtgtccagcaactcagcaaagccattcttaagagtcgtgaggtccttctgaatgtaaaactggagcccaggagaagctgtcccaggagggctgttaactccctatagagccaggagacaggataggggtttctagggtccaacaccagcttaccttggagtatgaatctacccatgaaggatgagagatgttttgaaaaactagccaggacacacccacaggatcctactggctccttagcagctgattggtgttacataattaacttaattggagatgcattaggtcacttgaatgtataagcaagcacctatggtaggcgctacagacatttaaatctcttgggaattcgatgctcccatggaatttataccagttatatgaattgacttaagtatcttgaaaaagaaactttagagaaagcatcaggggtgtgtactcagtatttcaaatcagaacacaagattggaacttttggaaaaatgggttcaagctttcctattagccatggaaatgcaaagtttagcagaagcaagcaattaggcagagaacaaaaatgttaagcatggtgttgtctatcttattgaagtggttggaaatgaaagcttttaatttgatagatttatcagtataaaattagggaaaccacgtgtggggaatgaatcaatttagagcttcgggaattgtgaggtgacttttgtaacttttgttctgtgtgtgacctgtgaaccactaggatgtgatctgcccttgtgggcaggtccagcatagttaggagttaggctttagcataaatttctagctgcatctgagtctcctgggatgggtgctctttggctggttttggctgcggatggtgagatcagagcagctcttcctgctgctggcccctgcaatcagttgttgggatgccagtgcagatcactaagtagtaagattttaatcaaacacgaccaggtccgaaatgcaggtcatgagtgtgaaattctcaaatttacataaaaagtagaagtatagacagtttaacatttggtattaaaggagaggaaattgtagcagcttttcacgtttcccagtccccattagagggcttgagaccttgtacctgaacaacccattttgcactcagtgctttctgatgccttaggagaattgttttgtttcacaaaagctgggaaggaagaagtccattctgcagctgttagatctgcctctcaggaaaaagtactaacttgttctttttgttcctggctttcatcagtttgtgagatttctctattttttttaaatataattttatttctttcaacaaatataaaataaaaaacaactttggaacaatgaaaaaaaaaaaaaaa

SEQ ID NO: 2751 - DNA, 3284 bp, Homo sapiens
gagcggtgccgcaccggccgcgggcgcagggagtattatgggctgtgggtgccgctgagcaagatggagctgtctgcagtgggcgagcgggtcttcgcggccgaatccatcatcaaacggcggatccgaaagggacgcatcgagtacctggtgaaatggaaggggtgggcgatcaagtacagcacttgggagcccgaggagaacatcctggactcgcggctcattgcagccttcgaacaaaaggagagggagcgtgagctgtatgggcccaagaagaggggacccaaacccaaaactttcctcctgaaggcgcgggcccaggccgaggccctccgcatcagtgatgtgcatttctctgtcaagccgagcgccagtgcctcctcgcccaagctgcactccagcgcagccgtgcaccggctcaagaaggacatccgccgctgccaccgtatgtcccgccgtcccctgccccgcccggacccgcaggggggcagccccggactgcgcccgcccatttcgcccttctcggagacggtgcgcatcatcaaccgcaaggtgaagccgcgggagcccaagcggaaccgcatcatcctgaacctgaaggtgatcgacaagggcgctggcggcgggggcgccgggcagggggccggggcgctggcccgccccaaagtcccctcgcggaaccgcgttataggcaagagcaagaagttcagcgagagcgtcctgcgtacacagatccgccacatgaagttcggcgcctttgcgctgtacaagcctccgcccgcccccctggtagccccgtcccccggcaaggctgaggcctcagccccgggccctgggctacttctggccgcccccgccgccccctacgacgcccgcagctctggctcctccggctgcccctcgcctacaccacagtcctctgaccccgacgacacgccccccaagctcctccccgagaccgtgagcccatccgcccccagctggcgcgagccggaggtgctcgacctgtccctccctcccgagtcggcagccaccagcaagcgggcaccgcctgaggtcacagctgctgccggcccggcacctcccacggcccctgagcccgccggtgcctcctccgagcccgaggctggggactggcgccccgagatgtcaccctgctccaatgtggtcgtcaccgatgtcaccagcaacctcctgacggtcacaatcaaggaattctgcaaccctgaggatttcgagaaggtggctgctggggtagcaggcgccgctgggggcggtggcagcattggggcgagcaagtgagggggctccaccaaggaggggggcttgggggggccctcctgcccgaagtcatactcttgctcccaccccacccttgcccccagccctctctccctgtgctttgcttgtctcaaatggctcggtgttgacccagggatggggctgggtagttggggtcccagaaagccgggggtaggggccaccctggaatggggcaggggaagggcacaccccctgcccatgcatggtagcccactgggtggtttctggaaagccctagaaactagggttcctctgccccttccacatcccacctgtctctctagcttgcttcctgctctcctgtgcggcgtctgatttctcggtgctaacctggcagctgtggggcccttaggagccccccaccgagggtggacacagtccctttccttcctgcagatgcctaggcaggaggagggcttcctgcctgtttggcaaagtcccaggcagaggccaaggatgaggcctgactcggctcctccctccacatcagccagggcatcagaagttgggccagggcggggtcttccctgctcgattttggacgaggcctaagtagaccccctatgccctgccccagccctggctctttcctaaccccctcaacggtgggaggaactggcagagggtgcgcctggccacagcctccccgcatctaaaggccccttcagttcttgaccaaaggtgctacgagaacctgccgtggaaacttccagttgtgcgtctgccccactcgctgtgtttgtccgtgggttcatacatgcattgggtgctaggccccaggctgccgggtggcaccctttacagttcctttgaacaggggcattgaaggcctggactgcctctcgcctcagtaggcctggggaccaggcttgggtctggaggtttgctgtggaagtcaccaggcctcccctcctggcccaggtgtgctgggggcaccgtgccccccacccccctgccctcctcagggtggtcagcccaacctgtcggaccttcacttcacatcatggtggggaccgagatagagagggagaccccattccaagctccctcttcctcccggtgtttggggaggatgctgaagaatccattcccgagggcctcccggcttgtcccagcccctcttttgcttctgaccacggaggctttctcacagcccagcctgcctgaagcaaaggaggctcccgtgtcctgggcagcttctgtttccctctgctgcctgggagctgaggcacccgtgccagtggcagaggccacagccccagccttaggccaggccctgggagggcaggcaggcaaaggggagaccagagggtctgtgttctccaggagaatgagggtgttggtcccagaattgggaccggggccccgctggccagccctgggccacttcccgggtctccattgtgcgtgggtggcgtgttccaggcgtggctggagctggcttcctggctgtgctgccatgggcccctccctcagaagcacgttggcaggaggccgatcagaaccctagcgcctttggtcctaagaatgggaggctgccttccttcccaatctccctgccagggcccacagcgtggccctagccctcccctccccgggatgtagaacggggaccctcgcagggttggggcgggggctgatactcctcggcccctccctaccctgccctgtgtgttggctttgtggccgtccaagtgccaattggcttttcgcccaaataagggctggtatttctcctctgtccttggaggtgatttccccctgaccccctcccccaggtgagtgaccacctgggtgccagttacaggtgtttccagagaccatagaaatgtgttttcctgagagttcgtgtcattcgtgacttttttgtaaagaagttgtgttttcagaggtgattttatgacaggaaagtgaaagaattagttttgcaaaaaaacaaaaacaaaaaaaaaaaaaaaaaa

SEQ ID NO: 2752 - DNA, 1908 bp, Homo sapiens
catttattaaggactctctgctccagcctctcactctcactctcctccgctcaaactcagctcacttgagagtctcctcccgccagctgtggaaagaactttgcgtctctccagcaatgcatctccttgcgattctgttttgtgctctctggtctgcagtgttggccgagaactcggatgattatgatctcatgtatgtgaatttggacaacgaaatagacaatggactccatcccactgaggaccccacgccgtgcgactgcggtcaggagcactcggaatgggacaagctcttcatcatgctggagaactcgcagatgagagagcgcatgctgctgcaagccacggacgacgtcctgcggggcgagctgcagaggctgcgggaggagctgggccggctcgcggaaagcctggcgaggccgtgcgcgccgggggctcccgcagaggccaggctgaccagtgctctggacgagctgctgcaggcgacccgcgacgcgggccgcaggctggcgcgtatggagggcgcggaggcgcagcgcccagaggaggcggggcgcgccctggccgcggtgctagaggagctgcggcagacgcgagccgacctgcacgcggtgcagggctgggctgcccggagctggctgccggcaggttgtgaaacagctattttattcccaatgcgttccaagaagatttttggaagcgtgcatccagtgagaccaatgaggcttgagtcttttagtgcctgcatttgggtcaaagccacagatgtattaaacaaaaccatcctgttttcctatggcacaaagaggaatccatatgaaatccagctgtatctcagctaccaatccatagtgtttgtggtgggtggagaggagaacaaactggttgctgaagccatggtttccctgggaaggtggacccacctgtgcggcacctggaattcagaggaagggctcacatccttgtgggtaaatggtgaactggcggctaccactgttgagatggccacaggtcacattgttcctgagggaggaatcctgcagattggccaagaaaagaatggctgctgtgtgggtggtggctttgatgaaacattagccttctctgggagactcacaggcttcaatatctgggatagtgttcttagcaatgaagagataagagagaccggaggagcagagtcttgtcacatccgggggaatattgttgggtggggagtcacagagatccagccacatggaggagctcagtatgtttcataaatgttgtgaaactccacttgaagccaaagaaagaaactcacacttaaaacacatgccagttgggaaggtctgaaaactcagtgcataataggaacacttgagactaatgaaagagagagttgagaccaatctttatttgtactggccaaatactgaataaacagttgaaggaaagacattggaaaaagcttttgaggataatgttactagactttatgccatggtgctttcagtttaatgctgtgtctctgtcagataaactctcaaataattaaaaaggactgtattgttgaacagagggacaattgttttacttttctttggttaattttgttttggccagagatgaattttacattggaagaataacaaaataagatttgttgtccattgttcattgttattggtatgtaccttattacaaaaaaaatgatgaaaacatatttatactacaaggtgacttaacaactataaatgtagtttatgtgttataatcgaatgtcacgtttttgagaagatagtcatataagttatattgcaaaagggatttgtattaatttaagactatttttgtaaagctctactgtaaataaaatattttataaaactaaaaaaaaaaaaaaaaaaaaaaaaaaaaaaaaaaaaa

SEQ ID NO: 2753 - DNA, 1210 bp, Homo sapiens
ggcggcggttgcggaggcttccttggtcggattgcaacgaggagaagatgactgaccaaccgactggctgaatgaatgaatggcggagccgagcgcgccatgaggagcctgccgagcctgggcggcctcgccctgttgtgctgcgccgccgccgccgccgccgccgccgtcgcctcagccgcctcggcggggaatgtcaccggtggcggcggggccgcggggcaggtggacgcgtcgccgggccccgggttgcggggcgagcccagccaccccttccctagggcgacggctcccacggcccaggccccgaggaccgggcccccgcgcgccaccgtccaccgacccctggctgcgacttctccagcccagtccccggagaccacccctctttgggcgactgctggaccctcttccaccacctttcaggcgccgctcggcccctcgccgaccacccctccggcggcggaacgcacttcgaccacctctcaggcgccgaccagacccgcgccgaccaccctttcgacgaccactggcccggcgccgaccacccctgtagcgaccaccgtaccggcgcccacgactccccggaccccgacccccgatctccccagcagcagcaacagcagcgtcctccccaccccacctgccaccgaggccccctcttcgcctcctccagagtatgtatgtaactgctctgtggttggaagcctgaatgtgaatcgctgcaaccagaccacagggcagtgtgagtgtcggccaggttatcaggggcttcactgtgaaacctgcaaagagggcttttacctaaattacacttctgggctctgtcagccatgtgactgtagtccacatggagctctcagcataccgtgcaacagttctgggaaatgccagtgcaaagtgggtgtcattggctctatatgtgaccgatgccaagatggatattatggctttagtaagaatggctgcttgccctgccaatgcaataatcggtctgccagttgcgatgccctcacaggtacgtactttccttaactttgtcatgtaattattccactgttcttttaatttggaaatctttcagctataggttgattcttctgaaatagtttggaagggcctttatcttctaagtaggatgtactagatcacagcaagccaaactcctgctacaacaaacttgaaaaagtacgtaaattaaaaaaaaaaa

SEQ ID NO: 2754 - DNA, 2275 bp, Homo sapiens
gtgcgcccggtggcggtggcggcggcggttgcggaggcttccttggtcggattgcaacgaggagaagatgactgaccaaccgactggctgaatgaatgaatggcggagccgagcgcgccatgaggagcctgccgagcctgggcggcctcgccctgttgtgctgcgccgccgccgccgccgccgccgccgtcgcctcagccgcctcggcggggaatgtcaccggtggcggcggggccgcggggcaggtggacgcgtcgccgggccccgggttgcggggcgagcccagccaccccttccctagggcgacggctcccacggcccaggccccgaggaccgggcccccgcgcgccaccgtccaccgacccctggctgcgacttctccagcccagtccccggagaccacccctctttgggcgactgctggaccctcttccaccacctttcaggcgccgctcggcccctcgccgaccacccctccggcggcggaacgcacttcgaccacctctcaggcgccgaccagacccgcgccgaccaccctttcgacgaccactggcccggcgccgaccacccctgtagcgaccaccgtaccggcgcccacgactccccggaccccgacccccgatctccccagcagcagcaacagcagcgtcctccccaccccacctgccaccgaggccccctcttcgcctcctccagagtatgtatgtaactgctctgtggttggaagcctgaatgtgaatcgctgcaaccagaccacagggcagtgtgagtgtcggccaggttatcaggggcttcactgtgaaacctgcaaagagggcttttacctaaattacacttctgggctctgtcagccatgtgactgtagtccacatggagctctcagcataccgtgcaacaggtaagcaacagagggtggaactgaagtttattttattttagcaaggggaaaaaaaaggctgctactctcaaggaccatactggtttaaacaaagggggatgagggtcatagatttacaaaatattttatatacttttattctcttactttatatgttatatttaatgtcaggatttaaaaacatctaatttactgatttagttcttcaaaagcactagagtcgccaatttttctctgggataatttctgtaaatttcatgggaaaaaattattgaagaataaatctgctttctggaagggctttcaggcatgaaacctgctaggaggtttagaaatgttcttatgtttattaatataccattggagtttgaggaaatttgttgtttggtttatttttctctctaatcaaaattctacatttgtttctttggacatctaaagcttaacctgggggtaccctaatttatttaactagtggtaagtagactggttttactctatttaccagtacatttttgagaccaaaagtagattaagcaggaattatctttaaactattatgttatttggaggtaatttaatctagtggaataatgtactgttatctaagcatttgccttgtactgcactgaaagtaattattctttgaccttatgtgaggcacttggctttttgtggaccccaagtcaaaaaactgaagagacagtattaaataatgaaaaaaataatgacaggttatactcagtgtaacctgggtataacccaagatctgctgccacttaggagctgtgttccttgggcaagtaatttcctttcactgagcttgtttcttctcaaggttgttgtgaagattaaatgagttgatatatataaaatgcctagcacatgtcactcaataaattctggtttgttttaatttcaaaggaatattatggactgaaatgagagaacatgttttaagaacttttagctccttgacaaagaagtgctttatactttagcactaaatattttaaatgctttataaatgatattatactgttatggaatattgtatcatattgtagtttattaaaaatgtagaagaggctgggcgcggtggctcacgcctgtaatcctagcactttgggaggccaaggcgggtggatcacttgaggccaggagttctagatgagcctggccagcacagtgaaaccccgtctctactaaaaatacaaacaaattagctgggcgtggtggcacacacctgtagtcccagctactcgggaggctgaggcaggagaatcggttgaacccgggaggtggaggttgcagtgagctgagatcgcgccactgcactccagcctggtgagagagggagactctgtcttaaaaaaa

SEQ ID NO: 2755 - DNA, 1210 bp, Homo sapiens; identical to SEQ ID NO: 2753

SEQ ID NO: 2756 - DNA, 2275 bp, Homo sapiens; identical to SEQ ID NO: 2754

SEQ ID NO: 2757 - DNA, 2123 bp, Homo sapiens
tagctgatcatgtgacaatccaagatggcggtgcccggcgaggcggaggaggaggcgacagtttacctggtagtgagcggtatcccctccgtgttgcgctcggcccatttacggagctattttagccagttccgagaagagcgcggcggtggcttcctctgtttccactaccggcatcggcctgagcgggcccctccgcaggccgctcctaactctgccctaattcctaccgacccagccgctgagggccagcttctctctcagacttcggccaccgatgtccggcctctctccactcgagactctactccaatccagacccgcacctgctgctgcgtcatctcggtaagggggttggctcaagctcagaggcttattcgcatgtactcgggccgccggtggctggattctcacgggacttggctaccgggtcgctgtctcatccgcagacttcggctacctacggaggcatcaggtctgggcccctttcccttcaagacccggaaggaactgcagagttggaaggcagagaatgaagccttcaccctggctgacctgaagcaactgccggagctgaacccaccagtgctgatgcccagagggaatgtggggactcccctgcgggtctttttggagttgatccgggcctgccgcctaccccctcggatcatcacccagctgcagctccagttccccaagacaggttcctcccggcgctacggcaatgtgccttttgagtatgaggactcagagactgtggagcaggaagagcttgtgtgtacagcagagggtgaagaaataccccaaggaacctacctggcagatataccagccagcccctgtggagagcctgaggaagaagtggggaaggaagaggaagaagagtctcactcagatgaggacgatgaccggggtgaggaatgggaacggcatgaagcgctgcatgaggacgtgaccgggcaggagcggaccactgagcagctctttgaggaggagattgagctcaagtgggagaagggtggctctggcctggtgttttatactgatgcccagttctggcaggaggaagaaggagattttgatgaacagacagccgatgactgggatgtggacatgagtgtgtactatgacagagatggtggagacaaggatgcccgagactctgtccaaatgcgtctagaacagagactccgagatggacaggaagatggctctgtgatcgaacgccaggtgggcacctttgagcgccacaccaagggcattgggcggaaggtgatggagcggcagggctgggctgagggccagggcctgggctgcaggtgctcaggggtgcctgaggccctggatagtgatggccaacaccccagatgcaagcgtggattggggtaccatggagagaagctacagccatttgggcaactgaagaggccccgtagaaatggcttggggctcatctccaccatctatgatgagcctctaccccaagaccagacggagtcactgctccgccgccagccacccaccagcatgaagtttcggacagacatggcctttgtgaggggttccagttgtgcttcagacagcccctcattgcctgactgaccgggttgggggcttcctttcatagctacatgatgaaaaccctctgccctggcctcatctaccactgaagcagaaaggagtctgggagcagcagtcttcgtggctggttcagggtgttttgttccgagcctgcctgcctgccggttctatacctcaggggcatttttacaaaaagccccctcccgtcccctccccttggatattaggggtaacgaccgcttgtctttggtctctaaccctaatctctgggcttgccctttgcctcctgcagaactttgaaaagctgggttgagtgaggctatcagcacagccttccttggggactctgaaggtgtccccacgaaggccagaaagggggaaagggacctgggcgaggagaggatttgtggtgcttggaagagccggccttgggtgggccctccaccgcctctaccctcactgggtgggactgccagcggagagtccgcgggaggtggcttgggtgtgcgacgtcacggaagaataaagacgtttactactgg

SEQ ID NO: 2758 - DNA, 3862 bp, Homo sapiens
gctgagaggcgcgtactgtgcttgctttttgcagtacctgctgcggccgctttcggcatggaggaaatttatgcgaagtttgtgtcccagaaaatcagcaaaacccgctggcgaccgctgcctccgggaagtttacagaccgcggagacgttcgctacaggatcttgggacaatgaggaaaattatatttcactgtggtctattggagattttggaaacttggactctgatggagggtttgaaggagaccatcagttattgtgtgatatcagacaccatggtgatgtaatggatttacagttttttgaccaggaaagaattgtcgctgcttcatcaacaggatgtgtaacagttttccttcaccatccaaataaccagactctgtcagtcaaccagcagtggactacagctcactaccacacaggccctggcagtccttcctatagcagtgcaccatgtacaggtgttgtgtgcaacaacccagaaatcgttacagttggagaggatggtcgaataaatctcttcagagctgatcacaaggaagctgtaagaaccatagacaatgcagatagtagtacactccatgctgtaacctttcttcgaactcctgagattcttactgtaaattcaattggacagttgaaaatatgggatttcagacaacaaggaaatgagccttctcagatattgtcactgactggtgaccgagtgccactccactgtgttgatagacatcccaaccaacagcatgttgtagctactggtggccaagatggaatgttgagtatttgggatgttagacaaggtactatgcctgtatctctgctgaaggctcatgaagctgaaatgtgggaagttcactttcacccatccaacccagaacatctttttacctgctctgaagatggatccctctggcactgggatgcttccacagatgtacctgaaaagtcgtcactctttcaccaaggaggaagaagcagtacttttttgtctcatagcattagtaaccaagctaatgttcaccagtctgtcattagctcctggctcagcactgatcctgcaaaagaccgaattgaaatcacaagcttacttcccagtaggtctctgtctgtgaacactttggatgttttaggtccttgtcttgtttgtggaaccgatgcagaagcaatttatgttactagacatcttttttcgtagaagtactataattataagatttcagatagaacatgcaattagccttttgaaatccaacttctgtgcaaaattttagtatcagaaaatacgagatttgcaggggaaacatcagtaaactaccattaatgtcaatgcccagttttgacttttgttagcctgacactcccaaacagttgtagaatccgatagatgactgatggcaaaagattgtgaacatgtggaagaaaatcagtgggattctggtgctgatgaataggttgccttcagagtattattgacagacagcttgtggaactaattctttatttttgatgttgtgggaattaacacatcaatggtggttatgggaactaccaatgggttcctacaatttttatcagtagtatgtggcatatacaccttcctagtggcagttgccaatgttaatgattattctttttattgcaagtatttcctatgatccttccacactttatttccttaataataataaactttttcagaaagaattgagtagagcaaaaatgacaaagatgtgtagctgtgttcaatttttttttttttttttttttgaggcagagtcttgctctgctggagtgcggtggtgcaatctcggctcactgcaacctccacctcccaggttcaagcaattctcctgcctcagtctcctgagtagctggaactacaggtgtgcgccaccacgcccagctaatttttgtaattttagtagagacagagtttcaccatgttggccaggatggtctcgatctcttgacctcatgatccacccgcctcgacctcccaaagtgctgtgattacaggtgtgagccactgcacccggcctgaaatttttttaaggtgaaaatgttttgacaagttcctttttcagaataggtttttgagcagaactctttcagcttgttagacccaactttgcttttgtttagcttcacagcatagctgaaagttgccaaactggacattgtgcaataaagtagaattctatattgataagcaaactatttccaaactaaaaatgtgatagataaaagtgtgattaatcaaatgatatgatcagagtaaagaattttgccattttgatccttttactttgttttagccacctatagtgttaccaaccatctttatccttgtctgcagggataataatgaactaatgtagtgttttaagataatttaatgatactatctttccaaactttgttagattttaaatgtattattgacctgagaccttaatgacaaatcactgctattagacaattgaagtgttcatttactttgtaattccaataatcatagttatggaattatggtaaggttttgcttttctgtcctaataaatatatatattttttgagatggagttttgctcttgttgctgaggctggagtgaaatggcatgatctcagctcactgcaacctccgtctcttaggttcaagcaattctcctgcctcagcctcccgagtagctgggattacaggtgctcaccaccacacccagctaatttttgtatttttagtagagatggggtttcactgtgttggccaggctggtcttgaactgacctcatgatccacctgcctcagcctcccaaaatgctgggattacaggcttgagccactgctcccggctgatttttgtattagtagagacgacagggtttcaccatgttggccagggctggtctcgaactcctgaccacaggtaatcagcccgcctcggcctcccaaagtgctgggattacaggcgtgagccacttagtatttgtaaccataagagaaagtatattttaacagcattacatttcatgccaattgacaagttttgccaattttaataagaaactaagctttatgtaatgtaacaccgtaatttatgaatttgttcattgtcactgcctttattcatgaaactgtcaaatagagtgtctttcaagggttgcaggatcttagagatagaaagtaccttggtgatcatctccagcctaaatttcatcatcccttctatggtattcccaacaaattatcatccaacctatacttaaaaacatatggtggccaggcatggtggctcacgcctgtaatgctagcactttgggaggccgaggtgggtgaagcacctgaggtcaagagttcgagatcagcctggccaacatggcgaaaccccgtctccactaaaaatgcaaaaaaaaaattaaccgggcgtggtggcaggcatctataatcccagctacttgggaggctgaggcaggagaattgctcaaacccgggaggcagaggttgcagtgacccaagatcgtgccacttcactccagcctgggcaaaagagcaaaacgccatctcaaaaaatatacatatataaggagataaagtttcccattttccaatacagtttcacatttgaacagccctaattgatacaactttatggcagggttttagtgtgtgagtgggatccaaaacactcaatcctgtaaaagggtacagtcctattgtatgttaacacactgatgatgtgagcctgtgagatgagccaatcaccagttgttatgttcgaatctgctttgtgttgggacgctttaatgtcagggtttcactaaataaatgaattttcatatactgaaaaaaaaaaaaaaaa

SEQ ID NO: 2759 - DNA, 3254 bp, Homo sapiens
ggagcgagagcccggcgatggcggctgcgccggccttgaagcactggcgcaccacgctggagcgggtggagaagttcgtgtcgccgctctactttaccgactgtaacctccgcggcaggctttttggggccagctgccctgtggctgtgctctccagcttcctgacgccggagagacttccctaccaggaggcagtccagcgggacttccgccccgcgcaggtcggcgacagcttcggacccacatggtggacctgctggttccgggtggagctgaccatcccagaggcatgggtgggccaggaagttcacctttgctgggaaagtgatggagaaggtctggtgtggcgtgatggagaacctgtccagggtttaaccaaagagggtgagaagaccagctatgtcctgactgacaggctgggggaaagagacccccgaagcctcactctctatgtggaagtagcctgcaatgggctcctgggggccgggaagggaagcatgattgcagcccctgaccctgagaagatgttccagctgagccgggctgagctagctgtgttccaccgggatgtccacatgctcctggtggatctggagctgctgctgggcatagccaagggcctcgggaaggacaaccagcgcagcttccaggccctgtacacagccaatcagatggtgaacgtgtgtgaccctgcccagcccgagaccttcccagtggcccaggccctggcctccaggttctttggccaacatgggggtgaaagccaacacaccattcatgccacagggcactgccacattgatacagcctggctttggcccttcaaagagactgtgaggaaatgtgcccggagctgggtgaccgccctgcagctcatggagcggaaccctgagttcatctttgcctgctcccaggcgcagcagctggaatgggtgaagagccgctaccctggcctgtactcccgcatccaggagtttgcgtgccgtgggcagtttgtgcctgtggggggcacctgggtggagatggatgggaacctgcccagtggagaggccatggtgaggcagtttttgcagggccagaacttctttctgcaggagtttgggaagatgtgctctgagttctggctgccggacacctttggctactcagcacagctcccccagatcatgcacggctgtggcatcaggcgctttctcacccagaaattgagctggaatttggtgaactccttcccacaccatacatttttctgggagggcctggatggctcccgtgtactggtccacttcccacctggcgactcctatgggatgcagggcagcgtggaggaggtgctgaagaccgtggccaacaaccgggacaaggggcgggccaaccacagtgccttcctctttggctttggggatgggggtggtggccccacccagaccatgctggaccgcctgaagcgcctgagcaatacggatgggctgcccagggtgcagctatcttctccaagacagctcttctcagcactggagagtgactcagagcagctgtgcacgtgggttggggagctcttcttggagctgcacaatggcacatacaccacccatgcccagatcaagaaggggaaccgggaatgtgagcggatcctgcacgacgtggagctgctcagtagcctggccctggcccgcagtgcccagttcctatacccagcagcccagctgcagcacctctggaggctccttcttctgaaccagttccatgatgtggtgactggaagctgcatccagatggtggcagaggaagccatgtgccattatgaagacatccgttcccatggcaatacactgctcagcgctgcagccgcagccctgtgtgctggggagccaggtcctgagggcctcctcatcgtcaacacactgccctggaagcggatcgaagtgatggccctgcccaaaccgggcggggcccacagcctagccctggtgacagtgcccagcatgggctatgctcctgttcctccccccacctcactgcagcccctgctgccccagcagcctgtgttcgtagtgcaagagactgatggctccgtgactctggacaatggcatcatccgagtgaagctggacccaactggtcgcctgacgtccttggtcctggtggcctctggcagggaggccattgctgagggcgccgtggggaaccagtttgtgctatttgatgatgtccccttgtactgggatgcatgggacgtcatggactaccacctggagacacggaagcctgtgctgggccaggcagggaccctggcagtgggcaccgagggcggcctgcggggcagcgcctggttcttgctacagatcagccccaacagtcggcttagccaggaggttgtgctggacgttggctgcccctatgtccgcttccacaccgaggtacactggcatgaggcccacaagttcctgaaggtggagttccctgctcgcgtgcggagttcccaggccacctatgagatccagtttgggcacctgcagcgacctacccactacaatacctcttgggactgggctcgatttgaggtgtgggcccatcgctggatggatctgtcagaacacggctttgggctggccctgctcaacgactgcaagtatggcgcgtcagtgcgaggcagcatcctcagcctctcgctcttgcgggcgcctaaagccccggacgctactgctgacacggggcgccacgagttcacctatgcactgatgccgcacaagggctctttccaggatgctggcgttatccaagctgcctacagcctaaacttccccctgttggctctgccagcccccagcccagcgcccgccacctcctggagtgcgttttccgtgtcttcacccgcggtcgtattggagaccgtcaagcaggcggagagcagcccccagcgccgctcgctggtcctgaggctgtatgaggcccacggcagccacgtggactgctggctgcacttgtcgctgccggttcaggaggccatcctctgcgatctcttggagcgaccagaccctgctggccacttgacccttcgggacaaccgcctgaagctcaccttttctcccttccaagtgctgtccctgttgctcgtgcttcagcctccgccacactgagtccctggggctggggttttgtttgtagaaggctctggggactcctaatttctgcttccccagcctaaagcagggatcagtcttttcttgtggaataaatccttggatcgggaa

SEQ ID NO: 2760 - DNA, 1863 bp, Homo sapiens
gggaaaactatcgtccagaccctgaatcctccggctgtactgccaagtcatttcctagggccgcactcaaggtgtcagactcacgtgggctcatcactgcgtcctctcatattttcaatatgaatgacttttatcaggaaatctgaaaattagtgaaaggttcatttttctcagcatccggaaggctcgaagggcaggcaggaggggcgcgaacaggggctttgccctcctggagagacagcatgaacacagatgttcccagcgcaggcgaaggagaatgctggcttcagcggttgtgggggaggtaggcaggaatgttgcttttctggacattcgttctaaattagcgcctgtgtacccagggctgggtataaactgaggagtaagacattgtccctgctcctatggagcgtggagtgcatcagaggagacaaatgcagaaaaattacattttagtggagtaaatgaagactggctactcggatcggcgcttagcctggtgggacgccaggcacgggaagcggaacctaagtgtcgaagacacagagattgactggaaggcctacatggccgaggtagaaggcgtcatcaatggtacctatgactatacccaactgcagggtgacaccggaccacttgtgtacccagctggtttcgtgtacatctttatggggttgtactatgccaccagccgaggcactgacatccgcatggcccagaacatctttgctgtgctctacctggctaccttgctgcttgtcttcttgatctatcaccagacctgcaaggtacctcccttcgtctttttcttcatgtgctgcgcctcttaccgtgtccactccatctttgtgctgcggctcttcaatgacccagtggccatggtgctgctcttcctcagtatcaacctcctgctggcccagcgctggggctggggttgctgctttttcagcctggcagtctctgtgaagatgaatgtgctgctcttcgcccctgggttactgtttcttctcctcacacagtttggcttccgtggggccctccccaagctgggaatctgtgctggccttcaggtggtgctggggctgcccttcctgctggagaaccccagcggctacctgtcccgctcctttgaccttggccgccagtttctgttccactggacagtgaactggcgcttcctcccagaggcgctcttcctgcatcgagccttccacctggccctgttgactgcccacctcaccctgctcctgctgtttgccctctgcaggtggcacaggacaggggaaagtatcttgtcgctgctgagggatccctccaaaaggaaggttccaccccagccccttacacccaaccagatcgtttctaccctcttcacctccaacttcattggcatctgcttcagccgctccctccactaccagttctacgtctggtatttccacacactgccctacctcctgtgggccatgcctgcacgctggctcacacacctgctcaggttgttggtgctggggctcatcgagctctcctggaacacatacccttccacatcctgcagctctgctgccctgcacatatgccatgccgtcatcctgctgcagctctggctgggcccgcagcctttccccaagagcacccaacacagcaagaaagcccactgaagtccacccctttccctcaggacctgagtctaccctcaggacctggggttggttggactctgcccttccaaataaaccttgctaagtccaactctgtgcaacctacatggaggtgggggcagccgatgcctggtccaggctgtgagggacacgtatggagcagataaagaattcactcaagcagtaaaaaaaaaaaaaaaaa

SEQ ID NO: 2761 - DNA, 1627 bp, Homo sapiens
gggaaaactatcgtccagaccctgaatcctccggctgtactgccaagtcatttcctagggccgcactcaaggtgtcagactcacgtgggctcatcactgcgtcctctcatattttcaatatgaatgacttttatcaggaaatctgaaaattagtgaaaggttcatttttctcagcatccggaaggctcgaagggcaggcaggaggggcgcgaacaggggctttgccctcctggagagacagcatgaacacagatgttcccagcgcaggcgaaggagaatgctggcttcagcggttgtgggggagacacagagattgactggaaggcctacatggccgaggtagaaggcgtcatcaatggtacctatgactatacccaactgcagggtgacaccggaccacttgtgtacccagctggtttcgtgtacatctttatggggttgtactatgccaccagccgaggcactgacatccgcatggcccagaacatctttgctgtgctctacctggctaccttgctgcttgtcttcttgatctatcaccagacctgcaaggtacctcccttcgtctttttcttcatgtgctgcgcctcttaccgtgtccactccatctttgtgctgcggctcttcaatgacccagtggccatggtgctgctcttcctcagtatcaacctcctgctggcccagcgctggggctggggttgctgctttttcagcctggcagtctctgtgaagatgaatgtgctgctcttcgcccctgggttactgtttcttctcctcacacagtttggcttccgtggggccctccccaagctgggaatctgtgctggccttcaggtggtgctggggctgcccttcctgctggagaaccccagcggctacctgtcccgctcctttgaccttggccgccagtttctgttccactggacagtgaactggcgcttcctcccagaggcgctcttcctgcatcgagccttccacctggccctgttgactgcccacctcaccctgctcctgctgtttgccctctgcaggtggcacaggacaggggaaagtatcttgtcgctgctgagggatccctccaaaaggaaggttccaccccagccccttacacccaaccagatcgtttctaccctcttcacctccaacttcattggcatctgcttcagccgctccctccactaccagttctacgtctggtatttccacacactgccctacctcctgtgggccatgcctgcacgctggctcacacacctgctcaggttgttggtgctggggctcatcgagctctcctggaacacatacccttccacatcctgcagctctgctgccctgcacatatgccatgccgtcatcctgctgcagctctggctgggcccgcagcctttccccaagagcacccaacacagcaagaaagcccactgaagtccacccctttccctcaggacctgagtctaccctcaggacctggggttggttggactctgcccttccaaataaaccttgctaagtccaactctgtgcaacctacatggaggtgggggcagccgatgcctggtccaggctgtgagggacacgtatggagcagataaagaattcactcaagcagtaaaaaaaaaaaaaaaaa

SEQ ID NO: 2762 - DNA, 1500 bp, Homo sapiens
aagcggcgcaccgttaagatggcggctgggctgcggaaacgcggccggtccggttccgcggcccaggcagagggactctgcaagcaatggctgcagcgcgcctggcaagagcggcgcctgctgctgcgggagccgcgctacacgctgctggtggccgcctgcctctgcctggcggagacacagagattgactggaaggcctacatggccgaggtagaaggcgtcatcaatggtacctatgactatacccaactgcagggtgacaccggaccacttgtgtacccagctggtttcgtgtacatctttatggggttgtactatgccaccagccgaggcactgacatccgcatggcccagaacatctttgctgtgctctacctggctaccttgctgcttgtcttcttgatctatcaccagacctgcaaggtacctcccttcgtctttttcttcatgtgctgcgcctcttaccgtgtccactccatctttgtgctgcggctcttcaatgacccagtggccatggtgctgctcttcctcagtatcaacctcctgctggcccagcgctggggctggggttgctgctttttcagcctggcagtctctgtgaagatgaatgtgctgctcttcgcccctgggttactgtttcttctcctcacacagtttggcttccgtggggccctccccaagctgggaatctgtgctggccttcaggtggtgctggggctgcccttcctgctggagaaccccagcggctacctgtcccgctcctttgaccttggccgccagtttctgttccactggacagtgaactggcgcttcctcccagaggcgctcttcctgcatcgagccttccacctggccctgttgactgcccacctcaccctgctcctgctgtttgccctctgcaggtggcacaggacaggggaaagtatcttgtcgctgctgagggatccctccaaaaggaaggttccaccccagccccttacacccaaccagatcgtttctaccctcttcacctccaacttcattggcatctgcttcagccgctccctccactaccagttctacgtctggtatttccacacactgccctacctcctgtgggccatgcctgcacgctggctcacacacctgctcaggttgttggtgctggggctcatcgagctctcctggaacacatacccttccacatcctgcagctctgctgccctgcacatatgccatgccgtcatcctgctgcagctctggctgggcccgcagcctttccccaagagcacccaacacagcaagaaagcccactgaagtccacccctttccctcaggacctgagtctaccctcaggacctggggttggttggactctgcccttccaaataaaccttgctaagtccaactctgtgcaacctacatggaggtgggggcagccgatgcctggtccaggctgtgagggacacgtatggagcagataaagaattcactcaagcagtaaaaaaaaaaaaaaaaa

SEQ ID NO: 2763 - DNA, 1537 bp, Homo sapiens
aagcggcgcaccgttaagatggcggctgggctgcggaaacgcggccggtccggttccgcggcccaggcagagggactctgcaagcaatggctgcagcgcgcctggcaagagcggcgcctgctgctgcgggagccgcgctacacgctgctggtggccgcctgcctctgcctggcggaggtgggcatcaccttctgggtcattcacagggtggcatacacagagattgactggaaggcctacatggccgaggtagaaggcgtcatcaatggtacctatgactatacccaactgcagggtgacaccggaccacttgtgtacccagctggtttcgtgtacatctttatggggttgtactatgccaccagccgaggcactgacatccgcatggcccagaacatctttgctgtgctctacctggctaccttgctgcttgtcttcttgatctatcaccagacctgcaaggtacctcccttcgtctttttcttcatgtgctgcgcctcttaccgtgtccactccatctttgtgctgcggctcttcaatgacccagtggccatggtgctgctcttcctcagtatcaacctcctgctggcccagcgctggggctggggttgctgctttttcagcctggcagtctctgtgaagatgaatgtgctgctcttcgcccctgggttactgtttcttctcctcacacagtttggcttccgtggggccctccccaagctgggaatctgtgctggccttcaggtggtgctggggctgcccttcctgctggagaaccccagcggctacctgtcccgctcctttgaccttggccgccagtttctgttccactggacagtgaactggcgcttcctcccagaggcgctcttcctgcatcgagccttccacctggccctgttgactgcccacctcaccctgctcctgctgtttgccctctgcaggtggcacaggacaggggaaagtatcttgtcgctgctgagggatccctccaaaaggaaggttccaccccagccccttacacccaaccagatcgtttctaccctcttcacctccaacttcattggcatctgcttcagccgctccctccactaccagttctacgtctggtatttccacacactgccctacctcctgtgggccatgcctgcacgctggctcacacacctgctcaggttgttggtgctggggctcatcgagctctcctggaacacatacccttccacatcctgcagctctgctgccctgcacatatgccatgccgtcatcctgctgcagctctggctgggcccgcagcctttccccaagagcacccaacacagcaagaaagcccactgaagtccacccctttccctcaggacctgagtctaccctcaggacctggggttggttggactctgcccttccaaataaaccttgctaagtccaactctgtgcaacctacatggaggtgggggcagccgatgcctggtccaggctgtgagggacacgtatggagcagataaagaattcactcaagcagtaaaaaaaaaaaaaaaaa

SEQ ID NO: 2764 - DNA, 4955 bp, Homo sapiens
ggctggccgaagttaggcggagccccgaggcgggggaggcggggccgggccggcgcagggagagtcactcaatggacaggcgagaaagcaggaccggcgcggcggggcggggccggccgagtccctagagctgggggcggggcggacccagcggaccagcggaccacctgggtgctgtcgtagttggaggtggcctgaggagctcagttccctcagcgcccgtagcttcggcggagtctgcgcgatgggcgacccggaaaggccggaagcggccgggctggatcaggatgagagatcatcttcagacaccaacgaaagtgaaataaagtcaaatgaagagccactcctaagaaagagttctcgccggtttgtcatctttccaatccagtaccctgatatttggaaaatgtataaacaggcacaggcttccttctggacagcagaagaggtcgacttatcaaaggatctccctcactggaacaagcttaaagcagatgagaagtacttcatctctcacatcttagccttttttgcagccagtgatggaattgtaaatgaaaatttggtggagcgctttagtcaggaggtgcaggttccagaggctcgctgtttctatggctttcaaattctcatcgagaatgttcactcagagatgtacagtttgctgatagacacttacatcagagatcccaagaaaagggaatttttatttaatgcaattgaaaccatgccctatgttaagaaaaaagcagattgggccttgcgatggatagcagatagaaaatctacttttggggaaagagtggtggcctttgctgctgtagaaggagttttcttctcaggatcttttgctgctatattctggctaaagaagagaggtcttatgccaggactcactttttccaatgaactcatcagcagagatgaaggacttcactgtgactttgcttgcctgatgttccaatacttagtaaataagccttcagaagaaagggtcagggagatcattgttgatgctgtcaaaattgagcaggagtttttaacagaagccttgccagttggcctcattggaatgaattgcattttgatgaaacagtacattgagtttgtagctgacagattacttgtggaacttggattctcaaaggtttttcaggcagaaaatccttttgattttatggaaaacatttctttagaaggaaaaacaaatttctttgagaaacgagtttcagagtatcagcgttttgcagttatggcagaaaccacagataacgtcttcaccttggatgcagatttttaaaaaacctctcgttttaaaactctataaacttgtcattggtaaatagtagtctattttcctctgcttaaaaaaaattttaagtatatcctttaaaggactgggggtttgctcaaaaggaaatccaaaacctattctaaacaatttgcatttatataattttcctgtttaacaacaagagtgtgacctaaatgcttttgtcttgtcactgaaataaaagatggcattatgtggttaagagcatggggcgaggggtcagacatgagtctaaggttctgcccttactccagtgtgtgacccttggcaagtcagttaatcttggtaaacctcggtgtacttatctttaaaatgggagtaatagtaggtcctaaattcatagagtggatattaggattaggatgcaaaaataaatgcttaaccaacactactactgttagcaccactactaattatcattcattgataatattaattgcaatgatgttgtaataaaatactctcatttccttaaaataattgtgattctaggtcctaggatctagaattagatctttgtatttttaatgcttaggggaagaatataagtatctccttaaaaagaacataattctcattcacgcaagaataagttctttgaattccttagtatgtagtgaagaaaatttagttgttagttgctttgggaagcctacttatggagtggaaaccaggaggttatcatggtagttgaccttataagaaaaatgattcttcttcagaaattaaaaacataactattgccagatttagctctggaatgtttagaatcaggctagaatagcattttccaaagaatattctaagagctattagctcctctagatatttttttgggggaaaaaggggattctgtggtcagatgagtttgggaaatgctgaacacttcattcttctttagcaagtacagtcagtacatcaaagactgagcagttcagtggtacataaatttatctcgccctgcatattcccaacatacttaacacagatgttttttacctgttaacatctcacccagctagtgttcctcagaacaaagattggaaaaagctggccgagaaccatttatacatagaggaagggcttatggactgagaaagggagaacatggtagggattattgaatcatttcaaatttataccagcctgaatagtgtaccagcaattgacttaggctgtgtttctttatggttttaaaactcttgagctgttataagagatagttcttttaatgtgactatgcaacatgatagccaatggtgagggaaaaggaggtttctctagaagagtctgatgaaaggccgggaaccaaggtttttgagaagtctgcccctatttatttttagtaagtatcaagaggtagcctgagcctagttagagttagacctgtctttggatgaagaagtcttaatactgaaatactgaatttttaatacattattatttggtattctgtataccccttcaagcagttgtttcccattcccaacaaactgtactttatacaattctggatgctaaaacttagagattttctctttgcataaattttggctccattctttccataacaatctaatcaaaactgggagttctcaagtgaatgcaaaaggagcaggccataactttatttgttagatacactgtcagaaacttgagatcttttggcctatgataataccattaatttttgcattgcttcagtttgccaagtgtttttacatcatctcatttgatctcaaaacagcttgacagagcaactgttattgaaatattacagatggaaagaatgaggctcagggaagttaaatgacttggccaagatctgctcatcgtcactgtctgtacagtatttttttttagaggttgtaatgtctcagatttagtcctttaccatctatgttgatttgcttttgtctatttcctcattaattgaatatactttaaatatatatattaaagtatcaaaatatagagagacatttgaactgtattcaggtaatatgtttaaagatatttatatattgccatacaaaaacttaacatttaaaactgataatatctgtaatgacatcagaatgaaagaaaaaaaattgtacagtgtatattcctttgttttgaatccaaatctttttcataggtaatgacagatgccttaatgtgaagcttatttataatagcaataaacctaactggatttggatgaagaagtcttaatactgacatactggatttttaatgcactggtttgttatttggtattctatctctttttccaggcctccaggttgcacatttatttattatgttcaatactttggttcttagttcttaaagaatcaagaagttgtgtaatcttttaaaaatattatcttgcagataaagaaaaaaattaagagtgtgtttacaactgttttctcttttttacagtacatgtatttaaatcattgctataataaagttaagttcattaggaatataaaaacttgcagttctatgatagattgcatttattaaaaatgtttcattgtatcacatagaaatatggccaggaaggacttgagaagacagtttgatccattgcttttagacaggactgggttttgctgtccaattatatacaataatagtttttcttacaactaagctggccccagccttgtcttgatattaatacatgaaatttttataattgtctcattgtctcatttagaaacatccatatttttctgctttttctattgccattttttatttgtgcatgaattgattattgagaaaatgtagcagtttgcatatttaaaaattaatcattttgcattttacatttaaatatgctaacatcactgtcatagaattcccaaatttcatttgtagatactgaactaagggctaatgtcaggagctgatttttaatgataaagctgcagatgggctaaataaaagccaaattaatcctacaatcaggtattatgtttttaaaccaagttgagtgaattggtagtggacttgggaaatcttccccagcagaatctggatgaatggcacagaattgaaatctctttgtttcccaccatttccctttaagtgctctgctcctttgtaaaaagttaaagatttgaaagagaatctcatattcccgaggcattaggaagaaaggatttaatcccttcaatttggggcttaatcttgtttaaaaaaatgtaagtgaagatggaaggctggagagaatgattgctttttgtacagttaaataaggtcacaatattcttacatactttgttttacaactgtgttttcattttttcaaatgtctggccatttagcaaagttatttactatttactgtgtacatagaaagctttattatgtgtggtgtatctaaattttttttgctgaaatacattatggtcaatcaagccaagcctgcatgtacagaatttgtttttttttcaaataaattagttgttttcttatttttttggcttagtatgttgaaataaactatggtatcttcatcattttgtacatttcctttttgaggaaggtttctttataagtgcaagggctaccctaataaaggaatgtatatacttaaaaaaaaaaaaaaaaaaaaaaaaaa

SEQ ID NO: 2765 - DNA, 4591 bp, Homo sapiens
gtgaactgttgcaccgtgcaattgcacactataaatgtctttccttatctgtgtgtactcttatctcactgttctattttttctcctcatttatattaactctttcttacctttttttctgaacttctaggccttctctttccagaactggtggaagacaaatgaaacggccaagatggtaagaaacaagccgcatttctccttggggagactgataatttaaaaggtttgttgtgtcagaaacattcccagcttcatcaccaaccctttccttccacctctgcccactggagaccacttacatcccgaagcggacgcggcagctgaagtcaggaaaccatgcatcacattagcaggagccaactgcagactttaaactccgttcaacatgtggatgcggcagagaaatgacctgtccagacaagccggggcagctcataaactggttcatctgctccctgtgcgtcccgcgggtgcgtaagctctggagcagccggcgtccaaggacccggagaaaccttctgctgggcactgcgtgtgccatctacttgggcttcctggtgagccaggtggggagggcctctctccagcatggacaggcggctgagaaggggccacatcgcagccgcgacaccgccgagccatccttccctgagatacccctggatggtaccctggcccctccagagtcccagggcaatgggtccactctgcagcccaatgtggtgtacattaccctacgctccaagcgcagcaagccggccaatatccgtggcaccgtgaagcccaagcgcaggaaaaagcatgcagtggcatcggctgccccagggcaggaggctttggtcggaccatcccttcagccgcaggaagcggcaagggaagctgatgctgtagcacctgggtacgctcagggagcaaacctggttaagattggagagcgaccctggaggttggtgcggggtccgggagtgcgagccgggggcccagacttcctgcagcccagctccagggagagcaacattaggatctacagcgagagcgccccctcctggctgagcaaagatgacatccgaagaatgcgactcttggcggacagcgcagtggcagggctccggcctgtgtcctctaggagcggagcccgtttgctggtgctggaggggggcgcacctggcgctgtgctccgctgtggccctagcccctgtgggcttctcaagcagcccttggacatgagtgaggtgtttgccttccacctagacaggatcctggggctcaacaggaccctgccgtctgtgagcaggaaagcagagttcatccaagcagcagcagcagcgtgtctttccatgcgcttggcattctttattttcccagcctgggaggatatgagagttccagggaaatgctgtattggacatgcaaggctcacctggggaacttatcagcagttgctgaaacagaaatgctggcagaatggccgagtacccaagcctgaatcaggttgtactgaaatacatcatcatgagtggtccaagatggcactctttgattttttgttacagatttataatcgcttagatacaaattgctgtggattcagacctcgcaaggaagatgcctgtgtacagaatggattgaggccaaaatgtgatgaccaaggttctgcggctctagcacacattatccagcgaaagcatgacccaaggcatttggtttttatagacaacaagagtttctttgacaggagtgaagataacttaaacttcaaattgttagaaggcatcaaagagtttccagcttctgcagtttctgttttgaagagccagcacttacggcagaaacttcttcagtctctgtttcttgataaagtgtattgggaaagtcaaggaggtagacaaggaattgaaaagcttatcgatgtaatagaacacagagccaaaattcttatcacctatatcaatgcacacggggtcaaagtattacctatgaatgaatgacaaaagaatcttctggctagggtgttagatatatttatgcatttttggttttgtttttaaatcaagcacatcaacctcaagcccgtttagcaatgaggcagtgtagatgaatacgtaaaataaatgactttaaccaagtagctataatgggacttagcactgtatgcatacttaaaaaggttttgaaaaacaaactacttgagaaatatttgtttatatttttctctaacatcatgctatgtgtcagtctgaacatctgacaacagaaatttcagttattattctagctaagttttgaaaacatttgtcatgctgtttaatagaaaactgcaaaccagagatactgactccattaataaaccatattttgtgccgttttgactgttctgaccaaatactaatgggaacaattcttgacgtttttctgttgctgattgttaacatagagcagtctctacactaccctgaggcaactctacattggaacactgaggcttacagcctgcaagagcatcagagctgaccatacatttaaacagaaatgctggtttatttgcaaaatcaccagtatattttctattgtgtctataaaaaatcagtcatttaagtacaagaatcatattttccattcctttttagaaatttattttgttgtccctatggaaatcattcacatctgacaatttatatgttaaagagttttactctctctattttggtccaatttgtatctagtggctgagaaattaaataattctaaagtatgaagttacctatctgaaaatgtacttacagagtatcattttaaaatggatgtctctttaaaaattttgttacttttaccaacaatgtaatataatttatgtatattttattaataatagtgaattccttaaaatttgttctatgtacttatatttaatttgatttaatggttactgcccagatattgagaaatggttcaaatattgagtgtgtttcaatatattatctggcttatttcaacatgagtaatatgagcaaaataagttaaaacctgcgtctgatcaattttcctcatgactagaactaaaacagtaaatttggacaatattaagcctcaaataatcatctccaaactcattctaacactttttaaatcagattggaagacatggacaaatcaggttcatgtgttgcatctttatgtcctttgccaatatccaagatcatcacatatggtagatattcacatggagtttcaaattcagaatagattaccattaccttcctgcccttacacatcctactccttatttaaaagttctatttgtgacttttcatttcctgaaagtttaaaaatacaatttgagaatgtttataatacattctctcctgtcttttcacggttacgtctgttatttctgaaatacaccacattttctttgttctggtcaaggttaactcaatatctgtgtgaaagagaactactaacaacgttacaatagaggctagatttgaaaaaaaaaatctatagatctaattgatacaattgtagaacaaaatgtcaaaataatgttttaagtataagagaagatggaccaaggagagagagatcatttgaaaatctaattgtagcttttctaggctcacattcatgtactacttttagcacccttatgggctgtgctcgccccctggacagttgagctttggattatcttcctcttcaattttccctctattgacccgagtgtctccctctgcttctacagatttatagtactccttggctcttttgagtctccacttttactcactgtctctgggatttttaagatccttttcttctcttataaatcatcctcttaatgaaaattagcctaacaaaagtttggagactggaatcctactttgagccactgacttgaaataactcttttggcaagttgcctgacatcctgtcttaccaaggtggcatatttgcatttttactgcttaaaacattttttttttttaccatctttatccaaatttatcatattgatggtaggactaacaggctttttagaagctggctttaactttgagtctcaagctacaatgctgttgggcagcctggtcttcccacgtgagggtttaactttgtttatttgcctccagttattcctaaatgcttattaaatgaaaggcccaggaacatgtttattttagtcacctttgctttttaacaattttgttttgtaatcaatgagtaattcatgatgaattatttttgactaatggatagccgaaggccaagcttttaattctaataggtaatgttcttcttttgtcttattgaaacaatgagaatactctgtgcatttcaaatgcactccgattatgctgtggttttattcacataagcacaatatgtgttttatttataacttcataacaaacttataatataataatttaccttagcagacatgcaaaagcttattcttgtgtgacttactttctttaagctaataatataaaaataaatatgtatcttaaaaatctataataaaacattagaaattaaaaaaaaaaaaaaaaaaaaaaaaaaaaaaaaaagaaaaaaaaaaaaaaaa

SEQ ID NO: 2766 - DNA, 4652 bp, Homo sapiens
ggcattagagtcaaggattacattcttcctggagccaagcatggggccagctgtaaacaagccgcatttctccttggggagactgataatttaaaaggtttgttgtgtcagaaacattcccagcttcatcaccaaccctttccttccacctctgcccactggagaccacttacatcccgaagcggacgcggcagctgaagtcaggaaaccatgcatcacattagcaggagccaactgcagactttaaactccgttcaacatgtggatgcggcagagaaatgacctgtccagacaagccggggcagctcataaactggttcatctgctccctgtgcgtcccgcgggtgcgtaagctctggagcagccggcgtccaaggacccggagaaaccttctgctgggcactgcgtgtgccatctacttgggcttcctggtgagccaggtggggagggcctctctccagcatggacaggcggctgagaaggggccacatcgcagccgcgacaccgccgagccatccttccctgagatacccctggatggtaccctggcccctccagagtcccagggcaatgggtccactctgcagcccaatgtggtgtacattaccctacgctccaagcgcagcaagccggccaatatccgtggcactgtgaagcccaagcgcaggaaaaagcatgcagtggcatcggctgccccagggcaggaggctttggtcggaccatcccttcagccgcaggaagcggcaagggaagctgatgctgtagcacctgggtacgctcagggagcaaacctggttaagattggagagcgaccctggaggttggtgcggggtccgggagtgcgagccgggggcccagacttcctgcagcccagctccagggagagcaacattaggatctacagcgagagcgccccctcctggctgagcaaagatgacatccgaagaatgcgactcttggcggacagcgcagtggcagggctccggcctgtgtcctctaggagcggagcccgtttgctggtgctggaggggggcgcacctggcgctgtgctccgctgtggccctagcccctgtgggcttctcaagcagcccttggacatgagtgaggtgtttgccttccacctagacaggatcctggggctcaacaggaccctgccgtctgtgagcaggaaagcagagttcatccaagatggccgcccatgccccatcattctttgggatgcatctttatcttcagcaagtaatgacacccattcttctgttaagctcacctggggaacttatcagcagttgctgaaacagaaatgctggcagaatggccgagtacccaagcctgaatcaggttgtactgaaatacatcatcatgagtggtccaagatggcactctttgattttttgttacagatttataatcgcttagatacaaattgctgtggattcagacctcgcaaggaagatgcctgtgtacagaatggattgaggccaaaatgtgatgaccaaggttctgcggctctagcacacattatccagcgaaagcatgacccaaggcatttggtttttatagacaacaagggtttctttgacaggagtgaagataacttaaacttcaaattgttagaaggcatcaaagagtttccagcttctgcagtttctgttttgaagagccagcacttacggcagaaacttcttcagtctctgtttcttgataaagtgtattgggaaagtcaaggaggtagacaaggaattgaaaagcttatcgatgtaatagaacacagagccaaaattcttatcacctatatcaatgcacacggggtcaaagtattacctatgaatgaatgacaaaagaatcttctggctagggtgttagatatatttatgcatttttggttttgtttttaaatcaagcacatcaacctcaagcccgtttagcaatgaggcagtgtagatgaatacgtaaaataaatgactttaaccaagtagctataatgggacttagcactgtatgcatacttaaaaaggttttgaaaaacaaactacttgagaaatatttgtttatatttttctctaacatcatgctatgtgtcagtctgaacatctgacaacagaaatttcagttattattctagctaagttttgaaaacatttgtcatgctgtttaatagaaaactgcaaaccagagatactgactccattaataaaccatattttgtgccgttttgactgttctgaccaaatactaatgggaacaattcttgacgtttttctgttgctgattgttaacatagagcagtctctacactaccctgaggcaactctacattggaacactgaggcttacagcctgcaagagcatcagagctgaccatacatttaaacagaaatgctggtttatttgcaaaatcaccagtatattttctattgtgtctataaaaaatcagtcatttaagtacaagaatcatattttccattcctttttagaaatttattttgttgtccctatggaaatcattcacatctgacaatttatatgttaaagagttttactctctctattttggtccaatttgtatctagtggctgagaaattaaataattctaaagtatgaagttacctatctgaaaatgtacttacagagtatcattttaaaatggatgtctctttaaaaattttgttacttttaccaacaatgtaatataatttatgtatattttattaataatagtgaattccttaaaatttgttctatgtacttatatttaatttgatttaatggttactgcccagatattgagaaatggttcaaatattgagtgtgtttcaatatattatctggcttatttcaacatgagtaatatgagcaaaataagttaaaacctgcgtctgatcaattttcctcatgactagaactaaaacagtaaatttggacaatattaagcctcaaataatcatctccaaactccttctaacactttttaaatcagattggaagacatggacaaatcaggttcatgtgttgcatctttatgtcctttgccaatatccaagatcatcacatatggtagatattcacatggagtttcaaattcagaatagattaccattaccttcctgcccttacacatcctactccttatttaaaagttctatttgtgacttttcatttcctgaaagtttaaaaatacaatttgagaatgtttataatacattctctcctgtcttttcacggttacgtctgttattgctgaaatacaccacattttctttgttctggtcaaggttaactcaatatctgtgtgaaagggaactactaacaacgttacaatagaggctagatttgaaaaaaaaaatctatagatctaattgatacaattgtagaacaaaatgtcaaaataatgttttaagtataagagaagatggaccaaggagagagagatcatttgaaaatctaattgtagcttttctaggctcacattcatgtactacttttagcacccttatgggctgtgctcgccccctggacagttgagctttggattatcttcctcttcaattttccctctattgacccgagtgtctccctctgcttctacagatttatagtactctttggctcttttgagtctccacttttactcactgtctctgggatttttaagatccttttcttctcttataaatcatcctcttaatgaaaattagcctaacaaaagtttggagactggaatcctactttgagccactgacttgaaataactcttttggcaagttgcctgacaccctgtcttaccaaggtggcatatttgcatttttactgcttaaaacatttttttttttttaccatccttatccaaatttatcatattgatggtaggactaacaggctttttagaagctggctttaactttgagtctcaagctacaatgctgttgggcagcctggtcttcccacgtgagggtttaactttgtttatttgcctccagttattccaaaatgcttattaaatgaaaggcccaggaacatgtttattttagtcacctttgctttttaacaattttgttttgtaatcaatgagtaattcatgatgaattatttttgactaatggatagccgaaggccaagcttttaattctaataggtaatgttcttcttttgtcttattgaaacaatgagaatactctgtgcatttcaaatgcactccgattatgctgtggttttattcacataagcacaatatgtgttttatttataacttcataacaaacttataatataataatttaccttagcagacatgcaaaagcctattcttgtgtgacttactttctttaagctaataatataaaaataaatatgtatcttaaaaatctataataaaacattagaaattaaagatatgtgctttttattttgcagatgagttcatttgcttctgtagatgtgttttcagagctaggtacagaggaatgtttgctacctttagcggtgaaaaaagaaagagagtcaagaattttgttggattgtgtttgtgtgtgcatatatttgatatcatcatcatatttgtaatctttggacttgtaatcatagcctgtttattctactgtgccattaaatatactttaccttatacataacgaaaaaaaaaaaaaaaaaa

SEQ ID NO: 2767 - DNA, 3098 bp, Homo sapiens
cgggaggttcggagcgggagctcgggctcgcggacggtatggaggactacgagcaggagctgtgcggcgtcgaggatgatttccacaaccagttcgcggccgagctggaggtgctggcagagctggaaggggcgtcgactccgtcgccctccggggtccccctgttcaccgcgggccgacccccgcggacgttcgaggaggcccttgccagaggggacgcggcctccagtcccgccccagccgcatctgtgggcagcagccagggcggcgccaggaagaggcaggtggacgccgacctgcagccggccgggtccctgccccacgcccccaggatcaaacggcctaggctgcaggtggtcaagaggctgaacttcaggtcggaggagatggaggagccgccccctcccgactcctcgccgacggacatcaccccgccgccgagccctgaggacctcgcagagctttggggccacggagtctcagaagctgctgccgacgtgggtctcacacgggcctcaccagctgcccgcaatcccgtcctgaggcggccccccatcttggaggactacgtccacgtgacatccacggagggcgtccgggcttatctggtgctgcgtgctgaccccatggccccgggggtgcagggctctctcctccacgtcccatggcgaggcggtggccagctggacctgctgggtgtgtccttagcctccctgaagaagcaggtcgacggcgagcggcgggagcggctgcttcaggaggcccagaagctttcagacaccctgcacagtctcaggtcgggggaggaggaggcagcccagcccttgggggcccctgaggaggagccgactgacggtcaagacgcctccagtcactgcctctgggtggatgagtttgcaccccgccactacacggagctgctcagtgatgacttcaccaaccgctgcctgctcaagtggctgaagttgtgggacctggtggtgtttggccacgagaggccttcccggaagcccaggcccagtgttgagccggcccgggtcagcaaggaggccacagccccaggcaagtggaagagccacgaacaggtgctggaggagatgctggaggctgggctggacccgagccagcgaccgaagcagaaggtggcactgctctgtgggcccccggggctggggaagaccaccctggcacacgtgattgcgcgtcacgcggggtactctgtggtggagatgaacgccagtgacgaccgtagcccggaggtcttccgcacacgcatcgaggcggccacccagatggagtcggtgctgggtgctggcgggaagcccaactgcctggtcatcgatgagatcgacggggcccccgtggccgccatcaacgtcctcctgagcatcctgaaccgcaaggggccacaggaggtggggccacagggcccggctgtgccttcgggaggcggccgacggcgccgggcagagggggggctcctcatgaggcccattatctgcatttgcaatgaccagttcgcaccgtccctgcggcagctgaagcagcaggccttcctgctccacttcccgccgactctgccctcgaggctggtgcagcggctccaggaggtctccctgcggcagggcatgagggccgacccaggggtgctggccgccctctgtgagaaaactgacaatgacatccgggcctgcatcaacaccctgcagttcctgtacagccggggccagcgggagctgagcgtgcgggacgtgcaggccacacgcgtgggcctcaaggaccagcgcagagggctcttctcggtgtggcaggaggtcttccagctgcctcgagcccagaggcgccgtgtgggccaggaccccgccctgcctgctgacacactcctgctgggtgacggggacgcgggctccctcacctccgcctcacagcgattctaccgtgtcctgcatgccgctgcctctgcgggcgagcacgagaaggtggtccagggcttgtttgacaacttcctgcgtctgcggctgcgagactccagcctgggtgctgtgtgtgtggccctcgactggctggccttcgatgacctgctggcgggggctgctcatcacagccagagcttccagctgctgcgctacccacccttcctgcccgtggccttccatgtgctgtttgcttccagccacacacccaggatcaccttccccagcagccagcaggaggcccagaaccggatgagccagatgaggaacctgatccagacgctggtgtccggcatcgcgccagccacgcgcagccgggccacgccccaggccctgctcctcgatgccctctgcctgctcctggacattcttgcacccaagctccgccccgtgagcacacagctgtacagcacccgtgaaaagcaacagctggccagcctggtgggcacgatgctcgcttacagcctgacctaccgccaggagcgcacgcccgatggccagtacatctacaggctggagccgaacgtggaggaactctgccgcttccctgagctgcctgcccgcaagcccctcacctaccagacgaagcagctcatcgcccgcgagatcgaggtggagaagatgcggcgggcggaggcttctgcccgggtagagaacagcccccaggtggatgggagccccccagggctcgagggtctgctggggggcattggggagaaaggggtgcaccgacctgccccacgcaaccatgagcagcggctggagcacatcatgaggcgagcggcccgggaggaacagcctgagaaggacttctttggacgtgtggtcgtcaggagcacagcagtcccgagtgcaggggacacggccccggagcaggactcagtggagcggcgcatgggcacagcggtgggcaggagcgaggtctggttccgcttcaacgagggtgtttccaacgccgtgcggcgcagcctgtacatcagggacttgctttagttttttgagccgcggacatgccctcgcattgcttcccgcagagtgcagagacaggaagctggagatgtctttataaagtcacacctttacaggctgtaaaaaaaaaaaaaaaaaaaaaaaaaaaaaaaaaaa

SEQ ID NO: 2768 - DNA, 1920 bp, Homo sapiens
acaatcctttgcggtggttcaagatggcggcgcccagtggcactgtgagcgattcggaaagtagtaacagcagtagcgatgcggaggagctggagcggtgccgcgaggcggcaatgccggcttggggcttggagcaacgcccgcacgtggcagggaagccaagagccggtgctgcaaatagccagttgtcaacctcccaaccgagcctcaggcataaggtgaatgagcatgaacaagatggcaacgagcttcagaccacccctgaattccgagcccacgtagccaagaagctgggagccctgctggacagcttcattaccatctcagaagcagcaaaggagccagcaaaagctaaggtacagaaagtcgctttggaggatgatggtttccgccttttcttcacatctgtccctggaggccgtgagaaggaagagtctccccaaccccgccgaaagcgacagccctccagctccagtgaggacagtgacgaggagtggcggcggtgccgggaggcagctgtgtcggcgtccgacatcctacaggagtcagccatccacagccctggaactgtggagaaggaggcaaagaagaaaaggaagttgaaaaagaaagccaagaaggtggccagtgtcgactcggctgtcgctgccaccacccccaccagcatggccacagtccagaagcagaagtcaggtgagctcaacggggaccaggtgtcgcttgggaccaaaaagaagaaaaaggcaaagaaggccagcgagacctctccattcccaccagcaaagagtgctacagctatacctgcaaactgaacccagccatgggcacagggctcagccagctccaaggacaaggtgtcccccccaccctggggacaaggcatttccaagccccacctccctctccaagttcaaggactgggctggcaaacccagactgcccatgagaccctgatggtgatgaaggcttgctcgagagttgggccaaaaaagtggctgtagggtgagaagaccaatcaaggcctgcccctctgtgctcccacggagggctggcgggggcgctgtggttccagaacatttcatgacctcaggaaaaaaggaaccttccagttatttgagactagtggccaagtggtgaaacctccatctccctagaactgtctgaggtgggcaggggaagggagaccttccccaccacctccttagcctggtgtgagaaacagtttttagaaaatgagagaagggatccccaagaggccaaggcccagagaaacttttgttcttctctccttggcccacatagacttcacagaatcgtctgagaaaggagagctttttcacccctggctttctagaattttctttgtctgcatttgtgaatataccacacatgatggtgtctctgagccgaccagattatggaaactcaattgtcagaggacccaaaacaaaacttagagtgatttggatattgcctctctgtcaatgctgaaccttaagacattttaagtaaacatcctcctcctctctacacccccaggatttgtgcgttcaccccacccaagacttcaggaagtgtcatagcactcgtggactaggtttcatgggacaaaggcattctgcaagaagtagaagcttgtggccgggtgcagtggctcatgcctgtaatccaagcattttgagaggccaaggaggtggatcaattgaggccaggagtttgagaccagcctggccaacatggcgagaccccatctctactaaaaatacaaaaattagctgagcatgttgacacacgcccgtaatcccagctactcaggaggctgaggtgggagaatcgcttgaacccaggaggtgcaggttgcagtgagccgagattgcgccactgcactctagcctaagcaatggagcaagaccctatctc

SEQ ID NO: 2769 - DNA, 8469 bp, Homo sapiens
atggcggcggcggcgggcggcggcagttgccccgggcctggctccgcgcggggccgcttcccgggccggccgcggggcgccggcgggggcgggggccgcggcggacggggcaacggggccgaaagagtgcgggtagctctgcggcgcggcggtggcgcgacggggccgggcggagccgagcccggggaggacacggccctgctccgtttgctggggctccgccggggcctgcgccggctccgccgcctgtgggccggcccgcgggtccagcggggccggggacggggtcggggccggggctggggcccgagtcgaggctgcgtgccggaggaggagagcagtgacggggaatccgacgaggaggagtttcagggttttcattcagatgaagatgtggcccccagttccctgcgctctgcgctccgatcccagcgaggtcgagcgccccgaggtcggggtcgcaagcataagacgaccccccttcctcctcctcgcctagcagatgtggctcctacccccccaaagacccctgcccggaaacggggtgaggaaggcacagaacggatggtgcaggcactgactgaacttctccggcgggcccaggcaccccaagcaccccggagccgggcatgtgagccctccaccccccggcggtctcggggacggcccccaggacggccagcaggcccctgcaggaggaagcagcaagcagtagtggtggcagaagcagctgtgacaatccccaaacctgagcccccacctcctgtggttccagtgaaacatcagactggcagctggaaatgcaaggaggggcccggtccaggacctgggacccccaggcgtggaggacagtcaagccgtggaggccgtggaggcaggggccgcggccgaggtggtgggctcccctttgtgatcaagtttgtttcaagggccaaaaaagtaaagatgggacaattgtccttgggactcgaatcaggtcaaggtcaaggtcaacatgaggaaagttggcaggatgtcccccaaagaagagttggatctggacagggagggagcccttgctggaaaaagcaggaacagaagctggatgacgaggaagaagagaagaaagaagaagaagaaaaagacaaggagggagaagagaaggaagaaagagctgtagctgaggagatgatgccagctgcggaaaaggaagaggcaaagctgccaccaccgcctctgactcctccagccccttcacctcctccacccctcccacccccttcgacatctcctccacccccactctgccctccaccaccacccccagtgtccccaccacctctaccatcccctccaccgcctcctgcccaagaggagcaggaggaatcccctcctcctgtggtcccagctacgtgctccaggaagaggggccggcctcccctgactcccagccagcgggcggagcgggaagctgctcgggcagggccagagggcacctctcctcccactccaacccccagcaccgccacgggaggccctccggaagacagtcccaccgtggcccccaaaagcaccaccttcctgaagaatatccggcagtttattatgcctgtggtgagtgcccgctcctcccgtgtcatcaagacaccccggcgatttatggatgaagacccccccaaacccccaaaggtggaggtctcacctgtcctgcgacctcccattaccacctccccacctgttccccaggagccagcaccagtcccctctccaccacgtgccccaactcctccatctaccccagttccactccctgagaagagacggtccatcctaagggaacccacatttcgctggacctcactgacccgggagctgccccctcctcccccagcccctccacctcccccggccccctccccaccccctgctcctgccacctcctcccggaggcccctactccttcgggcccctcagtttaccccaagcgaagcccacctgaagatctacgaatcggtgcttactcctcctcctcttggggctcctgaagcccctgagccagagcctcctcctgccgatgactctccagctgagcctgagcctcgggcagtgggccgcaccaaccacctcagcctgcctcgattcgcccctgtggtcaccactcctgttaaggccgaggtgtcccctcacggggctccagctctgagcaacgggccacagacacaggctcagctactgcagcccctgcaggccttgcaaacccagctcctgccccaggcactaccgccaccacagccacagctgcagccaccgccgtcaccacagcagatgcctcccctggaaaaagcccggattgcgggcgtgggttccttgccgctgtctggggtagaggagaagatgttcagcctcctcaagagagccaaagtgcagctattcaagatcgatcagcagcagcagcagaaggtggcagcttccatgccgctgagccctggagggcagatggaggaggtggccggggctgtcaagcagatctccgacagaggccctgtccggtctgaagatgagtcggtggaagctaagagagagcggccctcaggtcccgagtcccctgtgcaaggtccccgcatcaaacatgtctgccgtcatgctgctgtggccctgggtcaggcccgggccatggtgcctgaagatgtccctcgcctcagtgccctccctctccgggatcggcaggacctcgccacagaggatacatcatcggcgtccgagactgagagtgtcccgtcacggtcccggcggggaaaggtggaggcagcaggccctgggggagaatcagagcccacaggttctggagggaccctggcccacacaccccggcgctcactgccctcccatcacggcaagaagatgcgcatggctcgatgtggacactgtcggggctgcctacgtgtgcaggactgtgggtcctgtgtcaactgcctagacaagcccaagtttgggggccctaacaccaagaagcagtgctgtgtataccggaagtgtgacaaaatagaggctcggaagatggaacgactggctaaaaaaggccggacgatagtgaagacgctgttgccctgggattccgatgaatctcctgaggcctcccctggtcctccaggcccacgccggggggcgggagctggggggccccgggaggaggtggtggcccacccagggcccgaggagcaggactccctcctgcagcgcaagtcagctcggcgctgcgtcaaacagcgaccctcctatgatatcttcgaggattcggatgactcggagcccgggggcccccctgctcctcggcgtcggaccccccgagaaaatgagctgccactgccagaacctgaggagcagagccggccccgcaaacctaccctgcagcctgtgttgcagctcaaggcccgaaggcgcctggacaaggatgctttggcccctggcccctttgcttcttttcccaatggctggactggaaagcagaagtctcccgatggtgtgcaccgcgtccgtgtggattttaaggaggattgtgatttagagaacgtgtggctgatggggggcctgagtgtgctcacctctgtgccagggggccccccgatggtgtgcttgctgtgtgccagcaaaggactccacgagctggtgttctgtcaagtctgctgtgacccattccacccattctgcctggaggaggccgagcggcccctgccccagcatcacgacacctggtgctgccgtcgctgcaaattctgccacgtctgtggacgcaaaggtcgtggatccaagcacctcctggagtgcgagcgctgccgccatgcataccacccggcctgtctggggcccagctatccaacccgggccacgcgcaaacggcgccactggatctgttcagcctgtgtgcgctgtaagagctgtggggcaactccaggcaagaactgggacgtcgagtggtctggagattacagcctctgccccaggtgcacccagctatatgagaaaggaaactactgcccgatctgtacacgctgctatgaagacaacgactatgagagcaagatgatgcagtgcgcacagtgcgatcactgggtgcatgccaagtgcgaggggctctcagatgaagactacgagatcctttcaggactgccagactcggtgctgtacacctgcggaccgtgtgctggggcagcgcagccccgctggcgagaggccctgagcggggccctccaggggggcctgcgccaggtgctccagggcctgctgagctccaaggtggtgggcccactgctgctctgcacccagtgtgggccagatgggaagcaactgcacccaggaccctgcggcctgcaagctgtgagtcagcgcttcgaggatggccactacaagtctgtgcacagcttcatggaggacatggtgggcatcctcatgcggcactcggaggagggagagaccccggaccgccgggctggaggccagatgaaggggctcctgctgaagctgctagaatctgcgttcggctggttcgacgcccacgaccccaagtactggcgacggagtacccggctgccaaacggagtccttcccaatgcggtgttgcccccatccctggatcatgtctatgcgcagtggagacagcaggaaccagagaccccagaatcagggcagcctccaggggatccctcagcagcattccagggcaaggatccggctgccttctcacacctggaggacccccgtcagtgtgcactctgcctcaaatacggggatgcagactccaaggaggcggggcggctcttgtacatcgggcagaacgagtggacacacgtcaactgtgccatctggtcggcggaagtcttcgaggagaacgacggctccctcaagaatgtgcatgctgctgtggcccgagggaggcagatgcgctgcgagctctgcctgaagcctggcgccacggtgggctgctgcctgtcctcctgcctcagcaacttccacttcatgtgtgcccgggccagctactgcatcttccaggatgacaagaaagtcttctgccagaaacacactgatctcctggatggcaaggaaattgtgaaccccgatggttttgatgttctccgccgagtctatgtggacttcgagggcatcaacttcaagcggaagttcttgacggggcttgaacccgatgccatcaacgtgctcattggttccatccgcattgactccctgggtactctgtctgatctctcggactgcgagggacggctcttccccattggctaccagtgctcccgtctgtactggagcacagtggatgctcggaggcgctgctggtatcggtgccgaattctggagtatcggccatgggggccgagggaagagccagctcacctggaggctgcagaggagaaccagaccattgtgcacagccccgccccttcctcagagcccccaggtggtgaggaccccccactggacacagatgttcttgtccctggagctcctgagcgccactcgcccattcagaacctggaccctccactgcggccagattcaggcagcgcccctcctccagccccccgttctttttcgggggctcgaatcaaagtgcccaactactcgccatcccggaggcccttggggggtgtctcctttggccccctgccctcccctggaagtccatcttcactgacccaccacatccccacagtgggagacccggacttcccagctccccccagacgttcccgtcgtcccagccctttggctcccaggccgcctccatcacggtgggcctcccctcctctaaaaacctcccctcagctcagggtgccccctcctacctcagtcgtcacagccctcacacctacctcaggggagctggctccccctggcccggccccatctccaccaccccctgaagacctgggcccagacttcgaggacatggaggtggtgtcaggactgagtgctgctgacctggacttcgcggccagcctgctggggactgagcccttccaggaagagattgtagccgctggggccatggggagcagccacgggggcccgggggacagctccgaggaggagtccagccccacctcccgctacatccacttccctgtgactgtggtgtccgcccctggtctggcccccagcgctacccctggagccccccgcattgaacagctggacggcgtggacgacggcactgacagtgaggctgaggcggtgcagcagcctcggggccagggcacgcctccttcggggccaggagtagtccgggcaggggtccttggggctgcaggggacagggcccggcctcctgaggacctgccatcggaaattgtggattttgtgttgaagaacctagggggtcctggggatggaggtgctggccctagagaggagtcactccccccggcgcctcccctggctaatggcagccagccctcccaaggcctgaccgccagcccagctgaccccacccgcacatttgcctggctcccaggggccccaggggtccgggtgttaagccttggccctgcccctgagccccccaaacccgccacatccaaaatcatacttgtcaacaagctggggcaagtatttgtgaagatggctggggagggtgaacctgtcccacccccagtgaagcagccacctttgccccccaccatttcccccacggctcccacctcctggactctgcccccaggccccctcctcggcgtgctgcccgtggtcggagtggtccgccctgccccgcccccgccaccccctcccctgacgctggtgctgagcagtgggccagccagcccgccccgccaggccatccgcgtcaagagggtgtccactttctccggccggtccccgccagcacctcccccatacaaagccccccggctggatgaagatggagaggcctcagaggatacccctcaggttccagggcttggcagtggcgggtttagccgtgtgaggatgaaaacccccacagtgcgtggggtccttgacctggatcggcctggggagcccgctggggaagaaagtcctgggcccctccaggaacggtcccctttgctgccacttccggaagatggtcctccccaggtccccgatggtcccccagacctgctgcttgagtcccagtggcaccactattcaggtgaggcttcgagctctgaggaagagcctccatccccagatgataaagagaaccaggccccaaaacggactggcccacatctgcgcttcgagatcagcagtgaggatgggttcagcgttgaggcagagagcttggagggggcgtggagaactctgatcgagaaagtgcaagaggcccgagggcatgcccgactcagacatctctcctttagtggaatgagtggggcgagactcctgggcatccaccatgatgctgtcatcttcctggccgagcagctccccggagcccagcgttgccagcactataagttccgttaccaccagcagggagagggccaggaggagccgcccctgaatccccatggggctgctcgggcagaggtctatctccggaagtgcacctttgacatgttcaacttcctggcctcccagcaccgggtgctccctgagggggccacctgtgatgaggaagaggatgaggtgcagctcaggtcaaccagacgtgccaccagcctggagctgcccatggccatgcgttttcgtcaccttaagaagacgtccaaagaagctgtgggtgtctacagatcagccatccacgggcgaggcctgttctgtaagcgcaacatcgacgcgggggagatggtcatcgagtactctggcattgtcatccgctcggtgttgactgacaagcgggagaagttctacgatgggaagggcatcgggtgctatatgttccgcatggatgactttgatgtagtggacgccacgatgcatggcaatgccgcccgcttcatcaaccactcctgtgagcccaactgcttctctcgggtcatccacgtggagggccagaaacacattgttatcttcgccctgcgccgcatcctgcgtggtgaggagctcacctacgactacaagttccccatcgaggatgccagcaacaagctgccctgcaactgtggcgccaagcgctgccgtcggttccttaactgaggccgtggctgcccaccacgacccctcacacctcctgctgccgtcgctgccatcttgcccctagcctgggggctccctagcccctcccagagcatctcacccccaccctcatgttcagggtggatgtgggcatgcaggtgacaagggccctgcctccacccctccagcccatccagcaatcgccccctttctgccctgggggcccaggatgtagatattgtacaaaggtttctaaatcccttcttttctatgcacttttttatttaagaggtggggtcccaggtgggaacccccccacaataaagtctgtcaatgtttgga

SEQ ID NO: 2770 - DNA, 4348 bp, Homo sapiens
cggacgcgtgggcggacgcgtggggggaaggagaagccagagctccagcggcgccgcggggcggcagtcaagaccagagccggagccgtcactcacctctggattagcctgaagcggagactaccggctgcggagcggcggggcgagacacttgctcgccttttgaccccatcatgtcgcggggctccatcgagattcccctccgggacactgacgaggtcattgaacttgacttcgatcagttaccggagggagatgaagttatcagtattctgaaacaggaacacacacaactgcacatatggattgctttggcgctggaatactacaagcaaggaaaaacagaagagtttgtaaaattgttggaagcagcacgtatagatggcaatttggactatagagaccatgaaaaagaccagatgacttgcttggatacattggcagcgtattatgtacaacaggctcggaaagaaaagaataaggacaataaaaaggatcttattacacaggccaccttgttgtatacaatggccgataaaattattatgtatgatcagaaccatttgttgggaagagcctgcttctgcctacttgagggtgacaaaatggatcaagctgatgcacagtttcattttgtactcaatcagtctccaaataatattccagcccttcttggtaaagcttgcatttccttcaacaagaaggattacagaggagctcttgcttactataagaaagcattgcgtactaacccaggatgtccagcggaagttcgtttaggaatgggtcattgctttgtgaaacttaacaaactggaaaaagctcgtctggcattcagcagagccctggaactcaattccaaatgcgtgggagcattggttggactggctgttctagaactcaacaataaagaggctgattccattaaaaatggtgtccagcttctttccagagcctatactattgatcctagcaaccctatggtattgaaccatttggcaaatcactttttcttcaaaaaggattatagtaaagtccagcatctggccctccatgcattccataatacagaagtggaagctatgcaagcagagagctgctatcagctagctagatcattccatgttcaggaagattatgaccaagcttttcagtactattatcaagccacacagtttgcctcatcctcttttgtgctcccattttttggtttgggacaaatgtatatttatcgaggtgacaaagaaaatgcatctcagtgctttgagaaggttttgaaagcttatcctaataattacgaaactatgaaaattctcggctctctctatgctgcctcagaagatcaagaaaaacgagatattgccaagggccatttgaagaaggtcacagaacagtatcccgatgatgttgaagcttggattgaattggcacaaatcttagaacagactgatatacagggtgccctttcagcctatggaacagcaacacgaatccttcaggagaaagtgcaggccgatgttcctccagagattctcaataatgtgggtgccctccattttagacttggaaacctaggggaggctaagaaatattttttggcgtcattggaccgtgcaaaagcagaagcggaacatgatgagcattactataacgccatttccgttaccacgtcatataatctcgccaggctatatgaggcgatgtgtgaattccatgaagcagaaaaactgtataaaaacatcttacgcgaacatcctaattatgttgactgctatttgcgcctaggagccatggctagagataagggaaacttttatgaggcttcagattggtttaaggaagctcttcagattaatcaggatcatccagatgcttggtctttgattggcaatcttcatttggcaaaacaagaatggggtcctgggcagaagaagtttgagaggatattaaaacagccatccacacagagtgatacctattctatgctagcccttggcaacgtgtggctccaaactttacatcagcccacccgagatcgagaaaaggaaaagcgtcatcaagatcgtgctctggccatctacaaacaagtactcagaaatgatgcaaagaatctgtatgctgccaatggcataggagctgttttggcccacaaaggatattttcgtgaagctcgtgatgtatttgcccaagtaagagaagcaacagcagatattagtgatgtgtggctgaacttagcacacatctatgtggagcaaaagcagtacatcagcgccgttcagatgtatgaaaactgcctccgaaagttctataagcaccaaaacactgaagttgtactctatttggcccgggccctcttcaagtgtggcaagttacaggaatgcaaacagactttgctgaaggctagacatgtggcacccagtgatacagttcttatgtttaatgtggccttggtcctgcaaagattagctacctctgtcctgaaagatgaaaaaagtaatctgaaggaagtacttaatgctgtgaaagaactggagcttgcacatagatacttcagttatttgagtaaagtgggagataaaatgagatttgatttggcccttgctgctacagaagccaggcagtgttctgacttactgagccaggcccagtaccatgtggcccgggcacgcaaacaagatgaagaagagcgggagctgcgggccaagcaagagcaagaaaaggagctgttaaggcagaaacttcttaaagaacaggaagagaaacgtctcagagaaaaggaagagcaaaagaaacttttggaacagcgggcccagtatgtggagaagaccaaaaatattcttatgtttactggtgagactgaagcaacaaaagagaagaaaagaggtggtggtggtggacggcgttctaagaagggaggagagtttgatgaatttgtcaatgatgacactgatgatgacctacctatatccaaaaagaagaagagaagaaagggtagtggcagtgaacaagaaggtgaagatgaggagggtggtgagagaaagaagaaaaagaggagaagacatccaaagggagaagaaggatctgatgatgatgaaacagaaaatggccccaaaccaaaaaaacgacgtccaccaaaagcagagaagaaaaaggctcccaagccagaacgtctgcctccatcaatgaagggaaaaataaaatccaaagccataatttcatcaagtgatgactcttcggatgaggataaacttaaaattgctgatgaaggacatcccaggaacagcaacagcaacagtgactcagacgaggacgaacaacgaaagaaatgtgcctcatcagagagtgattccgatgagaaccagaacaagtctggcagcgaggccggcagtccccggaggccacgaagacagcggtcagatcaggactcagacagtgaccagccatccagaaagagaaggccctccggttctgagcagtctgacaatgaatctgtgcagtcagggagaagccactcaggagtttctgagaacgactctcgcccagcttctccaagtgccgaatcagatcacgaatcggagagaggatctgataatgagggttctggccaaggctctggaaatgaatcggaaccagagggatccaacaatgaggcctcagatagaggctcagaacatgggtcagatgatagtgactaggttttatttcatcaataagcttcatctctggaggaaacttttttaatatatgaaagctgtgataaaaatgtttcagatgtttagtcaattgtgaaatttttcttaaggcaattttcttttctatcagtttgtatattactaagccccaagagacatttcctgtgctagagtccaatatttgagtctctcgtgcaaatgagactattctttgtggtacaattccacctatcatatgtgaaaactgcagtaaaaataaacccagatgctaaatcattcctacaaaggtttgactgaaactgtggcagatgtctcatcttctttatatgttaagcagcatactcttctgatttttattgcaatcttttaccaagtggtgcacaaacttggtattgatgtctttattccattttgagtttagattgagaatatttttattttctgaaggcagagatatctactgtataattgcaccaaagtacatttgaaaggaaggttttcaatagtgtaatactgcagcgatgtagataaaatcacaaatgtataatgtgttaggttgaataaggtgtggaaaatgcttttctgttagtagaatgcaaaaacctacctaagccacataataataaaattcttttaccaacaaaaaaaaaaaaaaa

SEQ ID NO: 2771 - DNA, 1559 bp, Homo sapiens
gactgcgcggccgggaggagccgagccgggcggcggcggcgggaggctacagcgcgcgggggtctcccgcgtcccctccgcctcgccgggagctcgcgccctcgcccagccgagctcccacccccgcttttttccgaaggcgctgggcggcgccaccctccggccggagcccggcactgcacaaccccctccgactttcaatgttccacactccccggccagagcctcctcggcttctttttttccctccccccccttcccccccccacagctgcctccatttccttaaggaagggtttttttctctctccctcccccacaccgtagcggcgcgcgagcgggccgggcgggcggccgagttttccaagagataacttcaccaagatgtccagtgataggcaaaggtccgatgatgagagccccagcaccagcagtggcagttcagatgcggaccagcgagacccagccgctccagagcctgaagaacaagaggaaagaaaaccttctgccacccagcagaagaaaaacaccaaactctctagcaaaaccactgctaagttatccactagtgctaaaagaattcagaaggagctagctgaaataacccttgatcctcctcctaattgcagtgctgggcctaaaggagataacatttatgaatggagatcaactatacttggtccaccgggttctgtatatgaaggtggtgtgttttttctggatatcacattttcatcagattatccatttaagccaccaaaggttactttccgcaccagaatctatcactgcaacatcaacagtcagggagtcatctgtctggacatccttaaagacaactggagtcccgctttgactatttcaaaggttttgctgtctatttgttcccttttgacagactgcaaccctgcggatcctctggttggaagcatagccactcagtatttgaccaacagagcagaacacgacaggatagccagacagtggaccaagagatacgcaacataattcacataatttgtatgcagtgtgaaggagcagaaggcatcttctcactgtgctgcaaatctttatagcctttacaatacggacttctgtgtatatgttatactgattctactctgcttttatcctttggagcctgggagactccccaaaaaggtaaatgctatcaagagtagaactttgtagctgtagattagttatgtttaaaacgcctacttgcaagtcttgcttctttgggatatcaaaatgtattttgtgatgtactaaggatactggtcctgaagtctaccaaatattatagtgcattttagcctaattcattatctgtatgaagttataaaagtagctgtagatggctaggaattatgtcatttgtattaaacccagatctatttctgagtatgtggttcatgctgttgtgaaaaatgttttaccttttacctttgtcagtttgtaatgagaggatttccttttaccctttgtagctcagagagcacctgatgtatcatctcaaacacaataaacatgctcctgaaggaaaaaaaaaaaaaaaa

SEQ ID NO: 2772 - DNA, 1394 bp, Homo sapiens
gcaggggccagcccgccgggtccccgccgcgctctttgtcctggccgcgcgcgggcggacgcgtgcacccccagggtgaggggaggtgtggagagcgcgcacgggagcgcgcgggaacagctcgcgcccgccgggcgtcggcggcgcgcgcccctccgccagcggcgcgcgagcgggccgggcgggcggccgagttttccaagagataacttcaccaagatgtccagtgataggcaaaggtccgatgatgagagccccagcaccagcagtggcagttcagatgcggaccagcgagacccagccgctccagagcctgaagaacaagaggaaagaaaaccttctgccacccagcagaagaaaaacaccaaactctctagcaaaaccactgctaagttatccactagtgctaaaagaattcagaaggagctagctgaaataacccttgatcctcctcctaattgcagtgctgggcctaaaggagataacatttatgaatggagatcaactatacttggtccaccgggttctgtatatgaaggtggtgtgttttttctggatatcacattttcatcagattatccatttaagccaccaaaggttactttccgcaccagaatctatcactgcaacatcaacagtcagggagtcatctgtctggacatccttaaagacaactggagtcccgctttgactatttcaaaggttttgctgtctatttgttcccttttgacagactgcaaccctgcggatcctctggttggaagcatagccactcagtatttgaccaacagagcagaacacgacaggatagccagacagtggaccaagagatacgcaacataattcacataatttgtatgcagtgtgaaggagcagaaggcatcttctcactgtgctgcaaatctttatagcctttacaatacggacttctgtgtatatgttatactgattctactctgcttttatcctttggagcctgggagactccccaaaaaggtaaatgctatcaagagtagaactttgtagctgtagattagttatgtttaaaacgcctacttgcaagtcttgcttctttgggatatcaaaatgtattttgtgatgtactaaggatactggtcctgaagtctaccaaatattatagtgcattttagcctaattcattatctgtatgaagttataaaagtagctgtagatggctaggaattatgtcatttgtattaaacccagatctatttctgagtatgtggttcatgctgttgtgaaaaatgttttaccttttacctttgtcagtttgtaatgagaggatttccttttaccctttgtagctcagagagcacctgatgtatcatctcaaacacaataaacatgctcctgaaggaaaaaaaaaaaaaaaa

SEQ ID NO: 2773 - DNA, 2996 bp, Homo sapiens
ggggaggggccgggcggggggctggcggcagcggcggatggactcgcgggtatcggagctgttcggcggctgctgccggcccggagggggcccggccgtgggcggaaccctcaaggctaggggggccggcagcagcagcggctgcggggggccaaagggaaagaagaagaacggaaggaacagagggggcaaagccaacaaccccccgtatttgccccccgaggctgaagatggaaacattgaatataaattgaagctggtgaatccatcccagtaccgctttgagcacctggtgacacaaatgaagtggcggctccaggagggacgtggtgaggccgtctaccagattggggtagaggacaatgggctgctggtggggctggctgaggaggaaatgcgagcttcgctcaagaccctgcaccggatggcagagaaggttggggcagacataaccgttcttcgagagcgagaagtggattatgatagcgacatgccccggaagatcaccgaggtgctagtacgaaaggtccctgacaaccaacagttcctagacctccgtgtggccgtcctggggaatgtggactctgggaagtcaactctgcttggagtcctgacccagggagagctggacaatgggcggggccgggctcggctcaaccttttccgccacctgcatgagattcagtctggccgaacctccagcatcagcttcgagatcctgggctttaacagcaagggagaggtggtgaattacagcgactcacggacagcagaagagatctgtgagagcagctccaagatgatcaccttcatcgacctggcaggccaccataagtacctacacaccaccatctttggcctcacatcatactgccccgactgcgccctgctcctcgtcagtgccaacactgggattgctggcaccacaagggaacatctggggctggccctggccctgaaagtgcccttcttcatcgtggtcagcaagatcgacctatgtgccaagaccacagtggagaggacagtacgccagctggagcgggtcctcaagcagcctggctgccacaaggtccccatgctggtcacctctgaggatgatgccgtcactgctgcccagcagtttgctcagtcacccaatgtcacccccatcttcacattgtccagtgtgtctggagagagtctggacctcctcaaagtctttctgaatattctgccgccactcaccaacagcaaagagcaggaggaactcatgcagcagctgacggagttccaggtggatgaaatctacacagtaccagaggtggggactgttgttggaggaacactttccagtgggatttgccgtgagggggaccagctggtggtgggccccacggatgatggctgcttcctggagctgagagtatgcagcatccagcgcaaccgctctgcctgtcgtgtgctgcgagctggtcaggctgctacactggcgcttggggactttgaccgtgcactgcttcgcaagggcatggtgatggtgagcccggagatgaatcctaccatctgctcggtgtttgaggcagagatagtcttactgttccatgccaccaccttccgacgaggattccaggtgacagtacacgtgggcaacgtacgtcagacggcagtggtggaaaagatccatgccaaggacaaactgcggacaggcgagaaggcagtggtacgtttccgcttcctgaaacacccagagtacctgaaggtgggcgccaaactgctgttccgggagggtgtcaccaagggcatcggccatgtcactgatgtacaagccattacagcaggagaagcccaggccaacatgggcttctgaacccttcaggcagggacagttctattgctgtccctacaatatataaggtgacttctggccatgctgccctgccattggcggctctgtgtgttaataggctagggagagaggggtgctgtctgccacttgctccctgccaactttctggagaggtgccaaacttggtgtggccaggaaagggcagtcctgagggagaagacaggattcagggcagtgctccgaagctgtgtgctcacctggttggctcatcaaacctggcaaccctgtggcctgtctgccggagctgactggatccactcatcaattcttcgtccccactactaagactgggcatgttttgctggtgtggtctctgcacttcaggaatggtcacaacagggggtagccctcaaaagcactcctttttctatacctcttctcaaggccatgtaagttgcccatctctacctggctgtggacaaaaggttatctgctcttggccatctggtggtggtggcggcccagagtctgaagaaatggcacagggacagtgaatggtagtgttgccaccctgtgctgaggcctgaggcctcttcctcagctttatctccctttccttcactcaagggccatttccccagtccctatctcccccatcccctcccggcttataggccccacaggtgctatttgttgtgctggcccaggcgtggggctaccaagcaaaggcttggcatataccaaaggccagctgcatgcccatcagtctggtctttttcctctgcggtcatgttggctttcatgctggatcaaatgttttactttcccagactggtggcatctgagttccccatcctaccactctcaccccactttcctgccccacctaaaccctcgttttagtaatttgtagtgactgttcccttccctctgttgcagggaaccaggaggaaagggaaagatgttgccatatttcctactctttaggcatggactctcctttccctttgttagtgtcctgggttcccatggactcagggatttgttggctaaggtttctctgtgcatatatatatatatacatatgtatatatatttaaatacacatatatattgtacagaataaaaatgttttattgaatacactgtgcttaaaaaaaaaaaaaaaaaa

SEQ ID NO: 2774 - DNA, 1251 bp, Homo sapiens
acgccgcctgggtcccagtccccgtcccatcccccggcggcctaggcagcgtttccagccccgagaactttgttctttttgtcccgccccctgcgcccaaccgcctgcgccgccttccggcccgagttctggagactcaacatgaagctaccggccagggttttctttactctggggtcccggctgccctgtggcctcgctcctcggaggtttttcagttatgggacaaaaatattatatcaaaacactgaagctttgcaatctaaattcttttcacctcttcaaaaagcgatgctaccacctaatagttttcaaggaaaagtggcattcattactgggggaggtactggccttggtaaaggaatgacaactcttctgtccagcctaggtgctcagtgcgtgatagccagccggaagatggatgttttgaaagctaccgcagaacaaatttcttctcaaactggaaataaggttcatgcaattcagtgtgatgtgagggatcctgatatggttcaaaacactgtgtcagaactgatcaaagttgcaggacatcctaatattgtgataaacaatgcagcagggaattttatttctcctactgaaagactttctcctaatgcttggaaaaccataactgacatagttctaaatggcacagccttcgtgacactagaaattggaaaacaactaattaaagcacagaaaggagcagcatttctttctattactactatctatgctgagactggttcaggttttgtagtaccaagtgcttctgccaaagcaggtgtggaagccatgagcaagtctcttgcagctgaatggggtaaatatggaatgcgattcaatgtgattcaaccagggcctataaaaaccaaaggtgcctttagccgtctggacccaactggaacatttgagaaagaaatgattggcagaattccctgtggtcgcctggggactgtagaagaactcgcaaatcttgctgctttcctttgtagtgattatgcttcttggattaatggagcagtcattaaatttgacggtggagaggaagtacttatttcaggggaattcaacgacctgagaaaggtcaccaaggagcagtgggacaccatagaagaactcatcaggaagacaaaaggttcctaagaccactttggccttcatcttggttacagaaaagggaatagaaatgaaacaaattatctctcatcttttgactatttcaagtctaataaattcttaattaac

SEQ ID NO: 2775 - DNA, 2770 bp, Homo sapiens
gtgcttgcggcaaccctgtaaccgccggtgcgcaagttggaggggcaaggggctgccgtgtcctggtctggaggcggcccaggctgccttggtgattctggcttcgcggcctcatggcttgcggccggtttgcgcaacggcctgcgaaccaccaggcgcgtccccgccggcttgggtccgccccgaagcccagtccctcggcctggcccgctatgccctgcacactggcggagtctggcgtggcgcagcccggcgtggggttcggccccgccaggtggtcagcccttcctcggagtccaggtggctgggggcgcttcggagagtggccaggggcccccaaacccggggccgcagagcagtaccagtccgtggcctgttaggaaccaggctacagagcaggagttgccaaaacaaaggggatttggtgatggaggctttgttagaaggaatacaaaatcgagggcatggtgggggatttttgacatcttgtgaagcagaactacaggagctcatgaaacagattgacataatggtggctcataaaaaatctgaatgggaaggacgtacacatgctctagaaacttgcttgaaaatccgtgaacaggaacttaagagtcttaggagtcagttggatgtgacacataaggaggttggaatgttgcatcagcaggtagaagaacatgaaaaaatcaagcaagagatgaccatggaatataagcaggagttgaagaaactacatgaagaattatgcatactgaagagaagctatgaaaagcttcagaaaaagcaaatgagggaattcagaggaaataccaaaaatcacagggaagatcggtctgaaattgagaggttaactgcaaaaatagaggaattccgtcagaaatcgctggactgggagaagcaacgcttgatttatcagcaacaggtatcttcactggaggcacaaaggaaggctctggctgaacaatcagagataattcaggctcagcttgtcaatcggaaacagaaattagagtctgtggaactttctagccaatcagaaattcaacacttaagcagtaaactggagcgggctaatgacactatctgtgccaatgagttggaaatagagcgcctcaccatgagggtcaatgacttggttggaaccagtatgactgtcctacaggagcagcagcaaaaagaagaaaaattgagggaatctgaaaaactattagaggctctgcaggaagaaaagagagaattgaaggcagctcttcagtctcaagaaaatctcatacatgaggccagaatacaaaaggagaagttacaagaaaaagtaaaggcaactaacactcaacatgctgtagaagctataaggccacgggaagaatctctggcagaaaagaagtacacctctcaagggcagggggacttagacagtgtgctctcccagttgaattttacccatactagtgaggaccttctgcaggcagaggtgacttgtcttgaaggcagtttggaatctgtgagtgcaacgtgtaaacagctgagccaagaactaatggaaaaatatgaagaactgaagaggatggaagcacataacaatgaatacaaagcagagattaagaagttgaaagaacagattttacagggtgaacaaagttacagttctgcactagaaggaatgaagatggaaatctcccatctaactcaggagttacatcagcgagatatcactattgcttccaccaaaggttcttcctcagacatggaaaagcgactcagagcagagatgcaaaaggcagaagacaaagcagtagagcataaggagattttggatcagctggagtcactcaaattagaaaatcgtcatctttctgaaatggtgatgaaattggaattgggtttacatgaggcaaaagagatttcactagcagacctccaggagaattatattgaggcattaaataaattagtgtctgaaaatcaacaactacagaaagatttgatgaataccaaatctcagctggagatttctactcagatgtgcaaaaaacaaaatgacaggatctttaaaccaacacacagcagaacaactgagttcaagaatacagagttcaagccaacccatggccagcacagacatgatggaataaagactgagcactacaaaacagatcttcattctccaagaggacaagcgtcggatagtataaaccccatgtctagggtgctaagccccctgagtcctcaaatcagcccttgcagctccaccaggtctttgacttcctactctctatgtaaaactcattctttgccttcagcgctagatacaaatgaagccaatttttctgacactatgtctgagagtatgaatgaccaagaagagtttatatcttcgtgttccttgcctgtatctccccttggttcaatagctaccagatttttggaagaggaggaactgaggtctcatcacattctagagcgcttggatgcccatattgaagaactaaaaagagagagtgaaaagacagtgagacaattcacagccttaaagtagcctcttaaaaaaatcacaatcttggaaataaaaataaacaccaaagagttactgtcatctgaagtagcagctctttaaaaacatgaagagataaaattataaaaatgatacatctaaagcagtggtgaagaaagctgaaaaactgatacttttgataggcattttctctgcactggtttgtttaaaggacttcttccagcaataagttgaaagaataaaccactttgctag

SEQ ID NO: 2776 - DNA, 1258 bp, Homo sapiens
ccacgcgtccggcccgctctcacttttcagcggcaggcgaagggggctgaggaaaggaggtgggtctaggcaggggaaattggggtgccaccagacggagacagcttggactaccagaatcaagcactcttttggaagagggtaatctctctccaaaaactgaggacacttaccttccccatatattgagtccagctgtgtttggtggcccaggtactaatttcaagatgccaggacgttccagttcaaattcaggttcaactggtttcatctccttcagtggtgtagagtctgctctctcctccttgaaaaacttccaagcctgtatcaactctggtatggacacagcttctagtgttgctttggatcttgtggaaagtcagactgaagtgagtagtgaatatagtatggacaaggcaatggttgaatttgctacattggatcggcaactaaaccattatgtaaaggctgttcaatctacaataaatcatgtgaaagaagaacgtccagaaaaaataccagatttaaaattattggtagagaagaaatttttggctttacagagcaagaattctgatgcagactttcaaaataatgaaaaatttgtacagtttaaacaacagctgaaagaactaaagaagcaatgtggtcttcaagctgacagagaagctgacggaacagaaggagtggatgaagatataattgtgacccaaagtcagaccaacttcacctgccccattacaaaggaggaaatgaagaagccagtgaaaaataaagtgtgtggccacacctatgaagaggacgccattgttcgcatgattgagtccaggcaaaagcggaagaaaaaggcctattgccctcaaattggctgtagccacacggatataagaaagtcagatcttatccaggatgaagcacttagaagggcaattgagaaccataacaagaaaagacatcgtcattccgagtaggaaaagccacctgcctgcagggacaccagcagcctacctcctaccccagctgtctgttgagagcagtgctgaccccagcagttagggactggctgcatagcatacttgttgggggtaaaacttgttgcttttatgtgtgcttgaaaacatttttcaaagttacacaacagaaatgcaatcatattgtttatttttaagtgttctataatgttaaataaaactttgatcatctgcaaaaaaaaaaaaaaaaaaaaaaaaaaaaaaaaaaaaaaaaaaaaaaaaaaaaa

SEQ ID NO: 2777 - DNA, 3179 bp, Homo sapiens
ctggaccaggcggccgtggcgcgggtggcggctgctgtgctggctgtggggacggaggcggtgaagtgccatcttcggctaggtcgtcacaggctccggctcatggcatcaagtggcatccatcataagatcgttaactgaagacaatatgcaaaattctcacatggatgaatacagaaattctagtaatggcagcacaggcaacagttcagaggtagtggtagaacatcctactgatttcagtactgagattatgaacgttacagaaatggaacagtcacctgatgactctcccaatgtgaatgcatctacagaagaaactgaaatggcaagtgctgtggaccttccagtgacgctgacagaaacagaagcaaatttccctccagaatatgaaaaattttggaaaactgtagaaaataatcctcaggattttacaggctgggtatatttgcttcaatatgtagaacaggagaatcacttgatggctgccaggaaggcatttgacagatttttcatacactatccgtattgctatggttactggaaaaagtatgcagaccttgaaaagcggcacgacaacattaaaccatcagatgaggtgcgttaaacctctacagtttgtcaagctttgcagtgcaagcctctgtattacactgcagcttaacaagtagggcagggcttttctctcacttacatttatttctcattttccaaacaatatagttggtttgctagtcacatttgctacgtcttattgcatttttggtcagacgctgtcattgatgctctaatgggtctgtgccctatggtctgtaacccaaagcctgcccacacaacccggtcagaatgcagggactgctgcgctttgaagatcaagactctgcacgtggggatcagaacattgccatgttctatccaacctccacccaaatggtttatcggcgggggcttcaggcaatacctcttagtgttgacctttggatacattatataaacttcttaaaagaaacattggaccctggtgatcctgagacaaacaatacaataagaggaacttttgagcatgctgttctagctgcaggaacagatttccgttctgacagactgtgggaaatgtatataaactgggaaaatgagcagggaaacctgagagaagttacagctatatatgatcgtattcttggtattccaacacagctgtatagtcatcattttcagagatttaaagaacatgtacagaataatttgcctagagatcttttaactggtgaacagtttattcagttgcgaagggaattagcttctgtaaatggtcatagtggtgatgatggtcctcctggtgatgatctaccatcgggaattgaagacataaccgatcctgcaaagctaattacagaaatagaaaacatgagacatagaatcattgagattcatcaagaaatgtttaattataatgagcatgaagttagtaaaaggtggacatttgaagaaggtattaaaagaccttactttcatgtgaaacctttggaaaaggcacaactaaaaaactggaaagaatacttagaatttgaaattgaaaatgggactcatgaacgagttgtggttctctttgaaagatgtgtcatatcatgtgccctctatgaggagttttggattaagtatgccaagtacatggaaaaccatagcattgaaggagtgaggcatgtcttcagcagagcttgtactatacatctcccaaagaaacccatggtgcatatgctttgggcagcttttgaggaacagcagggtaatattaatgaagccaggaatatcttgaaaacatttgaagaatgtgttctaggattggcaatggttcgtttacgaagagtaagtttagaacgacggcatggaaatctggaagaagctgaacatttgcttcaggatgccattaagaatgccaaatcaaataatgaatcttcattttatgctgtcaaactagcccggcatcttttcaaaatacagaaaaaccttccaaaatcaagaaaggtgcttttggaagcaatcgaaagagacaaagagaacacaaagttatacctcaatttacttgaaatggaatatagtggtgacctcaaacaaaatgaagaaaatatcctaaattgttttgacaaagctgtacatggttcattacctattaaaatgagaattacattttctcagagaaaagtggaatttcttgaagattttggttccgatgttaataagcttctgaatgcttatgatgaacatcaaacactcctgaaagaacaggattctttaaaaaggaaagcagaaaatggatcagaagaaccagaggaaaagaaagcacatacagaagatacaacttcatcatctacacagatgattgatggtgatttacaggcaaaccaagctgtatataattatagtgcgtggtatcaatacaattatcagaatccttggaattatggacaatattatcctccccctccaacctgatgggaaaaatgtaaatttcaaatgcagtgtgtgaaaagtatgaaattattattttttttaatgagggatgtaaacagtataagcttgttgtatttgataacctgtcttccttgtttctgtgtaacatgatttgtttagtaatagggggaaaatgtcaattagtagcttaccacagatactgtttcctaccatttataaaatttactttttattgaaaaactattttttgatttttgcattaagtggtctagaattcttttgcaatgcatttgcaacagaattttgtagccttaaggggtaggaagaaaaacctgactgcaaatcatgtcagtgtagtacaaaattctgaaaacacataagggctggttatttacctccttttttttttttttttttaaagaaaaaaggacttttaacctttgctgacaaggttttgtctgtttcagttatacttgtgaattgtgatctaactgcagaaaggatacattattaaaatactttgccttggaatagattataaatgagaaaatggaatgtttgcatccctttaaaaatgaaaatcatatcaaaagtatgttgtttcaggagactttgtatttagaatattcatgtaaaacttgtgaacaagctttcattttgatcaaactgatcttcatttttgtaataaaacggaagactcatccagt

SEQ ID NO: 2778 - DNA, 640 bp, Homo sapiens
gagggaacgggtcctggcggtgctttgcaaagggcccgtgtttctgttgcgggaagctcccgggggtcgcacgtgcgtccgagcccaagcccctcccctccactccccttcctgcgtgccccggagccgccaagcggctacgttcttctcggcccgccgagatggcgctcgaccccgcagaccagcatctcagacatgtcgaaaaagatgttttgatccctaaaataatgagagaaaaggccaaagagaggtgttctgaacaagttcaagattttaccaaatgttgcaagaactctggagttcttatggtagtaaaatgccggaaagaaaattctgcattgaaagaatgtctaactgcttactataatgatccagccttttatgaagaatgcaaaatggaatacctgaaggaaagggaagaattcagaaaaactggaattcctacaaagaaaaggctacagaagcttccaacaagcatgtaggcagatactcaaatgacattcaggaactctaatattcatggaagtcattttatagtccttaaataatggactcaagcatatatgtttgctttaccttaattatggaaatattaactttatctgaaataaatattttatttcaaaaaaaaaaaaaaaaa

SEQ ID NO: 2779 - DNA, 7075 bp, Homo sapiens
atggggctgctggggcaggatctctttgtcacctcctttctgtgtccaacctggccgtccccatcaggcgcccacggcctgcgagaggagcccgagtttgtgacggcaagagctggggagagcgtggtcctgcgatgcgacgtgatccacccagtgacgggacagcccccaccctatgtcgtagagtggttcaagttcggggtccccatccctatcttcatcaagtttggctactacccgccgcacgtggaccctgagtatgcaggccgggccagtcttcatgataaggcatctctgcggctggaacaagttcgctctgaggaccagggctggtatgagtgcaaagtgctcatgctggaccagcagtatgacaccttccacaatggcagctgggtccacctcaccatcaacgcccctcccacctttacagaaacacccccccagtacatcgaggccaaggagggtggtagtatcaccatgacctgcacagcttttgggaaccccaagcccattgtcacctggctcaaggaggggacgctcctcggtgctagtgggaaataccaggtgagtgacggcagcctgacagtgacatcggtcagtcgggaggacagaggtgcctacacctgccgagcgtacagcattcagggggaggctgtccacacgactcacctgcttgtccaagggccccctttcatcgtctcccctcctgagaacatcaccgtcaacatctcccaggatgctctgctcacctgccgggcagaggcgtatccgggcaacctcacctacacctggtactggcaggacgagaacgtctactttcagaacgacctgaagctgagggtgcgcatcctaatcgatgggaccctgatcatcttccgggtgaagccggaggactcggggaagtacacctgtgtgcccagcaacagcctggggcgctccccctccgcctcggcgtacctgaccgtgcagtacccagcgcgtgtcctcaacatgccccctgtgatttacgtgcccgtggggatccatggctacatccgctgccctgtggacgcagaaccaccggccaccgtggtcaagtggaacaaggacggccgtcccctgcaggttgagaagaacctcggttggaccctgatggaggatggctccattcgaattgaggaggccacagaggaggctcttggcacttatacctgtgtgccttacaacactctggggaccatgggccagtctgcccctgcgaggcttgtcctgaaggaccccccctatttcacggtgctaccaggctgggagtacaggcaggaggccggccgggagctacttatcccctgtgctgccgcaggggacccctttcctgtcatcacttggagaaaggtagggaagcccagcagaagcaagcacagtgccctgcccagtgggagcctgcagttccgtgccctgagtaaggaggaccacggggagtgggaatgtgtcgccaccaacgtggtcacgagcatcactgccagcacccacctcaccgtcatcggcaccagcccccatgccccgggcagtgtccgggtccaggtctccatgacaactgccaacgtgtcctgggaaccaggctatgatggaggctacgagcagacattctcagtttggatgaagcgggcacagtttgggccccatgactggctgtccttgccagtgccgccaggacccagctggctgctggtggacaccctggagcctgagacagcgtaccagttcagcgtcctggcccagaacaagctgggaaccagcgccttcagtgaggtggtcactgtgaacactttagcattccctattacaactccagaacccctggtgctggtcaccccaccgaggtgcctcatagccaatcggactcagcagggtgtgctcctgtcctggcttccgcctgccaaccacagctttcccatcgaccgctacatcatggagttccgtgtcgcagagcgctgggagttgctcgacgatggcatccccggcaccgaaggagagttctttgccaaggatctgtcacaggacacgtggtatgagttccgggttctggccgtcatgcaggatctgatcagcgagcccagcaacatcgccggcgtctccagcacagacatcttcccgcagccggacctgaccgaggatgggctggcgcggcctgtgctggcgggaatcgtagctaccatctgcttcttggcagctgccatcctgttcagcaccctggctgcctgctttgtcaacaagcagcgcaagcgtaagctcaagcgcaaaaaagaccctccactctccatcacccactgcaggaagagcctggagtctcccttgtcctctggcaaggtgagccccgagagcatccgcacgctccgagcgccgtcagaatcctccgacgaccagggccagcccgcggccaagaggatgctgagccccacccgtgagaaggagctgtcgctgtacaagaagaccaagcgggccatcagcagcaagaagtacagcgtggccaaggcagaggccgaggcagaggccaccacgcccatcgagctcatcagcagaggccctgacggccgcttcgtgatggaccctgccgagatggagccctcgctgaagagcaggcgcatcgagggcttccccttcgccgaggagacggacatgtaccccgagttccgccagtcggacgaggagaacgaggacccactggtgcccacatctgtggccgccctgaagtcccagctcacccctctgtcatccagccaggagtcctacctgccaccaccagcatacagccctcggttccagccccgcgggctggagggccccggtggcctggaaggtcggcttcaggccacaggccaggcccggccccctgccccccggcccttccaccatggccagtattatgggtacctcagcagcagcagccctggggaggtggagccgcccccgttctacgtgccagaagtgggcagccccctgagctccgtcatgtcgtccccgcccctgcccaccgaggggccctttggccaccccaccatccccgaggagaatggagagaatgcatccaacagcacgctgcccttgactcagacacctacaggagggcgctcccctgagccctggggccggccagaattccccttcggggggctggagaccccagcgatgatgttcccccaccagctgccaccctgtgatgtgcccgagagtctgcagcccaaggccggcctcccccgaggactgccccccacctccctgcaggtgcccgcggcctacccgggcatcctgtctctggaggcaccgaagggttgggcaggcaagtcgcccggcaggggccctgtcccagcgccccccgccgccaagtggcaggacagacctatgcaacctctggtaagccaagggcagctgcgacatacaagccaaggcatgggcatacctgtgctgccttaccccgagccggctgagccgggggcgcacggcggccccagcacatttggcctggacacccggtggtatgagccccagccccggccccggcctagccctcggcaggccaggcgcgccgagcccagtttacatcaagtggtgctacagccctcccggctctcacctctgacccaaagccccctcagctcccgcaccggctcccctgagctcgccgcccgtgcccggcctcgcccgggcctcctgcagcaggcagagatgtcagagatcaccctgcagccgccggctgcagtcagcttttctcgaaagtctacgccgtccacaggctccccctcccagagcagccgcagtgggagtcccagctaccggcccgccatgggcttcaccactctggccaccggctacccttcccctccacccggccccgcccctgctgggcctggggacagcttggacgtgtttggacagacgccttcccctcgaaggacgggggaggaattgctccgaccggagaccccaccacccacgttacctacttcagggaagctgcagagagacagaccagctcccgcgaccagcccgcctgagagagcactctctaaactgtagcagctggtattccagctatctgggcagtgttgtcgagacaagcctctcctcagctcaataggtaagggagctcctcggctgggcgggcgggggcgggcaggcggacggggcttcggccgggccattgcttcctggacaggggatccaaaccatgtcccctcaccgccccgtggggtggccgctgccgctcctcgatccccacggcttctgggttccccacatcgagccacgctcggcaccgcctagctgcagcttctgccccccaccccccgtccccatgtccggcccctctagagccccctgcggctctcctcactcctcgccagcctcgccagcctgctgccagtacacccagggcctcccacagaagccctggggccctgcatgcaccccgaaggggcccagaacacccgagatctgctttgcatctctgcacccttggggacctctctggggcccctctggtatccaggaagagcccccccgcaccctattctcccagcagccccaggcatagcatcccttctcctggggtggctggcccctcaccagcttcttgagatcttcgtggtattaggctctctcgaggagtacaaggttgggatgagccccacttcttccttgacagtggggtcctctgcagggtcaggtccctgcagtcctatggggctttgtagcgaaatgtcatcactcccctgtgctccttgccttctgcagcctgaccttggtagtcacaggactgaaatgtgacctagcccttgggtccacattgctttcaaggtccctgttgtagccttgtcgtcctccctgggtcatgctgtagggaaagggtcttaggaggacctccccgaggggagggggcaggcttcccctgggcagacaggcattgagctggcaggaagtgaaacccccagggaccagcactgtgtccctccccctgcccccgcagtcagcctctccttgagtgtccttccaggtggaagctaaaggaacttgggcattcagggagcctctgagtccctcacagagactcagggccacccgaagctcgctccctctcacagtagcctgacaaggtgctgccgctcgccacggaccctctgccctgtgcctgggcacacacaggcatcgggcacctgcatgggagacggcgagcctcccgtccaggtgcttctggctttccaggcgagaaggagacaggtgccttccccccctagagatgtcaagggaggttcactttcctaaccagggctataaatctcattcattcctaagagtggcctccataaagaggactgccctgacatttctttaccatctgtagctataaaattgtcagcagcccagaggccctggaattgtgggtgaggctgtctggcatagggtgagtgtgagggctgtcaggcagcgtttatgagctcacctgctctggggccctcctgcgcccagagacccactggtcttccaccttccccagctccctccctgtcccagctgtgactcctccacagcccccggaggtgtgggagccctagactagctctcaccccagctcctggaaattcctagactctgctctcatgtgttattcctcaccccttcactcaactccattgaccctctcctttcccagtgtccccactgtgccagatccaagagaagcccgctctcctttcactgctgtggcaaacccagaaaccaggggcagcgatgagggaccatcgtttctctcccgggcctggccagcatccccagcctaggagaaggagaccctccccatcctgagtcagcccctcggtgctggcctctcctgcctgctgggagcctccccggtacggctgctgggtcctggggagatgcaggctctgttcagatgctgtctccatgctgcacctttgcatgtgtgccctcttggtcttgcttggagaagttgtgacagctcttgtccacgtgcgttctcactgtttcttttcccttcagttcctctcctgttcctttggtccatatgtagttgttgcccctgcctctcctcctttctctctccctttttttctcctcttcccaactcccttctcaacatggggagttgtattgcgtggacctgtcctttctgtggactgtggggaggccgagccaattcttagctcctgtctgagcctagtgatgccctgtcctcacctctgcttccactccctttcccattcaggctgactgtcaccgcagggaggcaggtgggtctggagcatggagtggcccctgtcctgggtcagctgtaggaaggggcccctttgtaaacaagcttctgccaggttctgaggcagagcactggtctgagtccggccccacagaagggttccatcttgtggtcagcggggtgggctcagacctgcagactcccgcagtgggcccaccctttcccttgctatggcccgtctatgagtggctttcccctgcctccatcggtgtataatcaggcaggtggtgtttgctcttaggtgattagaagaggaggaaaatgcccatcaagccactgcttcagcctgttggccagggaacacctgaacagggtcaaaatggtcagctcctgggcgctgagctaaggaaatatgcagggggttttgactttccctgtcctgaggcttgcctccactttgacctggctgcatctttcctcagctcttctgggtaagctgagagctaagcaaataagacctcctgggctacctggtcatgatttgggttttgtatggattttttgaaaagagagaaaaagagtgtgggctgggtgccgtggcccagagggcagatctcttgagtccaggagttcaaggccagcctgggcaacatagtgaagccccatctctgcaaaaaaatacaaaaaaatagctgggcatggtggcacatgcctatagtcccagctccttggggggctgaggtgggaagatcatctgagctggggaggtcgaggcagcagtgagccgagattgcgccacttcactccagcctgggtgacagagaccct

SEQ ID NO: 2780 - DNA, 7075 bp, Homo sapiens; identical to SEQ ID NO: 2779

SEQ ID NO: 2781 - DNA, 1135 bp, Homo sapiens
cgtgccctctcgagcggctgcggggtccccgcggcgccgggctgctgagctgagggcccgcggcggccgcggccggtgcatgtgcggctgctggatgcggaggcggcggcgacggcgcggatcggcaggatgttagggcagcagcagcagcaactgtactcgtcggccgcgctcctgaccggggagcggagccggctgctcacctgctacgtgcaggactaccttgagtgcgtggagtcgctgccccacgacatgcagaggaacgtgtctgtgctgcgagagctggacaacaaatatcaagaaacgttaaaggaaattgatgatgtctacgaaaaatataagaaagaagatgatttaaaccagaagaaacgtctacagcagcttctccagagagcactaattaatagtcaagaattgggagatgaaaaaatacagattgttacacaaatgctcgaattggtggaaaatcgggcaagacaaatggagttacactcacagtgtttccaagatcctgctgaaagtgaacgagcctcagataaagcaaagatggattccagccaaccagaaagatcttcaagaagaccccgcaggcagcggaccagtgaaagccgtgatttatgtcacatggcaaatgggattgaagactgtgatgatcagccacctaaagaaaagaaatccaagtcagcaaagaaaaagaaacgctccaaggccaagcaggaaagggaagcttcacctgttgagtttgcaatagatcctaatgaacctacatactgcttatgcaaccaagtgtcttatggggagatgataggatgtgacaatgaacagtgtccaattgaatggtttcacttttcatgtgtttcacttacctataaaccaaaggggaaatggtattgcccaaagtgcaggggagataatgagaaaacaatggacaaaagtactgaaaagacaaaaaaggatagaagatcgaggtagtaaaggccatccacattttaaagggttatttgtcttttatataattcgtttgctttcagaaaatgttttagggtaaatgcataagactatgcaataatttttaatcattagtattaatggtgtattaaaagttgttgtactttgaaaaaaaaaaaaaaaaaaa

SEQ ID NO: 2782 - DNA, 6640 bp, Homo sapiens
gagcgggccgacggccattttgtgaagcggcgaaggaggtggtggctgcgttgggctccgggaagccgttcgggctggggctgtcggccgcggggcggaggcactcgcgcggggggtaattcggggtctgggttctggtgccgcgcagctttccccgtctaaaagttggttttaattggttgcccacaggattgacttggcctctacttcttgttaaggaaattcatctcttgttttatcaggtgtgtgtggtttcagcgcagcatggctgtggtcatccgtttgcaaggtctcccaattgtggcggggaccatggacattcgccacttcttctctggattgaccattcctgatgggggcgtgcatattgtagggggtgaactgggtgaggctttcatcgtttttgccactgatgaagatgcaaggcttggtatgatgcgcacaggtggtacaattaaagggtcaaaagtaacactattgttgagtagtaagacggaaatgcagaatatgattgaactgagtcgtaggcgttttgaaactgccaacttagatataccaccagcaaatgccagtagatcaggaccaccacctagctcaggaatgagtagcagggtaaacttgcccacaacagtatccaactttaataatccatcacccagtgtagttactgccaccacttctgttcatgaaagcaacaaaaacatacagacattttccacagccagcgtaggaacagctcctccaaatatgggggcttcctttgggagcccaacgtttagctcaactgttccaagcacagcctctccaatgaacacagtcccgccgccaccaattcctccaattccagcgatgccatctctgccaccaatgccatccattcccccaattccagttcctcctccagtacctacattgcctcctgtgcctcctgtgcccccgattcccccagttccttctgtgccacccatgaccccactgccacccatgtcgggcatgccgcccttgaatccgccacctgtggcacctctacctgctggaatgaatggctctggagcacctatgaatttgaacaataatctgaatcctatgtttcttggtccgttgaatcctgttaaccctatccagatgaactctcagagcagtgtgaagccactccccatcaaccctgatgatctgtatgtcagtgtgcatggaatgcccttttctgcaatggaaaatgatgtcagagatttttttcatgggctccgtgttgatgcagtgcatttgttgaaagatcatgtaggtcgaaataatgggaatggattggttaagtttctctcccctcaagatacatttgaagctttgaaacgaaacagaatgctgatgattcaacgctatgtggaagttagccctgccacagaaagacagtgggtagctgctggaggccatatcacttttaagcaaaatatgggaccttctggacaaactcatccccctcctcagacacttcccaggtcaaaatcgcccagtgggcagaaaagatcaaggtcaagatcaccacatgaggctggtttttgtgtttacttgaaagggctaccatttgaagcagaaaacaaacatgtcattgatttttttaaaaagctggatattgtggaagatagtatttatatagcttatggacccaatgggaaagcaactggcgaaggctttgtagagttcagaaatgaggctgactataaggctgctctgtgtcgtcataaacagtacatgggcaatcgctttattcaagttcatccaattactaagaaaggtatgctagaaaagatagatatgattcgaaaaagactgcagaacttcagctatgaccagagggaaatgatactaaatccagagggggatgtcaactctgccaaagtctgtgcccacataacaaatattccattcagcattacaaagatggatgttcttcagttcctagaaggaatcccagtggatgaaaatgctgtacatgttcttgttgataacaatgggcaaggtctaggacaggcattggttcagtttaaaaatgaagatgatgcacgtaagtctgaacgcttacaccgtaaaaaacttaatgggagagaagcttttgttcatgtagttaccctagaagatatgagagagattgagaaaaatccccctgcccaaggaaaaaagggattaaagatgcctgtgccaggtaatcctgcagttccaggaatgcccaatgcgggactgcccggtgtgggactgcccagtgcaggacttcccggtgcaggcctgcccagcacaggactgcctggttcagcaataaccagtgcaggactgcctggtgcgggaatgcccagtgcaggaatacctagtgcaggaggtgaagagcatgccttcctgactgtaggatcaaaggaagccaataatgggcctccatttaactttcctggtaattttggtggatcaaatgcctttgggccaccaatccctcctccaggattaggaggcggggcctttggtgatgctaggcctggtatgccttcagttggaaacagtggtttgcctggtctaggactggatgttccgggttttggaggtggaccaaacaatttaagtgggccatcgggatttggagggggccctcagaattttggaaatggccctggtagcttaggcggtcccccggggtttggaagtggccctcctggtcttggaagtgcccctgggcatttgggtgggccaccagcttttgggcctggccccggccccggccccggccctggcccaatccatattggtggtccccctggctttgcatctagttctggaaaaccaggaccgacagtaattaaagtgcaaaacatgccctttactgtgtctattgatgagattttagatttcttttatggctatcaagtaatcccaggctcagtgtgtttaaaatacaatgaaaaaggtatgcccacaggtgaagccatggtggcctttgagtctcgggatgaagccacagctgctgtcattgacttaaatgacaggcctataggttcaagaaaagtaaaacttgtattagggtagccattcacatcattttttatagggtagatcttcatattgctgtgattaatgcatccagattgttttcctagtatttccaggttagaacctgtggattgtttcaattgcatatagcttggtttccataacatagagcattggttgactgtttacagaagactcactcaccaggataaacattgctgtatgttacagtaaagctatctggagagaacacataaatgattttggcataccattagagaaaccatttgtaaaactcaaatgaccacataaagcttatcaaggagtctagattggttttgttttataccatatgggatgaagaaaatagaaatgtcagtagaactcattgagggtgctcttgccagctgctgaaaatagaagttggctactctcagaatttggtttaaagctggacagatttgctttgttatagggtaaagctttgtctaaagtcctcattttcttttaaaattgaataaaatttctgtatacagattcattgtatgtacctttattgcttcttaagggtccttgctgtatagacagtcctgcttcagaagttgctgctttgtttgtctaattgactcatttgtaaatgagcagaactgttttgttggtttttttccctaaatataaaagtccacacttcgtttgtgctataacctcaaactttgatttctaatgtcacacttaaaactgtgtggaataagacttttgccataaaaataaactatggagtcctttatctaccagagcctttttggtttgaccgccacgatttaggttagtcagtttaaaaattgttcatgttgtttggatggtatcgaaaaccagaaaccacttttaataatgtgtttaagatacttgatttgaagtccttttcatatggactaattgtagtatcaatttcctcctgtcccgattatgtgaaattttggcctttaaacaaagaggggcccattcataagaaagtgttatatctaggtttttaaaactgaagttgaaattatctttgttagcagtagtagtatagaataaaagatccgtatgctggttcgtagattgatacgtgttagtcctgttatttggaggctttttggcatagttgttcgatcaggagcctgtttactaaaagtcttcatacagagtacaagtgcagccgccagaggagaaaattgagattcttgaccctttcatactcttttctttggtattcaggacactaaggcaggaggaccacatgagttctggttggtaagtgtccttgtcatgaaaacacttgccttacaaggctctaattatgatttccctagtcagtgctctgaagatgtgtcacattatattataaacaatacggaaggggagataggtgagatgatatgaaaaacaaattttctcactgtcataaaaggctctaattatggttactttccttgtgatgaaaaacttggccttacagggctctagttatggttactttccctagtcaatgctctgaaaatgtgtcacattataaacaatacagaaggagagatagatgagagatcatgaaaaccaaattttatcttttacatggcccctttgtcttcgtttgaaacatccccaacatttcctacaaatcagcgtagttacaaaggggtcagtcttttaaaataagtatttcctattaaactatatatatatacagtgcctttttggtgttgtgagtcagtggaacactgaaatacagcggttgtgtaatttaagagtggcaacagtttcatttgataagatttgaaaaggctttttatcactacaatcttagaggattgacagtacaggatttttgtttaagagaaggattgtttagactcaagaggtgactatgttgtgggtcttttgataattcatgaatacagatttgctttgaccgatcactagatactgcctcctcaatttcaaaagcaatataacgtttgtatatgctgtttaatttaagttaatgttaagtaatcatttctcattccaaagacaatgcaaaaaacttcagcactgcttgagagttgtatttcagccacagatattttctccattggaaagctattttcattttagaaaaatgggttgtttgaagatgaaagtcttttatcttttttcacaatttattttggttatatgttcgtacattcttattaaatatttcatacactttattgcaactactttgttatttctacatcttagataaatgctgaaaaggaaaacgatttcattgttcatctaattaaataaattaaaagagcggtttgtgtagaaattggagagaactatgttttatatgaatcacaacagtgctcgttgtggactgtaattaaatgctttgccctctggaacttgatttttgtgtatctgagatttattaacagtgctaactgctaaggatactgtttatcttgttctgggcattggagtttcagtttttaaaaaattcttgaaaatgtattctgtgaaactactcatacctctcttcctgcgaattttctcctaagaactaggtttggggtagaaatgaattgacattattttctcatttgctttgtatggtatgaaggatttgtaaagctttgctcaaagttgtgtgcatttgtaaacactatcatgatattttcaattttatgtgtaaattttattgtctgtttttggtgactctgacattaatggaagagaatattttccattagatttaattttttttcctctcccttctgattttttttttattggtgttcatttttcttttgatttaaaggattagagaaatctacaaatgtatgtcataaataagcaaatttgtaaacttttctgaactttagtgaaacatttagttcacaagcataatttggaggtgtgttctgtgtttacacagtagtttggatgtacaattattattagtggctttttaaaaaatgaaacagtgttaagtgaaatgtagttcctagctttgtactccaagttgtcaaagcatcaacaatgaaaattcgattaggaaactttatttaaaatttcaggtagtaatattcagtgtagttaaggccagtcttaacccactggatgaaaatctaggactgtatggaagtaagcaaacattacatttttaggtggaaatagtcagccttgcataaaaacaaggatgcgtgaaagccttaaattccagctcccttttactggagtctgtggttgtgtacaggtatgggccaagtgtaaaatctcatcaattttaagaacactcgggaaatgagtaaagaaaatgtaaaattgctgctagtcaaatcttttggaaagaatttctggaagtggtcactttaaaaattattttccacccttgcaaaattgccacatttaaattgttttactggcagttctatagtagtccagactttagaaaccaaacacaacaaaatggcttgttgccaatatggccacaacattgccagcaaatactgccttggcatcactcagcagaggtttttgtttataaagatgaagtcttgaatactgttcaataaacttgtcaaaaaataaaaaaaaaaaa

SEQ ID NO: 2783 - DNA, 6608 bp, Homo sapiens
gagcgggccgacggccattttgtgaagcggcgaaggaggtggtggctgcgttgggctccgggaagccgttcgggctggggctgtcggccgcggggcggaggcactcgcgcggggggtaattcggggtctgggttctggtgccgcgcagctttccccggattgacttggcctctacttcttgttaaggaaattcatctcttgttttatcaggtgtgtgtggtttcagcgcagcatggctgtggtcatccgtttgcaaggtctcccaattgtggcggggaccatggacattcgccacttcttctctggattgaccattcctgatgggggcgtgcatattgtagggggtgaactgggtgaggctttcatcgtttttgccactgatgaagatgcaaggcttggtatgatgcgcacaggtggtacaattaaagggtcaaaagtaacactattgttgagtagtaagacggaaatgcagaatatgattgaactgagtcgtaggcgttttgaaactgccaacttagatataccaccagcaaatgccagtagatcaggaccaccacctagctcaggaatgagtagcagggtaaacttgcccacaacagtatccaactttaataatccatcacccagtgtagttactgccaccacttctgttcatgaaagcaacaaaaacatacagacattttccacagccagcgtaggaacagctcctccaaatatgggggcttcctttgggagcccaacgtttagctcaactgttccaagcacagcctctccaatgaacacagtcccgccgccaccaattcctccaattccagcgatgccatctctgccaccaatgccatccattcccccaattccagttcctcctccagtacctacattgcctcctgtgcctcctgtgcccccgattcccccagttccttctgtgccacccatgaccccactgccacccatgtcgggcatgccgcccttgaatccgccacctgtggcacctctacctgctggaatgaatggctctggagcacctatgaatttgaacaataatctgaatcctatgtttcttggtccgttgaatcctgttaaccctatccagatgaactctcagagcagtgtgaagccactccccatcaaccctgatgatctgtatgtcagtgtgcatggaatgcccttttctgcaatggaaaatgatgtcagagatttttttcatgggctccgtgttgatgcagtgcatttgttgaaagatcatgtaggtcgaaataatgggaatggattggttaagtttctctcccctcaagatacatttgaagctttgaaacgaaacagaatgctgatgattcaacgctatgtggaagttagccctgccacagaaagacagtgggtagctgctggaggccatatcacttttaagcaaaatatgggaccttctggacaaactcatccccctcctcagacacttcccaggtcaaaatcgcccagtgggcagaaaagatcaaggtcaagatcaccacatgaggctggtttttgtgtttacttgaaagggctaccatttgaagcagaaaacaaacatgtcattgatttttttaaaaagctggatattgtggaagatagtatttatatagcttatggacccaatgggaaagcaactggcgaaggctttgtagagttcagaaatgaggctgactataaggctgctctgtgtcgtcataaacagtacatgggcaatcgctttattcaagttcatccaattactaagaaaggtatgctagaaaagatagatatgattcgaaaaagactgcagaacttcagctatgaccagagggaaatgatactaaatccagagggggatgtcaactctgccaaagtctgtgcccacataacaaatattccattcagcattacaaagatggatgttcttcagttcctagaaggaatcccagtggatgaaaatgctgtacatgttcttgttgataacaatgggcaaggtctaggacaggcattggttcagtttaaaaatgaagatgatgcacgtaagtctgaacgcttacaccgtaaaaaacttaatgggagagaagcttttgttcatgtagttaccctagaagatatgagagagattgagaaaaatccccctgcccaaggaaaaaagggattaaagatgcctgtgccaggtaatcctgcagttccaggaatgcccaatgcgggactgcccggtgtgggactgcccagtgcaggacttcccggtgcaggcctgcccagcacaggactgcctggttcagcaataaccagtgcaggactgcctggtgcgggaatgcccagtgcaggaatacctagtgcaggaggtgaagagcatgccttcctgactgtaggatcaaaggaagccaataatgggcctccatttaactttcctggtaattttggtggatcaaatgcctttgggccaccaatccctcctccaggattaggaggcggggcctttggtgatgctaggcctggtatgccttcagttggaaacagtggtttgcctggtctaggactggatgttccgggttttggaggtggaccaaacaatttaagtgggccatcgggatttggagggggccctcagaattttggaaatggccctggtagcttaggcggtcccccggggtttggaagtggccctcctggtcttggaagtgcccctgggcatttgggtgggccaccagcttttgggcctggccccggccccggccccggccctggcccaatccatattggtggtccccctggctttgcatctagttctggaaaaccaggaccgacagtaattaaagtgcaaaacatgccctttactgtgtctattgatgagattttagatttcttttatggctatcaagtaatcccaggctcagtgtgtttaaaatacaatgaaaaaggtatgcccacaggtgaagccatggtggcctttgagtctcgggatgaagccacagctgctgtcattgacttaaatgacaggcctataggttcaagaaaagtaaaacttgtattagggtagccattcacatcattttttatagggtagatcttcatattgctgtgattaatgcatccagattgttttcctagtatttccaggttagaacctgtggattgtttcaattgcatatagcttggtttccataacatagagcattggttgactgtttacagaagactcactcaccaggataaacattgctgtatgttacagtaaagctatctggagagaacacataaatgattttggcataccattagagaaaccatttgtaaaactcaaatgaccacataaagcttatcaaggagtctagattggttttgttttataccatatgggatgaagaaaatagaaatgtcagtagaactcattgagggtgctcttgccagctgctgaaaatagaagttggctactctcagaatttggtttaaagctggacagatttgctttgttatagggtaaagctttgtctaaagtcctcattttcttttaaaattgaataaaatttctgtatacagattcattgtatgtacctttattgcttcttaagggtccttgctgtatagacagtcctgcttcagaagttgctgctttgtttgtctaattgactcatttgtaaatgagcagaactgttttgttggtttttttccctaaatataaaagtccacacttcgtttgtgctataacctcaaactttgatttctaatgtcacacttaaaactgtgtggaataagacttttgccataaaaataaactatggagtcctttatctaccagagcctttttggtttgaccgccacgatttaggttagtcagtttaaaaattgttcatgttgtttggatggtatcgaaaaccagaaaccacttttaataatgtgtttaagatacttgatttgaagtccttttcatatggactaattgtagtatcaatttcctcctgtcccgattatgtgaaattttggcctttaaacaaagaggggcccattcataagaaagtgttatatctaggtttttaaaactgaagttgaaattatctttgttagcagtagtagtatagaataaaagatccgtatgctggttcgtagattgatacgtgttagtcctgttatttggaggctttttggcatagttgttcgatcaggagcctgtttactaaaagtcttcatacagagtacaagtgcagccgccagaggagaaaattgagattcttgaccctttcatactcttttctttggtattcaggacactaaggcaggaggaccacatgagttctggttggtaagtgtccttgtcatgaaaacacttgccttacaaggctctaattatgatttccctagtcagtgctctgaagatgtgtcacattatattataaacaatacggaaggggagataggtgagatgatatgaaaaacaaattttctcactgtcataaaaggctctaattatggttactttccttgtgatgaaaaacttggccttacagggctctagttatggttactttccctagtcaatgctctgaaaatgtgtcacattataaacaatacagaaggagagatagatgagagatcatgaaaaccaaattttatcttttacatggcccctttgtcttcgtttgaaacatccccaacatttcctacaaatcagcgtagttacaaaggggtcagtcttttaaaataagtatttcctattaaactatatatatatacagtgcctttttggtgttgtgagtcagtggaacactgaaatacagcggttgtgtaatttaagagtggcaacagtttcatttgataagatttgaaaaggctttttatcactacaatcttagaggattgacagtacaggatttttgtttaagagaaggattgtttagactcaagaggtgactatgttgtgggtcttttgataattcatgaatacagatttgctttgaccgatcactagatactgcctcctcaatttcaaaagcaatataacgtttgtatatgctgtttaatttaagttaatgttaagtaatcatttctcattccaaagacaatgcaaaaaacttcagcactgcttgagagttgtatttcagccacagatattttctccattggaaagctattttcattttagaaaaatgggttgtttgaagatgaaagtcttttatcttttttcacaatttattttggttatatgttcgtacattcttattaaatatttcatacactttattgcaactactttgttatttctacatcttagataaatgctgaaaaggaaaacgatttcattgttcatctaattaaataaattaaaagagcggtttgtgtagaaattggagagaactatgttttatatgaatcacaacagtgctcgttgtggactgtaattaaatgctttgccctctggaacttgatttttgtgtatctgagatttattaacagtgctaactgctaaggatactgtttatcttgttctgggcattggagtttcagtttttaaaaaattcttgaaaatgtattctgtgaaactactcatacctctcttcctgcgaattttctcctaagaactaggtttggggtagaaatgaattgacattattttctcatttgctttgtatggtatgaaggatttgtaaagctttgctcaaagttgtgtgcatttgtaaacactatcatgatattttcaattttatgtgtaaattttattgtctgtttttggtgactctgacattaatggaagagaatattttccattagatttaattttttttcctctcccttctgattttttttttattggtgttcatttttcttttgatttaaaggattagagaaatctacaaatgtatgtcataaataagcaaatttgtaaacttttctgaactttagtgaaacatttagttcacaagcataatttggaggtgtgttctgtgtttacacagtagtttggatgtacaattattattagtggctttttaaaaaatgaaacagtgttaagtgaaatgtagttcctagctttgtactccaagttgtcaaagcatcaacaatgaaaattcgattaggaaactttatttaaaatttcaggtagtaatattcagtgtagttaaggccagtcttaacccactggatgaaaatctaggactgtatggaagtaagcaaacattacatttttaggtggaaatagtcagccttgcataaaaacaaggatgcgtgaaagccttaaattccagctcccttttactggagtctgtggttgtgtacaggtatgggccaagtgtaaaatctcatcaattttaagaacactcgggaaatgagtaaagaaaatgtaaaattgctgctagtcaaatcttttggaaagaatttctggaagtggtcactttaaaaattattttccacccttgcaaaattgccacatttaaattgttttactggcagttctatagtagtccagactttagaaaccaaacacaacaaaatggcttgttgccaatatggccacaacattgccagcaaatactgccttggcatcactcagcagaggtttttgtttataaagatgaagtcttgaatactgttcaataaacttgtcaaaaaataaaaaaaaaaaa

SEQ ID NO: 2784 - DNA, 2567 bp, Homo sapiens
ggcggcgcaggcgcactgggttcgccgcgccgaactgcagccatggagcaggcacctccggaccccgagcggcagctccagccggcgcccttggagccgctgggctccccagacgctgggctgggggctgcggtcggcaaggaagcggagggggccggagaagagagctctggggtcgacacgatgacacacaataatttttggttgaagaagatagaaatcagtgtttcagaagcagaaaaacgaactggaagaaatgccatgaacatgcaagaaacatatactgcttacctcattgaaacaaggtcagttgaacataccgatggtcagagtgtcctaacagactcactatggcggcgatatagtgaatttgagttgttgagaagctaccttttagtttactatccacatattgttgtgccacctctgccagaaaaacgggcagaatttgtttggcataaactctctgctgacaacatggatccagattttgtggagaggcgacggattggtttagaaaactttctcttgaggattgcttcacatcccatcctttgtagagacaaaatcttctatctgtttttaacacaggaaggtaactggaaggagactgtgaatgaaactgggtttcagctgaaggcagactccaggttaaaagcgcttaatgcaacattcagagtgaaaaacccagacaagagatttactgaccttaagcactatagtgatgaactgcagtctgtcatctcacatcttcttcgagtcagagctagagtagcagatcgactctatggtgtatataaagtacatgggaattatggtcgagttttcagtgaatggagtgccatagaaaaagaaatgggtgatggactgcagagtgctggtcatcatatggatgtgtatgcatcttctattgatgatattttggaagatgaagaacattatgcagatcagttaaaagagtatcttttttatgcagaagcattgcgggctgtgtgcaggaaacatgaacttatgcagtatgacttggagatggctgctcaggacttagcatccaagaagcagcagtgtgaggaactggtaactgggactgtgagaacattctctttgaagggaatgactaccaagctctttggtcaagaaactccagagcagagagaagccagaataaaggtgctagaagaacaaataaatgaaggagaacaacagctaaagtctaaaaatctggaaggcagagaatttgtgaaaaacgcatgggctgatattgaacgcttcaaagaacaaaagaaccgagacttaaaggaggccctcataagctatgcagtcatgcagatcagtatgtgcaaaaagggaattcaagtttggaccaatgctaaggaatgctttagcaagatgtaatcctgtgaattgaatttctcttcaatcaaagtgccccaaaacagaagcacaagtaaataaaagaaatttaagtcactacctagtatacataaacatatacaataagttaaataaattcagctttctttaacttaattgtggtcgtgttaatgtagcacaaaaaatatattttaatgaagattaaatattataatttgaggttttggggactggtgctgattccaaaaagttaatttaataatatataccaacagattgtttgtcacgcttctgaaccaatgactgaatgtcaagatgttcgttaatttctagatgtttgtttcaagaccagctgtttcagatctattaatgtagggaatttttccctaagattgaattcctatatttacttggtaagatccactaatctgttatagggagttgttttctcttgccttatagttgagctatttggtttgacaaagctcagcagaaacttgatgtgaaaaatctacgattttcttctacattcattgatgccccttgtaatgtttgcatacactagaaaatgccttcaatttgtgttttaccagaattttgatactggtcagaaattttatactgccaacaaagaagactcaacttctcagatctataatgggatacattgtcatcctctagcaactcctatatagaaagttttaactgaatatgttacatataagaattaaattcttctcaaataattcttaacctcagtaatgagcctaaatttactctgcttggctctctacacatggcatttcagggtataagatgtagcatttcaatgtgtaagatatatgtactaaacatatgtgttgctatcttcatcattaacatccttcttttctattgcttggctgtaatttttgtaaagataaattatattgtttttttgtatgtgtgtttgtagtatatgttcagaaggcaagcatcttcattttgctagctttgcagaatcttaaaatgtgtactcgttatttctaatgatgtaaaaaaaaatccctagtcctgtttagcatttgacttttttatatgttttaaatgttgctggatttttgtgctgtttgccaaacttatacaataaataaatgaaatattgtgctgaaaaaaaaaaaaaaaaaaaaaaaaaaaaaaaaaaaaaaaaaaaa

SEQ ID NO: 2785 - DNA, 8595 bp, Homo sapiens
aaagcggagagtcacagcggggccaggccctggggagcggagcctccaccgcccccctcattcccaggcaagggcttggggggaatgagccgggagagccgggtcccgagcctacagagccgggagcagctgagccgccggcgcctcggccgccgccgccgcctcctcctcctccgccgccgccagcccggagcctgagccggcggggcgggggggagaggagcgagcgcagcgcagcagcggagccccgcgaggcccgcccgggcgggtggggagggcagcccgggggactgggccccggggcggggtgggagggggggagaagacgaagacagggccgggtctctccgcggacgagacagcggggatcatggccgcgcaggtcgcccccgccgccgccagcagcctgggcaacccgccgccgccgccgccctcggagctgaagaaagccgagcagcagcagcgggaggaggcggggggcgaggcggcggcggcggcagcggccgagcgcggggaaatgaaggcagccgccgggcaggaaagcgagggccccgccgtggggccgccgcagccgctgggaaaggagctgcaggacggggccgagagcaatgggggtggcggcggcggcggagccggcagcggcggcgggcccggcgcggagccggacctgaagaactcgaacgggaacgcgggccctaggcccgccctgaacaataacctcacggagccgcccggcggcggcggtggcggcagcagcgatggggtgggggcgcctcctcactcagccgcggccgccttgccgcccccagcctacggcttcgggcaaccctacggccggagcccgtctgccgtcgccgccgccgcggccgccgtcttccaccaacaacatggcggacaacaaagccctggcctggcagcgctgcagagcggcggcggcgggggcctggagccctacgcggggccccagcagaactctcacgaccacggcttccccaaccaccagtacaactcctactaccccaaccgcagcgcctaccccccgcccgccccggcctacgcgctgagctccccgagaggtggcactccgggctccggcgcggcggcggctgccggctccaagccgcctccctcctccagcgcctccgcctcctcgtcgtcttcgtccttcgctcagcagcgcttcggggccatggggggaggcggcccctccgcggccggcgggggaactccccagcccaccgccacccccaccctcaaccaactgctcacgtcgcccagctcggcccggggctaccagggctaccccgggggcgactacagtggcgggccccaggacgggggcgccggcaagggcccggcggacatggcctcgcagtgttggggggctgcggcggcggcagctgcggcggcggccgcctcgggaggggcccaacaaaggagccaccacgcgcccatgagccccgggagcagcggcggcggggggcagccgctcgcccggacccctcagccatccagtccaatggatcagatgggcaagatgagacctcagccatatggcgggactaacccatactcgcagcaacagggacctccgtcaggaccgcagcaaggacatgggtacccagggcagccatacgggtcccagaccccgcagcggtacccgatgaccatgcagggccgggcgcagagtgccatgggcggcctctcttatacacagcagattcctccttatggacaacaaggccccagcgggtatggtcaacagggccagactccatattacaaccagcaaagtcctcaccctcagcagcagcagccaccctactcccagcaaccaccgtcccagacccctcatgcccaaccttcgtatcagcagcagccacagtctcaaccaccacagctccagtcctctcagcctccatactcccagcagccatcccagcctccacatcagcagtccccggctccatacccctcccagcagtcgacgacacagcagcacccccagagccagcccccctactcacagccacaggctcagtctccttaccagcagcagcaacctcagcagccagcaccctcgacgctctcccagcaggctgcgtatcctcagccccagtctcagcagtcccagcaaactgcctattcccagcagcgcttccctccaccgcaggagctatctcaagattcatttgggtctcaggcatcctcagccccctcaatgacctccagtaagggagggcaagaagatatgaacctgagccttcagtcaagaccctccagcttgcctgatctatctggttcaatagatgacctccccatggggacagaaggagctctgagtcctggagtgagcacatcagggatttccagcagccaaggagagcagagtaatccagctcagtctcctttctctcctcatacctcccctcacctgcctggcatccgaggcccttccccgtcccctgttggctctcccgccagtgttgctcagtctcgctcaggaccactctcgcctgctgcagtgccaggcaaccagatgccacctcggccacccagtggccagtcggacagcatcatgcatccttccatgaaccaatcaagcattgcccaagatcgaggttatatgcagaggaacccccagatgccccagtacagttccccccagcccggctcagccttatctccgcgtcagccttccggaggacagatacacacaggcatgggctcctaccagcagaactccatggggagctatggtccccaggggggtcagtatggcccacaaggtggctaccccaggcagccaaactataatgccttgcccaatgccaactaccccagtgcaggcatggctggaggcataaaccccatgggtgccggaggtcaaatgcatggacagcctggcatcccaccttatggcacactccctccagggaggatgagtcacgcctccatgggcaaccggccttatggccctaacatggccaatatgccacctcaggttgggtcagggatgtgtcccccaccagggggcatgaaccggaaaacccaagaaactgctgtcgccatgcatgttgctgccaactctatccaaaacaggccgccaggctaccccaatatgaatcaagggggcatgatgggaactggacctccttatggacaagggattaatagtatggctggcatgatcaaccctcagggacccccatattccatgggtggaaccatggccaacaattctgcagggatggcagccagcccagagatgatgggccttggggatgtaaagttaactccagccaccaaaatgaacaacaaggcagatgggacacccaagacagaatccaaatccaagaaatccagttcttctactacaaccaatgagaagatcaccaagttgtatgagctgggtggtgagcctgagaggaagatgtgggtggaccgttatctggccttcactgaggagaaggccatgggcatgacaaatctgcctgctgtgggtaggaaacctctggacctctatcgcctctatgtgtctgtgaaggagattggtggattgactcaggtcaacaagaacaaaaaatggcgggaacttgcaaccaacctcaatgtgggcacatcaagcagtgctgccagctccttgaaaaagcagtatatccagtgtctctatgcctttgaatgcaagattgaacggggagaagaccctcccccagacatctttgcagctgctgattccaagaagtcccagcccaagatccagcctccctctcctgcgggatcaggatctatgcaggggccccagactccccagtcaaccagcagttccatggcagaaggaggagacttaaagccaccaactccagcatccacaccacacagtcagatccccccattgccaggcatgagcaggagcaattcagttgggatccaggatgcctttaatgatggaagtgactccacattccagaagcggaattccatgactccaaaccctgggtatcagcccagtatgaatacctctgacatgatggggcgcatgtcctatgagccaaataaggatccttatggcagcatgaggaaagctccagggagtgatcccttcatgtcctcagggcagggccccaacggcgggatgggtgacccctacagtcgtgctgccggccctgggctaggaaatgtggcgatgggaccacgacagcactatccctatggaggtccttatgacagagtgaggacggagcctggaatagggcctgagggaaacatgagcactggggccccacagccgaatctcatgccttccaacccagactcggggatgtattctcctagccgctaccccccgcagcagcagcagcagcagcagcaacgacatgattcctatggcaatcagttctccacccaaggcaccccttctggcagccccttccccagccagcagactacaatgtatcaacagcaacagcagaattacaagcggccaatggatggcacatatggccctcctgccaagcggcacgaaggggagatgtacagcgtgccatacagcactgggcaggggcagcctcagcagcagcagttgcccccagcccagccccagcctgccagccagcaacaagctgcccagccttcccctcagcaagatgtatacaaccagtatggcaatgcctatcctgccactgccacagctgctactgagcgccgaccagcaggcggcccccagaaccaatttccattccagtttggccgagaccgtgtctctgcaccccctggcaccaatgcccagcaaaacatgccaccacaaatgatgggcggccccatacaggcatcagctgaggttgctcagcaaggcaccatgtggcaggggcgtaatgacatgacctataattatgccaacaggcagagcacgggctctgccccccagggccccgcctatcatggcgtgaaccgaacagatgaaatgctgcacacagatcagagggccaaccacgaaggctcgtggccttcccatggcacacgccagcccccatatggtccctctgcccctgtgccccccatgacaaggccccctccatctaactaccagcccccaccaagcatgcagaatcacattcctcaggtatccagccctgctcccctgccccggccaatggagaaccgcacctctcctagcaagtctccattcctgcactctgggatgaaaatgcagaaggcaggtcccccagtacctgcctcgcacatagcacctgcccctgtgcagccccccatgattcggcgggatatcaccttcccacctggctctgttgaagccacacagcctgtgttgaagcagaggaggcggctcacaatgaaagacattggaaccccggaggcatggcgggtaatgatgtccctcaagtctggtctcctggcagagagcacatgggcattagataccatcaacatcctgctgtatgatgacaacagcatcatgaccttcaacctcagtcagctcccagggttgctagagctccttgtagaatatttccgacgatgcctgattgagatctttggcattttaaaggagtatgaggtgggtgacccaggacagagaacgctactggatcctgggaggttcagcaaggtgtctagtccagctcccatggagggtggggaagaagaagaagaacttctaggtcctaaactagaagaggaagaagaagaggaagtagttgaaaatgatgaggagatagccttttcaggcaaggacaagccagcttcagagaatagtgaggagaagctgatcagtaagtttgacaagcttccagtaaagatcgtacagaagaatgatccatttgtggtggactgctcagataagcttgggcgtgtgcaggagtttgacagtggcctgctgcactggcggattggtgggggggacaccactgagcatatccagacccacttcgagagcaagacagagctgctgccttcccggcctcacgcaccctgcccaccagcccctcggaagcatgtgacaacagcagagggtacaccagggacaacagaccaggaggggcccccacctgatggacctccagaaaaacggatcacagccactatggatgacatgttgtctactcggtctagcaccttgaccgaggatggagctaagagttcagaggccatcaaggagagcagcaagtttccatttggcattagcccagcacagagccaccggaacatcaagatcctagaggacgaaccccacagtaaggatgagaccccactgtgtacccttctggactggcaggattctcttgccaagcgctgcgtctgtgtgtccaataccattcgaagcctgtcatttgtgccaggcaatgactttgagatgtccaaacacccagggctgctgctcatcctgggcaagctgatcctgctgcaccacaagcacccagaacggaagcaggcaccactaacttatgaaaaggaggaggaacaggaccaaggggtgagctgcaacaaagtggagtggtggtgggactgcttggagatgctccgggaaaacaccttggttacactcgccaacatctcggggcagttggacctatctccataccccgagagcatttgcctgcctgtcctggacggactcctacactgggcagtttgcccttcagctgaagcccaggaccccttttccaccctgggccccaatgccgtcctttccccgcagagactggtcttggaaaccctcagcaaactcagcatccaggacaacaatgtggacctgattctggccacaccccccttcagccgcctggagaagttgtatagcactatggtgcgcttcctcagtgaccgaaagaacccggtgtgccgggagatggctgtggtactgctggccaacctggctcagggggacagcctggcagctcgtgccattgcagtgcagaagggcagtatcggcaacctcctgggcttcctagaggacagccttgccgccacacagttccagcagagccaggccagcctcctccacatgcagaacccaccctttgagccaactagtgtggacatgatgcggcgggctgcccgcgcgctgcttgccttggccaaggtggacgagaaccactcagagtttactctgtacgaatcacggctgttggacatctcggtatcaccgttgatgaactcattggtttcacaagtcatttgtgatgtactgtttttgattggccagtcatgacagccgtgggacacctcccccccccgtgtgtgtgtgcgtgtgtggagaacttagaaactgactgttgccctttatttatgcaaaaccacctcagaatccagtttaccctgtgctgtccagcttctcccttgggaaaaagtctctcctgtttctctctcctccttccacctcccctccctccatcacctcacgcctttctgttccttgtcctcaccttactcccctcaggaccctaccccaccctctttgaaaagacaaagctctgcctacatagaagactttttttattttaaccaaagttactgttgtttacagtgagtttggggaaaaaaaataaaataaaaatggctttcccagtccttgctggctttcccagtccttgcatcaacgggatgccacatttcataactgtttttaatggtaaaaaaaaaaaaaaaaaatacaaaaaaaaattctgaaggacaaaaaaggtgactgctgaactgtgtgtggtttattgttgtacattcacaatcttgcaggagccaagaagttcgcagttgtgaacagaccctgttcactggagaggcctgtgcagtagagtgtagaccctttcatgtactgtactgtacacctgatactgtaaacatactgtaataataatgtctcacatggaaacagaaaacgctgggtcagcagcaagctgtagtttttaaaaatgtttttagttaaacgttgaggagaaaaaaaaaaaaggcttttcccccaaagtatcatgtgtgaacctacaacaccctgacctctttctctcctccttgattgtatgaataaccctgagatcacctcttagaactggttttaacctttagctgcagcggctacgctgccacgtgtgtatatatatgacgttgtacattgcacatacccttggatccccacagtttggtcctcctcccagctacccctttatagtatgacgagttaacaagttggtgacctgcacaaagcgagacacagctatttaatctcttgccagatatcgcccctcttggtgcgatgctgtacaggtctctgtaaaaagtccttgctgtctcagcagccaatcaacttatagtttatttttttctgggtttttgttttgttttgttttctttctaatcgaggtgtgaaaaagttctaggttcagttgaagttctgatgaagaaacacaattgagattttttcagtgataaaatctgcatatttgtatttcaacaatgtagctaaaacttgatgtaaattcctcctttttttccttttttggcttaatgaatatcatttattcagtatgaaatctttatactatatgttccacgtgttaagaataaatgtacattaaatcttggtaa

SEQ ID NO: 2786 - DNA, 7760 bp, Homo sapiens
aaagcggagagtcacagcggggccaggccctggggagcggagcctccaccgcccccctcattcccaggcaagggcttggggggaatgagccgggagagccgggtcccgagcctacagagccgggagcagctgagccgccggcgcctcggccgccgccgccgcctcctcctcctccgccgccgccagcccggagcctgagccggcggggcgggggggagaggagcgagcgcagcgcagcagcggagccccgcgaggcccgcccgggcgggtggggagggcagcccgggggactgggccccggggcggggtgggagggggggagaagacgaagacagggccgggtctctccgcggacgagacagcggggatcatggccgcgcaggtcgcccccgccgccgccagcagcctgggcaacccgccgccgccgccgccctcggagctgaagaaagccgagcagcagcagcgggaggaggcggggggcgaggcggcggcggcggcagcggccgagcgcggggaaatgaaggcagccgccgggcaggaaagcgagggccccgccgtggggccgccgcagccgctgggaaaggagctgcaggacggggccgagagcaatgggggtggcggcggcggcggagccggcagcggcggcgggcccggcgcggagccggacctgaagaactcgaacgggaacgcgggccctaggcccgccctgaacaataacctcacggagccgcccggcggcggcggtggcggcagcagcgatggggtgggggcgcctcctcactcagccgcggccgccttgccgcccccagcctacggcttcgggcaaccctacggccggagcccgtctgccgtcgccgccgccgcggccgccgtcttccaccaacaacatggcggacaacaaagccctggcctggcagcgctgcagagcggcggcggcgggggcctggagccctacgcggggccccagcagaactctcacgaccacggcttccccaaccaccagtacaactcctactaccccaaccgcagcgcctaccccccgcccgccccggcctacgcgctgagctccccgagaggtggcactccgggctccggcgcggcggcggctgccggctccaagccgcctccctcctccagcgcctccgcctcctcgtcgtcttcgtccttcgctcagcagcgcttcggggccatggggggaggcggcccctccgcggccggcgggggaactccccagcccaccgccacccccaccctcaaccaactgctcacgtcgcccagctcggcccggggctaccagggctaccccgggggcgactacagtggcgggccccaggacgggggcgccggcaagggcccggcggacatggcctcgcagtgttggggggctgcggcggcggcagctgcggcggcggccgcctcgggaggggcccaacaaaggagccaccacgcgcccatgagccccgggagcagcggcggcggggggcagccgctcgcccggacccctcagccatccagtccaatggatcagatgggcaagatgagacctcagccatatggcgggactaacccatactcgcagcaacagggacctccgtcaggaccgcagcaaggacatgggtacccagggcagccatacgggtcccagaccccgcagcggtacccgatgaccatgcagggccgggcgcagagtgccatgggcggcctctcttatacacagcagattcctccttatggacaacaaggccccagcgggtatggtcaacagggccagactccatattacaaccagcaaagtcctcaccctcagcagcagcagccaccctactcccagcaaccaccgtcccagacccctcatgcccaaccttcgtatcagcagcagccacagtctcaaccaccacagctccagtcctctcagcctccatactcccagcagccatcccagcctccacatcagcagtccccggctccatacccctcccagcagtcgacgacacagcagcacccccagagccagcccccctactcacagccacaggctcagtctccttaccagcagcagcaacctcagcagccagcaccctcgacgctctcccagcaggctgcgtatcctcagccccagtctcagcagtcccagcaaactgcctattcccagcagcgcttccctccaccgcaggagctatctcaagattcatttgggtctcaggcatcctcagccccctcaatgacctccagtaagggagggcaagaagatatgaacctgagccttcagtcaagaccctccagcttgcctgatctatctggttcaatagatgacctccccatggggacagaaggagctctgagtcctggagtgagcacatcagggatttccagcagccaaggagagcagagtaatccagctcagtctcctttctctcctcatacctcccctcacctgcctggcatccgaggcccttccccgtcccctgttggctctcccgccagtgttgctcagtctcgctcaggaccactctcgcctgctgcagtgccaggcaaccagatgccacctcggccacccagtggccagtcggacagcatcatgcatccttccatgaaccaatcaagcattgcccaagatcgaggttatatgcagaggaacccccagatgccccagtacagttccccccagcccggctcagccttatctccgcgtcagccttccggaggacagatacacacaggcatgggctcctaccagcagaactccatggggagctatggtccccaggggggtcagtatggcccacaaggtggctaccccaggcagccaaactataatgccttgcccaatgccaactaccccagtgcaggcatggctggaggcataaaccccatgggtgccggaggtcaaatgcatggacagcctggcatcccaccttatggcacactccctccagggaggatgagtcacgcctccatgggcaaccggccttatggccctaacatggccaatatgccacctcaggttgggtcagggatgtgtcccccaccagggggcatgaaccggaaaacccaagaaactgctgtcgccatgcatgttgctgccaactctatccaaaacaggccgccaggctaccccaatatgaatcaagggggcatgatgggaactggacctccttatggacaagggattaatagtatggctggcatgatcaaccctcagggacccccatattccatgggtggaaccatggccaacaattctgcagggatggcagccagcccagagatgatgggccttggggatgtaaagttaactccagccaccaaaatgaacaacaaggcagatgggacacccaagacagaatccaaatccaagaaatccagttcttctactacaaccaatgagaagatcaccaagttgtatgagctgggtggtgagcctgagaggaagatgtgggtggaccgttatctggccttcactgaggagaaggccatgggcatgacaaatctgcctgctgtgggtaggaaacctctggacctctatcgcctctatgtgtctgtgaaggagattggtggattgactcaggtcaacaagaacaaaaaatggcgggaacttgcaaccaacctcaatgtgggcacatcaagcagtgctgccagctccttgaaaaagcagtatatccagtgtctctatgcctttgaatgcaagattgaacggggagaagaccctcccccagacatctttgcagctgctgattccaagaagtcccagcccaagatccagcctccctctcctgcgggatcaggatctatgcaggggccccagactccccagtcaaccagcagttccatggcagaaggaggagacttaaagccaccaactccagcatccacaccacacagtcagatccccccattgccaggcatgagcaggagcaattcagttgggatccaggatgcctttaatgatggaagtgactccacattccagaagcggaattccatgactccaaaccctgggtatcagcccagtatgaatacctctgacatgatggggcgcatgtcctatgagccaaataaggatccttatggcagcatgaggaaagctccagggagtgatcccttcatgtcctcagggcagggccccaacggcgggatgggtgacccctacagtcgtgctgccggccctgggctaggaaatgtggcgatgggaccacgacagcactatccctatggaggtccttatgacagagtgaggacggagcctggaatagggcctgagggaaacatgagcactggggccccacagccgaatctcatgccttccaacccagactcggggatgtattctcctagccgctaccccccgcagcagcagcagcagcagcagcaacgacatgattcctatggcaatcagttctccacccaaggcaccccttctggcagccccttccccagccagcagactacaatgtatcaacagcaacagcaggaaccccggaggcatggcgggtaatgatgtccctcaagtctggtctcctggcagagagcacatgggcattagataccatcaacatcctgctgtatgatgacaacagcatcatgaccttcaacctcagtcagctcccagggttgctagagctccttgtagaatatttccgacgatgcctgattgagatctttggcattttaaaggagtatgaggtgggtgacccaggacagagaacgctactggatcctgggaggttcagcaaggtgtctagtccagctcccatggagggtggggaagaagaagaagaacttctaggtcctaaactagaagaggaagaagaagaggaagtagttgaaaatgatgaggagatagccttttcaggcaaggacaagccagcttcagagaatagtgaggagaagctgatcagtaagtttgacaagcttccagtaaagatcgtacagaagaatgatccatttgtggtggactgctcagataagcttgggcgtgtgcaggagtttgacagtggcctgctgcactggcggattggtgggggggacaccactgagcatatccagacccacttcgagagcaagacagagctgctgccttcccggcctcacgcaccctgcccaccagcccctcggaagcatgtgacaacagcagagggtacaccagggacaacagaccaggaggggcccccacctgatggacctccagaaaaacggatcacagccactatggatgacatgttgtctactcggtctagcaccttgaccgaggatggagctaagagttcagaggccatcaaggagagcagcaagtttccatttggcattagcccagcacagagccaccggaacatcaagatcctagaggacgaaccccacagtaaggatgagaccccactgtgtacccttctggactggcaggattctcttgccaagcgctgcgtctgtgtgtccaataccattcgaagcctgtcatttgtgccaggcaatgactttgagatgtccaaacacccagggctgctgctcatcctgggcaagctgatcctgctgcaccacaagcacccagaacggaagcaggcaccactaacttatgaaaaggaggaggaacaggaccaaggggtgagctgcaacaaagtggagtggtggtgggactgcttggagatgctccgggaaaacaccttggttacactcgccaacatctcggggcagttggacctatctccataccccgagagcatttgcctgcctgtcctggacggactcctacactgggcagtttgcccttcagctgaagcccaggaccccttttccaccctgggccccaatgccgtcctttccccgcagagactggtcttggaaaccctcagcaaactcagcatccaggacaacaatgtggacctgattctggccacaccccccttcagccgcctggagaagttgtatagcactatggtgcgcttcctcagtgaccgaaagaacccggtgtgccgggagatggctgtggtactgctggccaacctggctcagggggacagcctggcagctcgtgccattgcagtgcagaagggcagtatcggcaacctcctgggcttcctagaggacagccttgccgccacacagttccagcagagccaggccagcctcctccacatgcagaacccaccctttgagccaactagtgtggacatgatgcggcgggctgcccgcgcgctgcttgccttggccaaggtggacgagaaccactcagagtttactctgtacgaatcacggctgttggacatctcggtatcaccgttgatgaactcattggtttcacaagtcatttgtgatgtactgtttttgattggccagtcatgacagccgtgggacacctcccccccccgtgtgtgtgtgcgtgtgtggagaacttagaaactgactgttgccctttatttatgcaaaaccacctcagaatccagtttaccctgtgctgtccagcttctcccttgggaaaaagtctctcctgtttctctctcctccttccacctcccctccctccatcacctcacgcctttctgttccttgtcctcaccttactcccctcaggaccctaccccaccctctttgaaaagacaaagctctgcctacatagaagactttttttattttaaccaaagttactgttgtttacagtgagtttggggaaaaaaaataaaataaaaatggctttcccagtccttgcatcaacgggatgccacatttcataactgtttttaatggtaaaaaaaaaaaaaaaaaatggctttcccagtccttgcatcaacgggatgccacatttcataactgtttttaatggtaaaaaaaaaaaaaaaaaatacaaaaaaaaattctgaaggacaaaaaaggtgactgctgaactgtgtgtggtttattgttgtacattcacaatcttgcaggagccaagaagttcgcagttgtgaacagaccctgttcactggagaggcctgtgcagtagagtgtagaccctttcatgtactgtactgtacacctgatactgtaaacatactgtaataataatgtctcacatggaaacagaaaacgctgggtcagcagcaagctgtagtttttaaaaatgtttttagttaaacgttgaggagaaaaaaaaaaaaggcttttcccccaaagtatcatgtgtgaacctacaacaccctgacctctttctctcctccttgattgtatgaataaccctgagatcacctcttagaactggttttaacctttagctgcagcggctacgctgccacgtgtgtatatatatgacgttgtacattgcacatacccttggatccccacagtttggtcctcctcccagctacccctttatagtatgacgagttaacaagttggtgacctgcacaaagcgagacacagctatttaatctcttgccagatatcgcccctcttggtgcgatgctgtacaggtctctgtaaaaagtccttgctgtctcagcagccaatcaacttatagtttatttttttctgggtttttgttttgttttgttttctttctaatcgaggtgtgaaaaagttctaggttcagttgaagttctgatgaagaaacacaattgagattttttcagtgataaaatctgcatatttgtatttcaacaatgtagctaaaacttgatgtaaattcctcctttttttccttttttggcttaatgaatatcatttattcagtatgaaatctttatactatatgttccacgtgttaagaataaatgtacattaaatcttggtaa

SEQ ID NO: 2787 - DNA, 7944 bp, Homo sapiens
aaagcggagagtcacagcggggccaggccctggggagcggagcctccaccgcccccctcattcccaggcaagggcttggggggaatgagccgggagagccgggtcccgagcctacagagccgggagcagctgagccgccggcgcctcggccgccgccgccgcctcctcctcctccgccgccgccagcccggagcctgagccggcggggcgggggggagaggagcgagcgcagcgcagcagcggagccccgcgaggcccgcccgggcgggtggggagggcagcccgggggactgggccccggggcggggtgggagggggggagaagacgaagacagggccgggtctctccgcggacgagacagcggggatcatggccgcgcaggtcgcccccgccgccgccagcagcctgggcaacccgccgccgccgccgccctcggagctgaagaaagccgagcagcagcagcgggaggaggcggggggcgaggcggcggcggcggcagcggccgagcgcggggaaatgaaggcagccgccgggcaggaaagcgagggccccgccgtggggccgccgcagccgctgggaaaggagctgcaggacggggccgagagcaatgggggtggcggcggcggcggagccggcagcggcggcgggcccggcgcggagccggacctgaagaactcgaacgggaacgcgggccctaggcccgccctgaacaataacctcacggagccgcccggcggcggcggtggcggcagcagcgatggggtgggggcgcctcctcactcagccgcggccgccttgccgcccccagcctacggcttcgggcaaccctacggccggagcccgtctgccgtcgccgccgccgcggccgccgtcttccaccaacaacatggcggacaacaaagccctggcctggcagcgctgcagagcggcggcggcgggggcctggagccctacgcggggccccagcagaactctcacgaccacggcttccccaaccaccagtacaactcctactaccccaaccgcagcgcctaccccccgcccgccccggcctacgcgctgagctccccgagaggtggcactccgggctccggcgcggcggcggctgccggctccaagccgcctccctcctccagcgcctccgcctcctcgtcgtcttcgtccttcgctcagcagcgcttcggggccatggggggaggcggcccctccgcggccggcgggggaactccccagcccaccgccacccccaccctcaaccaactgctcacgtcgcccagctcggcccggggctaccagggctaccccgggggcgactacagtggcgggccccaggacgggggcgccggcaagggcccggcggacatggcctcgcagtgttggggggctgcggcggcggcagctgcggcggcggccgcctcgggaggggcccaacaaaggagccaccacgcgcccatgagccccgggagcagcggcggcggggggcagccgctcgcccggacccctcagccatccagtccaatggatcagatgggcaagatgagacctcagccatatggcgggactaacccatactcgcagcaacagggacctccgtcaggaccgcagcaaggacatgggtacccagggcagccatacgggtcccagaccccgcagcggtacccgatgaccatgcagggccgggcgcagagtgccatgggcggcctctcttatacacagcagattcctccttatggacaacaaggccccagcgggtatggtcaacagggccagactccatattacaaccagcaaagtcctcaccctcagcagcagcagccaccctactcccagcaaccaccgtcccagacccctcatgcccaaccttcgtatcagcagcagccacagtctcaaccaccacagctccagtcctctcagcctccatactcccagcagccatcccagcctccacatcagcagtccccggctccatacccctcccagcagtcgacgacacagcagcacccccagagccagcccccctactcacagccacaggctcagtctccttaccagcagcagcaacctcagcagccagcaccctcgacgctctcccagcaggctgcgtatcctcagccccagtctcagcagtcccagcaaactgcctattcccagcagcgcttccctccaccgcaggagctatctcaagattcatttgggtctcaggcatcctcagccccctcaatgacctccagtaagggagggcaagaagatatgaacctgagccttcagtcaagaccctccagcttgcctgatctatctggttcaatagatgacctccccatggggacagaaggagctctgagtcctggagtgagcacatcagggatttccagcagccaaggagagcagagtaatccagctcagtctcctttctctcctcatacctcccctcacctgcctggcatccgaggcccttccccgtcccctgttggctctcccgccagtgttgctcagtctcgctcaggaccactctcgcctgctgcagtgccaggcaaccagatgccacctcggccacccagtggccagtcggacagcatcatgcatccttccatgaaccaatcaagcattgcccaagatcgaggttatatgcagaggaacccccagatgccccagtacagttccccccagcccggctcagccttatctccgcgtcagccttccggaggacagatacacacaggcatgggctcctaccagcagaactccatggggagctatggtccccaggggggtcagtatggcccacaaggtggctaccccaggcagccaaactataatgccttgcccaatgccaactaccccagtgcaggcatggctggaggcataaaccccatgggtgccggaggtcaaatgcatggacagcctggcatcccaccttatggcacactccctccagggaggatgagtcacgcctccatgggcaaccggccttatggccctaacatggccaatatgccacctcaggttgggtcagggatgtgtcccccaccagggggcatgaaccggaaaacccaagaaactgctgtcgccatgcatgttgctgccaactctatccaaaacaggccgccaggctaccccaatatgaatcaagggggcatgatgggaactggacctccttatggacaagggattaatagtatggctggcatgatcaaccctcagggacccccatattccatgggtggaaccatggccaacaattctgcagggatggcagccagcccagagatgatgggccttggggatgtaaagttaactccagccaccaaaatgaacaacaaggcagatgggacacccaagacagaatccaaatccaagaaatccagttcttctactacaaccaatgagaagatcaccaagttgtatgagctgggtggtgagcctgagaggaagatgtgggtggaccgttatctggccttcactgaggagaaggccatgggcatgacaaatctgcctgctgtgggtaggaaacctctggacctctatcgcctctatgtgtctgtgaaggagattggtggattgactcaggtcaacaagaacaaaaaatggcgggaacttgcaaccaacctcaatgtgggcacatcaagcagtgctgccagctccttgaaaaagcagtatatccagtgtctctatgcctttgaatgcaagattgaacggggagaagaccctcccccagacatctttgcagctgctgattccaagaagtcccagcccaagatccagcctccctctcctgcgggatcaggatctatgcaggggccccagactccccagtcaaccagcagttccatggcagaaggaggagacttaaagccaccaactccagcatccacaccacacagtcagatccccccattgccaggcatgagcaggagcaattcagttgggatccaggatgcctttaatgatggaagtgactccacattccagaagcggaattccatgactccaaaccctgggtatcagcccagtatgaatacctctgacatgatggggcgcatgtcctatgagccaaataaggatccttatggcagcatgaggaaagctccagggagtgatcccttcatgtcctcagggcagggccccaacggcgggatgggtgacccctacagtcgtgctgccggccctgggctaggaaatgtggcgatgggaccacgacagcactatccctatggaggtccttatgacagagtgaggacggagcctggaatagggcctgagggaaacatgagcactggggccccacagccgaatctcatgccttccaacccagactcggggatgtattctcctagccgctaccccccgcagcagcagcagcagcagcagcaacgacatgattcctatggcaatcagttctccacccaaggcaccccttctggcagccccttccccagccagcagactacaatgtatcaacagcaacagcaggtatccagccctgctcccctgccccggccaatggagaaccgcacctctcctagcaagtctccattcctgcactctgggatgaaaatgcagaaggcaggtcccccagtacctgcctcgcacatagcacctgcccctgtgcagccccccatgattcggcgggatatcaccttcccacctggctctgttgaagccacacagcctgtgttgaagcagaggaggcggctcacaatgaaagacattggaaccccggaggcatggcgggtaatgatgtccctcaagtctggtctcctggcagagagcacatgggcattagataccatcaacatcctgctgtatgatgacaacagcatcatgaccttcaacctcagtcagctcccagggttgctagagctccttgtagaatatttccgacgatgcctgattgagatctttggcattttaaaggagtatgaggtgggtgacccaggacagagaacgctactggatcctgggaggttcagcaaggtgtctagtccagctcccatggagggtggggaagaagaagaagaacttctaggtcctaaactagaagaggaagaagaagaggaagtagttgaaaatgatgaggagatagccttttcaggcaaggacaagccagcttcagagaatagtgaggagaagctgatcagtaagtttgacaagcttccagtaaagatcgtacagaagaatgatccatttgtggtggactgctcagataagcttgggcgtgtgcaggagtttgacagtggcctgctgcactggcggattggtgggggggacaccactgagcatatccagacccacttcgagagcaagacagagctgctgccttcccggcctcacgcaccctgcccaccagcccctcggaagcatgtgacaacagcagagggtacaccagggacaacagaccaggaggggcccccacctgatggacctccagaaaaacggatcacagccactatggatgacatgttgtctactcggtctagcaccttgaccgaggatggagctaagagttcagaggccatcaaggagagcagcaagtttccatttggcattagcccagcacagagccaccggaacatcaagatcctagaggacgaaccccacagtaaggatgagaccccactgtgtacccttctggactggcaggattctcttgccaagcgctgcgtctgtgtgtccaataccattcgaagcctgtcatttgtgccaggcaatgactttgagatgtccaaacacccagggctgctgctcatcctgggcaagctgatcctgctgcaccacaagcacccagaacggaagcaggcaccactaacttatgaaaaggaggaggaacaggaccaaggggtgagctgcaacaaagtggagtggtggtgggactgcttggagatgctccgggaaaacaccttggttacactcgccaacatctcggggcagttggacctatctccataccccgagagcatttgcctgcctgtcctggacggactcctacactgggcagtttgcccttcagctgaagcccaggaccccttttccaccctgggccccaatgccgtcctttccccgcagagactggtcttggaaaccctcagcaaactcagcatccaggacaacaatgtggacctgattctggccacaccccccttcagccgcctggagaagttgtatagcactatggtgcgcttcctcagtgaccgaaagaacccggtgtgccgggagatggctgtggtactgctggccaacctggctcagggggacagcctggcagctcgtgccattgcagtgcagaagggcagtatcggcaacctcctgggcttcctagaggacagccttgccgccacacagttccagcagagccaggccagcctcctccacatgcagaacccaccctttgagccaactagtgtggacatgatgcggcgggctgcccgcgcgctgcttgccttggccaaggtggacgagaaccactcagagtttactctgtacgaatcacggctgttggacatctcggtatcaccgttgatgaactcattggtttcacaagtcatttgtgatgtactgtttttgattggccagtcatgacagccgtgggacacctcccccccccgtgtgtgtgtgcgtgtgtggagaacttagaaactgactgttgccctttatttatgcaaaaccacctcagaatccagtttaccctgtgctgtccagcttctcccttgggaaaaagtctctcctgtttctctctcctccttccacctcccctccctccatcacctcacgcctttctgttccttgtcctcaccttactcccctcaggaccctaccccaccctctttgaaaagacaaagctctgcctacatagaagactttttttattttaaccaaagttactgttgtttacagtgagtttggggaaaaaaaataaaataaaaatggctttcccagtccttgctggctttcccagtccttgcatcaacgggatgccacatttcataactgtttttaatggtaaaaaaaaaaaaaaaaaatacaaaaaaaaattctgaaggacaaaaaaggtgactgctgaactgtgtgtggtttattgttgtacattcacaatcttgcaggagccaagaagttcgcagttgtgaacagaccctgttcactggagaggcctgtgcagtagagtgtagaccctttcatgtactgtactgtacacctgatactgtaaacatactgtaataataatgtctcacatggaaacagaaaacgctgggtcagcagcaagctgtagtttttaaaaatgtttttagttaaacgttgaggagaaaaaaaaaaaaggcttttcccccaaagtatcatgtgtgaacctacaacaccctgacctctttctctcctccttgattgtatgaataaccctgagatcacctcttagaactggttttaacctttagctgcagcggctacgctgccacgtgtgtatatatatgacgttgtacattgcacatacccttggatccccacagtttggtcctcctcccagctacccctttatagtatgacgagttaacaagttggtgacctgcacaaagcgagacacagctatttaatctcttgccagatatcgcccctcttggtgcgatgctgtacaggtctctgtaaaaagtccttgctgtctcagcagccaatcaacttatagtttatttttttctgggtttttgttttgttttgttttctttctaatcgaggtgtgaaaaagttctaggttcagttgaagttctgatgaagaaacacaattgagattttttcagtgataaaatctgcatatttgtatttcaacaatgtagctaaaacttgatgtaaattcctcctttttttccttttttggcttaatgaatatcatttattcagtatgaaatctttatactatatgttccacgtgttaagaataaatgtacattaaatcttggtaa

SEQ ID NO: 2788 - DNA, 1113 bp, Homo sapiens
ccgcgcagtcggaccggctgctgagacgaacgcttcactggggcagtctctgcatatcatggggagatagacgctgctgcctttaattggccttggtcctcacagctccaaaaagaaacaggatctcgataagctctatgagctgaagtccaaagctcggcagattatgaaccagtttggcccctcagccctaatcaacctctccaatttctcatccataaaaccggaaccagccagcacccctccacaaggctccatggccaatagtactgcagtggtaaagataccaggcactcctggggcaggaggtcgtcttagccctgaaaacaatcaggtattgaccaagaagaaattacaggacttagtaagagaagtggatcctaatgagcagttggatgaagatgtggaggagatgctgctgcagattgctgatgattttatcgagagtgtggtgacagcagcctgtcagcttgcgcggcatcgcaagtctagcaccctggaggtgaaagatgtccagctgcatttagagcgccagtggaacatgtggatcccaggatttggttctgaagaaatccgaccctacaaaaaagcttgcaccacagaagctcacaaacagagaatggcattgatccggaaaacaaccaagaaataacacacggaaaggtcagggaatggacagcaatgtatttggagatacttgagctgagaactcagccatctcatccttggatttttttttttaatgctttacagagaagcatatattttttattaacagtgcagcaatatctataatgactgagaggatctgccaaaagaataaagcctcctaccccaacttccggtcccttttccctgccatctcaaagaggagcaatgtatcttccagagaagattttatttgtggtttattatataagtgactgaatatgggacaaagcattatggtctttttgggtaagacagtattagcaggatttgtaaagggttttgtttccttctcccttcccccttttccctgtactttgtaatgtcagtgtttatatgaatatgactttcatttcatttgcttttccagaataaagaagttattaataaaaaaaaaaaaaaaaa

SEQ ID NO: 2789 - DNA, 2269 bp, Homo sapiens
ccacccccggccccgaagctccgccacccgccgccatgagtagctttggagctggcaaaaccaaagaagttatcttcagtgtggaggatggctccgtgaaaatgttcctgaggggccgccctgtgcccatgatgatcccagacgagctggcacccacctacagcctggacacacgctcggagctgccttcttgccggctcaagctggagtgggtctatggctaccgtggccgagactgccgggccaacctttatttgctgcccaccggggagatagtgtactttgtggcctccgtagccgtgctatacagcgtggaggagcagaggcagcgacactacctgggacacaacgatgacatcaaatgcttggccatccacccagatatggtcaccatcgccacgggacaggtggcgggaaccactaaggaagggaagccgctgccgccccacgtgcgcatctgggactcagtttccctctccaccttacacgtgctgggcttgggggtgtttgacagagccgtgtgctgtgtgggcttctccaaatctaatggaggcaacctgctgtgtgcagtggatgaatccaatgatcacatgctctcggtgtgggactgggccaaggagaccaaggtggtggatgtcaagtgctccaatgaggctgtattggtggccaccttccaccccacggaccccactgtgcttatcacctgcgggaaatctcacatctacttctggaccttggaggggggcagcttgagcaagcggcaaggcctctttgagaaacatgagaaaccgaagtatgtgctgtgtgtgacctttttggaaggtggcgacgtggtcacgggggactctggggggaacctctatgtttggggcaaaggtgggaaccgtatcacacaggcggtgctgggcgcccacgacggcggcgtgtttgggctctgcgccctgcgggacgggacgctggtgtctggagggggccgtgatcggcgggtggtcctctggggttctgactacagcaagctgcaggaagtggaggtccctgaggactttggccctgtgcgcaccgtggcagagggccacggagacacactgtacgtggggaccacccgcaattccatcctgcagggctccgtgcacacaggcttctcactgctggtccagggccatgtggaagagctgtggggcctggccacacaccccagtcgggcccagtttgtgacctgcgggcaggataagctggtgcatctatggagctcagattcccaccagcccctgtggagcaggatcatcgaggaccctgcccgctcagccggcttccaccccagtggctctgtcctggctgtgggtacagtgactggcagatggctgctgctggacacggagacccatgacctggtggctatccacacagacggcaatgaacagatctcagtggtcagcttctccccagacggggcgtacctggccgtgggctcccacgacaacttggtgtacgtgtacacggtggaccagggcggccgcaaggtcagccgcctgggcaagtgctcgggccattccagttttatcacccacctggattgggcccaggacagcagctgctttgtcaccaactccggggactatgagattctgtactgggacccggctacctgtaagcagatcaccagtgcggatgctgtgaggaacatggaatgggccacagctacttgtgtcctagggtttggggtgtttgggatctggtctgagggggcggacggcactgatatcaacgctgtggcccgctctcatgatgggaagttgctggcttcagctgatgactttggcaaagttcacctgtttagctacccctgctgtcagcctcgagccctcagccacaagtacggtggacacagcagccatgtgacaaatgtggccttcttgtgggatgacagcatggccctgaccacagggggcaaggacaccagtgtgctacagtggcgggtggtctgatgcggccagggaagagtcaggtgtcagggcaggaattctattttcgggagatgtctattgccgagtagagtaatatatacccagagtatgtctatagcagagggggttatgggggcgggagggtagactgacatacagaagtctctatttatccgggtgggaagagggagtcacatcgctttggggatccattggtgtttggtttggggtgttttttaagttttttcttttatatcatccagaaataaagacacgtacactaaaaaaaaaaaaaaaaaaaaaaa

SEQ ID NO: 2790 - DNA, 2070 bp, Homo sapiens
gcggctccggctccggctccggctcccgggcatttaaaggggacgcggcggctgcccgggggggatgaggggcaagtggaggggacggctcagacgcacatcatcctcagtccctcgggactggagggactcgtgagccggagcccagaaatccgggggtggataagacaccgcgtcccctccaattcccgtaagcaccccttgctccatcctgcgccccaatacctcagctagcccccttccccacttcttacactccaaactcagccgggacagcaagtggaggggacggctcagacgacctctgctgccgccgcccccacgaacgtgtgacgacggctggaggccaacagagtccctacaggtggtgctcacggtaatgcaccgacaatgagtggctgttttccagtttctggcctccgctgcctatctagggacggcaggatggccgcgcagggcgcgccgcgcttcctcctgaccttcgacttcgacgagactatcgtggacgaaaacagcgacgattcgatcgtgcgcgccgcgccgggccagcggctcccggagagcctgcgagccacctaccgcgagggcttctacaacgagtacatgcagcgcgtcttcaagtacctgggcgagcagggcgtgcggccgcgggacctgagcgccatctacgaagccatccctttgtcgccaggcatgagcgacctgctgcagtttgtggcaaaacagggcgcctgcttcgaggtgattctcatctccgatgccaacacctttggcgtggagagctcgctgcgcgccgccggccaccacagcctgttccgccgcatcctcagcaacccgtcggggccggatgcgcggggactgctggctctgcggccgttccacacacacagctgcgcgcgctgccccgccaacatgtgcaagcacaaggtgctcagcgactacctgcgcgagcgggcccacgacggcgtgcacttcgagcgcctcttctacgtgggcgacggcgccaacgacttctgccccatggggctgctggcgggcggcgacgtggccttcccgcgccgcggctaccccatgcaccgcctcattcaggaggcccagaaggccgagcccagctcgttccgcgccagcgtggtgccctgggaaacggctgcagatgtgcgcctccacctgcaacaggtgctgaagtcgtgctgagtctggccgcctgcaggggggtacccgggccaacggcggagggggcggggaagggagattcggcaaagacagctttactactcccttttccctttggctttgttatgtccctctgggaatttctggaatctcgtatttgggggcttggggaagggggctcagagccgtccctatctattcagttaacccacctcggctgcctcccccactccactgtgcacggttgagttctggagtctgacccatcgcggggtggcgcgcaaaccttggaaggcagcagtatttcctggtcctcccaactgggaggaaggggcccccccggcaggtgagagaaggaacatctcccgccgctgtaacttgttgcctcgggctgcgtgaccgcccctcctccagtctactgtggagggaacccaggatcctgaaattctcctggccgcaagaactccccacagaggcagaagagggtctccacctatggccccaggcctttgcgatcttgcttcacccaccgcgaccccacactatttctgtgctgtccacactctcttgcctcccgacccccgcactcccttctagcacccccaaaggaaaagccagaggaacaatcgcctcctggtggtggtacgaggtagcgcaccgtccggctcgggtccggacagccagtaacctcgcagagagtgacggtgtctccttgcatcccagcctcgtctatgcagcaagagaccagggacttcaccaaagtcaccctcgcgggctgggccttccacgcatcccccccaccccccatggaacagaaagccatgtttttaagcagaaccagcgaaacccaagcccctccttcctctggtgttttacaactataaaggaggtgaaggg

SEQ ID NO: 2791 - DNA, 1056 bp, Homo sapiens
gtctgcgcggagtctgagcggcgctcgtcccgtcccaaggccgacgccagcacgccgtcatggcccccgcagcggcgacggggggcagcaccctgcccagtggcttctcggtcttcaccaccttgcccgacttgctcttcatctttgagtttatcttcgggggcctggtgtggatcctggtggcctcctccctggtgccctggcccctggtccagggctgggtgatgttcgtgtctgtgttctgcttcgtggccaccaccaccttgatcatcctgtacataattggagcccacggtggagagacttcctgggtcaccttggacgcagcctaccactgcaccgctgccctcttttacctcagcgcctcagtcctggaggccctggccaccatcacgatgcaagacggcttcacctacaggcactaccatgaaaacattgctgccgtggtgttctcctacatagccactctgctctacgtggtccatgcggtgttctctttaatcagatggaagtcttcataaagccgcagtagaacttgagctgaaaacccagatggtgttaactggccgccccactttccggcataactttttagaaaacagaaatgcccttgatggtggaaaaaagaaaacaaccacccccccactgcccaaaaaaaaaagccctgccctgttgctcgtgggtgctgtgtttactctcccgtgtgccttcgcgtccgggttgggagcttgctgtgtctaacctccaactgctgtgctgtctgctagggtcacctcctgtttgtgaaaggggaccttcttgttcgggggtgggaagtggcgaccgtgacctgagaaggaaagaaagatcctctgctgacccctggagcagctctcgagaactacctgttggtattgtccacaagctctcccgagcgccccatcttgtgccatgttttaagtcttcatggatgttctgcatgtcatggggactaaaactcacccaacagatctttccagaggtccatggtggaagacgataaccctgtgaaatactttataaaatgtcttaatgttc

SEQ ID NO: 2792 - DNA, 930 bp, Homo sapiens
gtctgcgcggagtctgagcggcgctcgtcccgtcccaaggccgacgccagcacgccgtcatggcccccgcagcggcgacggggggcagcaccctgcccagtggcttctcggtcttcaccaccttgcccgacttgctcttcatctttgagtttatcttcgggggcctggtgtggatcctggtggcctcctccctggtgccctggcccctggtccagggctgggtgatgttcgtgtctgtgttctgcttcgtggccaccaccaccttgatcatcctgtacataattggagcccacggtggagagacttcctgggtcaccttggtgttctcctacatagccactctgctctacgtggtccatgcggtgttctctttaatcagatggaagtcttcataaagccgcagtagaacttgagctgaaaacccagatggtgttaactggccgccccactttccggcataactttttagaaaacagaaatgcccttgatggtggaaaaaagaaaacaaccacccccccactgcccaaaaaaaaaagccctgccctgttgctcgtgggtgctgtgtttactctcccgtgtgccttcgcgtccgggttgggagcttgctgtgtctaacctccaactgctgtgctgtctgctagggtcacctcctgtttgtgaaaggggaccttcttgttcgggggtgggaagtggccaccgtgacctgagaaggaaagaaagatcctctgctgacccctggagcagctctcgagaactacctgttggtattgtccacaagctctcccgagcgccccatcttgtgccatgttttaagtcttcatggatgttctgcatgtcatgcggactaaaactcacccaacagatctttccagaggtccatggtggaagacgataaccctgtgaaatactttataaaatgtcttaatgttc

SEQ ID NO: 2793 - DNA, 888 bp, Homo sapiens
gtctgcgcggagtctgagcggcgctcgtcccgtcccaaggccgacgccagcacgccgtcatggcccccgcagcggcgacggggggcagcaccctgcccagtggcttctcggtcttcaccaccttgcccgacttgctcttcatctttgagtttgacgcagcctaccactgcaccgctgccctcttttacctcagcgcctcagtcctggaggccctggccaccatcacgatgcaagacggcttcacctacaggcactaccatgaaaacattgctgccgtggtgttctcctacatagccactctgctctacgtggtccatgcggtgttctctttaatcagatggaagtcttcataaagccgcagtagaacttgagctgaaaacccagatggtgttaactggccgccccactttccggcataactttttagaaaacagaaatgcccttgatggtggaaaaaagaaaacaaccacccccccactgcccaaaaaaaaaagccctgccctgttgctcgtgggtgctgtgtttactctcccgtgtgccttcgcgtccgggttgggagcttgctgtgtctaacctccaactgctgtgctgtctgctagggtcacctcctgtttgtgaaaggggaccttcttgttcgggggtgggaagtggccaccgtgacctgagaaggaaagaaagatcctctgctgacccctggagcagctctcgagaactacctgttggtattgtccacaagctctcccgagcgccccatcttgtgccatgttttaagtcttcatggatgttctgcatgtcatgcggactaaaactcacccaacagatctttccagaggtccatggtggaagacgataaccctgtgaaatactttataaaatgtcttaatgttc

SEQ ID NO: 2794 - DNA, 762 bp, Homo sapiens
gtctgcgcggagtctgagcggcgctcgtcccgtcccaaggccgacgccagcacgccgtcatggcccccgcagcggcgacggggggcagcaccctgcccagtggcttctcggtcttcaccaccttgcccgacttgctcttcatctttgagtttgtgttctcctacatagccactctgctctacgtggtccatgcggtgttctctttaatcagatggaagtcttcataaagccgcagtagaacttgagctgaaaacccagatggtgttaactggccgccccactttccggcataactttttagaaaacagaaatgcccttgatggtggaaaaaagaaaacaaccacccccccactgcccaaaaaaaaaagccctgccctgttgctcgtgggtgctgtgtttactctcccgtgtgccttcgcgtccgggttgggagcttgctgtgtctaacctccaactgctgtgctgtctgctagggtcacctcctgtttgtgaaaggggaccttcttgttcgggggtgggaagtggccaccgtgacctgagaaggaaagaaagatcctctgctgacccctggagcagctctcgagaactacctgttggtattgtccacaagctctcccgagcgccccatcttgtgccatgttttaagtcttcatggatgttctgcatgtcatgcggactaaaactcacccaacagatctttccagaggtccatggtggaagacgataaccctgtgaaatactttataaaatgtcttaatgttc

SEQ ID NO: 2795 - DNA, 2982 bp, Homo sapiens
gccggcggtggcgcggcggagacccggctggtataacaagaggattgcctgatccagccaagatgcagagcacttctaatcatctgtggcttttatctgatattttaggccaaggagctactgcaaatgtctttcgtggaagacataagaaaactggtgatttatttgctatcaaagtatttaataacataagcttccttcgtccagtggatgttcaaatgagagaatttgaagtgttgaaaaaactcaatcacaaaaatattgtcaaattatttgctattgaagaggagacaacaacaagacataaagtacttattatggaattttgtccatgtgggagtttatacactgttttagaagaaccttctaatgcctatggactaccagaatctgaattcttaattgttttgcgagatgtggtgggtggaatgaatcatctacgagagaatggtatagtgcaccgtgatatcaagccaggaaatatcatgcgtgttataggggaagatggacagtctgtgtacaaactcacagattttggtgcagctagagaattagaagatgatgagcagtttgtttctctgtatggcacagaagaatatttgcaccctgatatgtatgagagagcagtgctaagaaaagatcatcagaagaaatatggagcaacagttgatctttggagcattggggtaacattttaccatgcagctactggatcactgccatttagaccctttgaagggcctcgtaggaataaagaagtgatgtataaaataattacaggaaagccttctggtgcaatatctggagtacagaaagcagaaaatggaccaattgactggagtggagacatgcctgtttcttgcagtctttctcggggtcttcaggttctacttacccctgttcttgcaaacatccttgaagcagatcaggaaaagtgttggggttttgaccagttttttgcagaaactagtgatatacttcaccgaatggtaattcatgttttttcgctacaacaaatgacagctcataagatttatattcatagctataatactgctactatatttcatgaactggtatataaacaaaccaaaattatttcttcaaatcaagaacttatctacgaagggcgacgcttagtcttagaacctggaaggctggcacaacatttccctaaaactactgaggaaaaccctatatttgtagtaagccgggaacctctgaataccataggattaatatatgaaaaaatttccctccctaaagtacatccacgttatgatttagacggggatgctagcatggctaaggcaataacaggggttgtgtgttatgcctgcagaattgccagtaccttactgctttatcaggaattaatgcgaaaggggatacgatggctgattgaattaattaaagatgattacaatgaaactgttcacaaaaagacagaagttgtgatcacattggatttctgtatcagaaacattgaaaaaactgtgaaagtatatgaaaagttgatgaagatcaacctggaagcggcagagttaggtgaaatttcagacatacacaccaaattgttgagactttccagttctcagggaacaatagaaaccagtcttcaggatatcgacagcagattatctccaggtggatcactggcagacgcatgggcacatcaagaaggcactcatccgaaagacagaaatgtagaaaaactacaagtcctgttaaattgcatgacagagatttactatcagttcaaaaaagacaaagcagaacgtagattagcttataatgaagaacaaatccacaaatttgataagcaaaaactgtattaccatgccacaaaagctatgacgcactttacagatgaatgtgttaaaaagtatgaggcatttttgaataagtcagaagaatggataagaaagatgcttcatcttaggaaacagttattatcgctgactaatcagtgttttgatattgaagaagaagtatcaaaatatcaagaatatactaatgagttacaagaaactctgcctcagaaaatgtttacagcttccagtggaatcaaacataccatgaccccaatttatccaagttctaacacattagtagaaatgactcttggtatgaagaaattaaaggaagagatggaaggggtggttaaagaacttgctgaaaataaccacattttagaaaggtttggctctttaaccatggatggtggccttcgcaacgttgactgtctttagctttctaatagaagtttaagaaaagtttccgtttgcacaagaaaataacgcttgggcattaaatgaatgcctttatagatagtcacttgtttctacaattcagtatttgatgtggtcgtgtaaatatgtacaatattgtaaatacataaaaaatatacaaatttttggctgctgtgaagatgtaattttatcttttaacatttataattatatgaggaaatttgacctcagtgatcacgagaagaaagccatgaccgaccaatatgttgacatactgatcctctactctgagtggggctaaataagttattttctctgaccgcctactggaaatatttttaagtggaaccaaaataggcatccttacaaatcaggaagactgacttgacacgtttgtaaatggtagaacggtggctactgtgagtggggagcagaaccgcaccactgttatactgggataacaatttttttgagaaggataaagtggcattattttattttacaaggtgcccagatcccagttatccttgtatccatgtaatttcagatgaattattaagcaaacattttaaagtgaattcattattaaaaactattcatttttttcctttggccataaatgtgtaattgtcattaaaattctaaggtcatttcaactgttttaagctgtatatttctttaattctgcttactatttcatggaaaaaaataaatttctcaattttaatgt

SEQ ID NO: 2796 - DNA, 1550 bp, Homo sapiens
tggagctaagctgtttccagggtgacagagtggcgacctcggtggtcgattgagcaggtctgagaattgttcccaaagggttgtgcgtcaccgagtcgttggcgctgtcatggcgggtgtgctgaagaagaccactggccttgtgggattggctgtgtgcaatactcctcacgagaggctaagaatattgtacacaaagattcttgatgttcttgaggaaatccctaaaaatgcagcatatagaaagtatacagaacagattacaaatgagaagctggctatggttaaagcggaaccagatgttaaaaaattagaagaccaacttcaaggcggtcaattagaagaggtgattcttcaggctgaacatgaactaaatctggcaagaaaaatgagggaatggaaactatgggagccattagtggaagagcctcctgccgatcagtggaaatggccaatataattattaagtgactttggtgtgttcatgggaaactgatgtaattaaatattctgttatattaagagcgtgttcttattactgacattttgtaatcaagaaaagtgatatagaaaatatgtaggagactgttaaaattggtgattatggtaatatggtcatgtgaatcaatttttgatttataaagtactcacacaagttgtttcaaagatgatatttctgtgaacagagaggccatgggaagatttgaaaattattaaagaaaaattcctacagattttcaatgcagagaccataatcaaaaagtaaactttctttagtagtatgttcaatacatcatttaattttttaagttatcctgaagaaggaaaggtccttaattattatagtctaaacaaatttatagattactgtttgaagtaaataatacgagtgaatattttcaaatgtgataaaatagcacaagtggctggtgataaaatttgaaattatggttaacctcagctgtgatcttatgtatgtaaagtgaaatttaaatagataattataggttgattacaaaatccatagtgtcattttattttagtcattattgaattataccatttactctgttttcttatagtcttaattttattatattttgttgttactgtattatatttgaaaaccttcaaattagaatacattgtacagttaaagaaattgacttggtacttaaaagaaagatttcccattgcatacaggttattggagaaattttccttttgttgcatttgtggaagttagttttctggcccgtggcctttaattttcttaatcaacctaattacatcaggatagaggtagagtttctgtaaaagaagagacattaagagttcctgaaatttatatctggcataccgataggcttatattcaaaacatcttagtcatacgaccataaattaaaagtggagtcactaaatagtttgcagtacgtttctaatataagtgtaggtgggtatcaaaacaagacaaatgctgttcagggaaagaagttggcaagcttaaggttaaacaaaaataaaattacatgtgttttcgccttccta

SEQ ID NO: 2797 - DNA, 1614 bp, Homo sapiens
gagggagccgtggaggtccaggtgactgcttagaaaactgcacagcatctgatgaaattagcgaataagaacatcaaccatgtcttacactccaggagttggtggtgaccccacccagttggcccagaggatctcttctaacatccagaagatcacacagtgttctgtggaaatacaaagaactctgaatcaacttggaacacctcaagattcacctgaattgaggcaacagttgcaacagaagcagcagtatactaaccagcttgccaaagaaacagataagtacattaaagagtttggatctctgcccaccacccccagtgaacagcgtcaaaggaaaatacagaaggatcgcttagtggcagagttcacaacatcactgacaaacttccagaaggtccagaggcaggctgctgagcgagagaaagagtttgttgctcgagtaagagccagttccagagtgtctggcagttttcctgaggacagctcaaaagaaaggaatcttgtatcctgggaaagccaaactcaacctcaagtgcaggtgcaggatgaagaaattacagaggatgacctccgtcttattcatgagagagaatcttctatcaggcaacttgaagctgatattatggatattaatgaaatatttaaagatttgggaatgatgattcatgaacaaggagatgtaatagatagcatagaagccaatgtggaaaatgcagaggtgcacgttcagcaagcaaatcagcagctgtcaagggcagcagattatcagcgcaaatccagaaaaaccctgtgcatcatcattcttatccttgtcattggagttgcgattatcagtctcatcatatggggattgaaccactgaagttataaaggagcacactgtcgcactacattgtctaaattatgtaggaagattcctgtaatcatgtttttttaattattattttaaagctattgtataaaggatggttcccatactttgttatttttattgggggggttgggcgggttcctttggattaaatctgatattttctaatactgaaagattttctaaatgtcactgctgacataactcccttggtcttcaatttaatagttgttaagttttgggccacattgcatatgcctttcatttataatttatttaccctgcttgacttagtttggggaattcggaaatttaaggtgtgtgtattctgttgggatctccctgccacgtgaacacaccaagatgtgtgttacttcaagttaaaactccccaaaatttaatttttgatttgcttccaccaggggaaaatattctccaataatgtaaaataattaaggtccaatacatgggttgtatttttctggttcacaacagcacaaagtgtctttcatttttttgttggatttcctttaagatcttttttaccctgaagtcggtgaacacttttctagttaatttgatactctttctgtgtatataataagcttttgctgtagattgcctagtaaaattactaaggataggttgtttttacatatggtctatttaagtctgatgtttacgggggagagtgtagttactaaaaatgtttaacataatttggaagaagagtatgaaca

SEQ ID NO: 2798 - DNA, 1791 bp, Homo sapiens
atacgccggggcggggccgagagtttggagccccggagtggggtgtcggcgcctcattcgggtggagctgagccggagacaggcagttgtgaaaaacttcaggacaaaaatgtttcatttaaggacttgtgctgctaagttgaggccattgacggcttcccagactgttaagacattttcacaaaacagaccagcagcagctaggacatttcaacagattcggtgctattctgcacctgttgctgctgagccctttctcagtgggactagttcgaactatgtggaggagatgtactgtgcttggctggaaaaccccaaaagtgtacataagtcatgggacattttttttcgcaacacgaatgccggagccccaccgggcactgcctaccagagtccccttcccctgagccgaggctccctggctgctgtggcccatgcacagtccctggtagaagcacagcccaacgtggacaagctcgtggaggaccacctggcagtgcagtcgctcatcagggcatatcagatacgagggcaccatgtagcacagctggaccccctggggattttggatgctgatctggactcctccgtgcccgctgacattatctcatccacagacaaacttgggttctatggcctggatgagtctgacctcgacaaggtcttccacttgcccaccaccactttcatcgggggacaggaatcagcacttcctctgcgggagatcatccgtcggctggagatggcctactgccagcatattggggtggagttcatgttcatcaatgacctggagcagtgccagtggatccggcagaagtttgagacccctgggatcatgcagttcacaaatgaggagaaacggaccctgctggccaggcttgtgcggtccaccaggtttgaggagttcctacagcggaagtggtcctctgagaagcgctttggtctagaaggctgcgaggtactgatccctgccctcaagaccatcattgacaagtctagtgagaatggcgtggactacgtgatcatgggcatgccacacagagggcggctgaacgtgcttgcaaatgtcatcaggaaggagctggaacagatcttctgtcaattcgattcaaagctggaggcagctgatgagggctccggagatgtgaagtaccacctgggcatgtatcaccgcaggatcaatcgtgtcaccgacaggaacattaccttgtccttggtggccaacccttcccaccttgaggccgctgaccccgtggtgatgggcaagaccaaagccgaacagttttactgtggcgacactgaagggaaaaaggtaaggcccagagagaggcgtgcaaggcagatcgtcaaggccccatgttccagcatggagttccgctcaccaacataacccagagccctgggtgcatctagactttaaaaaaatatttaaagtcggccgggcgcagtgtctcacgcctgtaatcccagcactttgggaggccgaggtgggcagatcacctgagttcgggagttggagaccagcctgaccaacatggagaaactccatctctactaaaaatacaaaattagctgggcgtggtggcgcgcgcctgtaatcccagctactcaggaggctgaggcaggagaatcgcttgaacccgggaggtggaggttgcagtgagccgagattacgccattgcactccagcctgggccaacaagagcgaaactctgtctcaaagaaaaaaataaataaataaaaaatatatgtatatgtaaaaaaaaaaaaaaaaaaaaaaaaaaaaaa

SEQ ID NO: 2799 - DNA, 4257 bp, Homo sapiens
atacgccggggcggggccgagagtttggagccccggagtggggtgtcggcgcctcattcgggtggagctgagccggagacaggcagttgtgaaaaacttcaggacaaaaatgtttcatttaaggacttgtgctgctaagttgaggccattgacggcttcccagactgttaagacattttcacaaaacagaccagcagcagctaggacatttcaacagattcggtgctattctgcacctgttgctgctgagccctttctcagtgggactagttcgaactatgtggaggagatgtactgtgcttggctggaaaaccccaaaagtgtacataagtcatgggacattttttttcgcaacacgaatgccggagccccaccgggcactgcctaccagagtccccttcccctgagccgaggctccctggctgctgtggcccatgcacagtccctggtagaagcacagcccaacgtggacaagctcgtggaggaccacctggcagtgcagtcgctcatcagggcatatcagatacgagggcaccatgtagcacagctggaccccctggggattttggatgctgatctggactcctccgtgcccgctgacattatctcatccacagacaaacttgggttctatggcctggatgagtctgacctcgacaaggtcttccacttgcccaccaccactttcatcgggggacaggaatcagcacttcctctgcgggagatcatccgtcggctggagatggcctactgccagcatattggggtggagttcatgttcatcaatgacctggagcagtgccagtggatccggcagaagtttgagacccctgggatcatgcagttcacaaatgaggagaaacggaccctgctggccaggcttgtgcggtccaccaggtttgaggagttcctacagcggaagtggtcctctgagaagcgctttggtctagaaggctgcgaggtactgatccctgccctcaagaccatcattgacaagtctagtgagaatggcgtggactacgtgatcatgggcatgccacacagagggcggctgaacgtgcttgcaaatgtcatcaggaaggagctggaacagatcttctgtcaattcgattcaaagctggaggcagctgatgagggctccggagatgtgaagtaccacctgggcatgtatcaccgcaggatcaatcgtgtcaccgacaggaacattaccttgtccttggtggccaacccttcccaccttgaggccgctgaccccgtggtgatgggcaagaccaaagccgaacagttttactgtggcgacactgaagggaaaaaggtcatgtccatcctgttgcatggggatgctgcatttgctggccagggcattgtgtacgagaccttccacctcagcgacctgccatcctacacaactcatggcaccgtgcacgtggtcgtcaacaaccagatcggcttcaccaccgaccctcggatggcccgctcctccccctaccccactgacgtggcccgagtggtgaatgcccccattttccacgtgaactcagatgaccccgaggctgtcatgtacgtgtgcaaagtggcggccgagtggaggagcaccttccacaaggacgtggttgtcgatttggtgtgttaccggcgcaacggccacaacgagatggatgagcccatgttcacgcagccgctcatgtacaagcagatccgcaagcagaagcctgtgttacagaagtacgctgagctgctggtgtcgcagggtgtggtcaaccagcctgagtatgaggaggaaatttccaagtatgataagatctgtgaggaagcttttgccagatctaaagatgagaagatcttgcacattaagcactggctggactctccctggcctggcttcttcaccctggacgggcagcccaggagcatgtcctgcccctccacgggtctgacggaggatattctgacacacatcgggaatgtggctagttctgtgcctgtggaaaactttactattcatggagggctgagccggatcttgaagactcgtggggaaatggtgaagaaccggactgtggactgggctctagcggagtacatggcgtttggctcgctcctgaaggagggcatccacattcggctgagcggccaggacgtggagcggggcacattcagccaccgccaccatgtgctccatgaccagaatgtggacaagagaacctgcatccccatgaaccatctctggcccaatcaggccccctatactgtgtgcaacagctcactgtctgagtacggcgtgctgggctttgagctgggcttcgccatggccagtcctaatgccctggtcctctgggaagcccaatttggtgacttccacaacacggcccagtgtatcatcgaccagttcatctgcccgggacaagccaagtgggtgcggcagaatggcatcgtgttgctgctgccccatggcatggagggcatgggtccagaacattcctccgcccgcccagagcggttcttgcagatgtgcaacgatgacccagatgtcctgccagaccttaaagaagccaacttcgacatcaatcagctatatgactgcaattgggttgttgtcaactgctccactcctggcaacttcttccacgtgctacgacgccagatcctgctgccattccggaagccgttaattatcttcacccccaaatccctgttgcgccaccccgaggccagatccagctttgatgagatgcttccaggaacccacttccagcgggtgatcccagaagatggccctgcagctcagaacccagaaaatgtcaaaaggcttctcttctgcaccggcaaagtgtattatgacctcacccgggagcgcaaagcacgcgacatggtggggcaggtggccatcacaaggattgagcagctgtcgccattcccctttgacctcctgctgaaggaggtgcagaagtaccccaatgctgagctggcctggtgccaggaggagcacaagaaccaaggctactatgactacgtgaagccaagacttcggaccaccatcagccgcgccaagcccgtctggtatgccggccgggacccagcggctgctccagccaccggcaacaagaagacccacctgacggagctgcagcgcctcctggacacggccttcgacctggacgtcttcaagaacttctcgtagatgctgcctagggttgcttgggccactgccctctccacacccatgactgccccttgcttctcaactaaagaatagtgcctcagcgctgcccacaccaccgccctcctcgctgtgccaccacccctccctctgctctcataggagttaggctgtcgtccccctccagtgcttggctgccccacaggccacacgctgcccaggctctgctgacttctgagcagttttccaggaggccggggggagcaggaggaggaaaggtagcccccgagggatgtccttggggaggggtcagctctggccacaatcctccccaccagtctcacccactaggataggaactgggccttgtgtgctggcttccgctgtcacccagcaaggcacaggctcctgtatttgagactaggatagcttcatcttgagcctgagccttagaatctgtagaggagcctggagtcggatctagccatggctggcagaggtttctagggtgggccccagccgtggcgtgaactgaggatgacccggggcagctggcaggagagagccttggcctgacctggcacagaaagggcagcttcagtctctgcagtgtccattatctgctgttccttcgagggttccaggctgtgtgtggggcccaagcatgccccacccacccctcctgggcccaggcagcacctggagcccacagagtctgtgtgtagccaggaagccccgctcaggtagccaccaccggggcactggctgctctgtcttggtcctgttaaccctccacctcctctcttggactccctccccaccccaaccactctttctttctcctttaacccaatggagactttctgatgcatcgttttctttgctgtgccaaagcaggtcagaagagggagaggaggggctgggggtgaggggccaggccatggccaaggggccagctgcccctcatttatcactctgaccttcacagggacagatctgatttatttattttggttaaaaaaaaaaaaaaggaacagaaacaactttgcattgcattggcttgacccataaactaagttatatccgtgggcaaaaaa

SEQ ID NO: 2800 - DNA, 917 bp, Homo sapiens
ggagggaccagcccgggctgcaccagtgggagtggctccacccttcccacctcagagccatggggagccagggctctggcggggtgcccttggtgcaggctccctacacagtcctgctgctgccgctggggacaagccgccaagacccaggggcccagagcttcttcctttggctacgcaggatgcaggctctggagagagaacaggatgccctgtggcagggtctggagctgctacagcatggccaggcctggtttgaagaccatctgagggaggcacagcgacagcagctgcatctaggggcccttggtgagaattttctaacagatttacactcagagcctggtcgccccccgttagcccagattcaaaaggtgaacatctgtttgcagaatctgattcatgagaagttctccccaagtccactgaacaaggctagttcctgcaccacccaggattcaaaggaaagacgaagggagcagaacttgtggcagcaacaggagttgtcaaggcagcagaaaggagtcacccagccaaaggaggagatggctcagcggggctgcaccaaggggccaagaggccctacccgtgtctaaaccctcctctcactcccctaagcctggtgaaagagtcagaagccccaggctcctttttctgtttcttaactcaacagctaaaaaatggctccaggtagtgagtcaatgaagttcagacatgttggtgtaaagtttctcctctgctcctgaaaacttcatcttcttggtgtctcatgtcctcattctcccctatatgacatgcaaaaacgatctttctttgaaatccctctgggaagaagcatgtttattgaaactgtccttcagccttaaatacaaaaataaaactgaaactgctccagaaagcagctttctccaaaaaaa

SEQ ID NO: 2801 - DNA, 2378 bp, Homo sapiens
gtgcaggcgagcttcttggcctaagggcaggaagagatggcagcgggggagacgcagctctacgccaaggtctccaacaagctcaagagccgcagcagcccctcgctcctggagcccctcctggccatgggcttcccggtgcacaccgcgctgaaagcgttggcagccacggggaggaagacggcggaggaggccttggcctggctgcatgatcattgcaatgacccttccctagacgaccccatcccccaggagtatgcccttttcctctgtccaacggggcccctgctggaaaaacttcaagagttctggagagagagcaagcgccagtgtgcaaagaacagagctcatgaggtcttcccacacgtgacactctgtgacttcttcacgtgtgaagaccagaaggtggaatgcctgtacgaggcgctgaagagagctggagacaggctcctgggctccttccccacggccgtgcctctggctctccactcctccatcagctacctcggcttcttcgtcagtggcagccccgcagacgtcatccgggaattcgccatgaccttcgccacggaagcatctctcttagcagactgctccgtgaagccttgcaccaaacagctgcatctgaccttggcccacaagttctacccccaccaccagaggacgctggagcagctggccagagccatccccctgggccacagctgccagtggaccgcagcactctactcccgagacatgcgctttgtgcactaccagaccctgagagccctattccagtacaaaccccagaacgtggatgagctgacgctaagtcctggtgactacatctttgtggaccccacgcagcaggacgaagccagcgagggctgggtgattgggatctcacagcggacgggctgccggggcttcctgccggaaaactacacggatcgagccagtgagtctgacacgtgggtgaagcacaggatgtacaccttcagtctagccacagacctgaactccagaaaggatggtgaagccagcagcagatgcagcggggaatttcttccacaaacggcaaggagtcttagcagcttacaggccttgcaggctaccgttgcaaggaagagcgtgctggtggttcgccacggggagagagtggatcagatcttcgggaaggcatggctgcagcaatgctccactcctgatgggaaatactacaggccagacctgaatttcccctgcagtctgccaagacggagtcgtgggatcaaagactttgaaaacgatcccccattatcatcgtgtggcattttccagtccagaattgcaggggacgcgctactggacagtggtatcagaatcagctctgtgtttgcctccccagccctccgctgtgtgcagacggccaaactcatcctggaagaactcaaactggagaaaaaaatcaagatacgagtggaacctggaatctttgaatggacaaaatgggaagctggcaaaaccaccccaaccctcatgagcctggaagagctgaaagaggcaaatttcaacattgacactgattacaggcccgcgtttcccctgtccgccctcatgccggccgagagctaccaggagtacatggacaggtgcacggcgagcatggtgcaaatcgtcaacacctgtccacaggacacgggtgtcatcctaattgtgagtcacggctccactctggactcctgcacgcggccactgctcgggctgccgccccgggaatgtggggattttgcccaactcgtgagaaagatcccttccctgggcatgtgcttctgtgaagaaaataaagaggaaggaaaatgggagttggtgaacccaccggtgaagaccctgacccacggggcgaacgcagcatttaactggaggaactggatctcaggcaactgagagccacggtgatgttgtcataacctcagagtggagaggcagaaaccatgtgcagaggctgggagatgctgctgtttccagaggcgtcttagtctcacccaatgtgatttgtagaagcacgagacgcacttttatatcccggaatatttccctccggctttcgcctttgtaactcccatctgtggacccatcgtccaccagcccagctgcggggagcacagggcaggtggctgggtgaggatgccgccctgcagcatgtacaccgagtgtctgcagctggggacacaactgcccgggactctaacttccaggaattaaagactcaccacacacgaaggatctaaccacttcattttccatggtctaatcattaaattcccaatcgttttttctttttctgggtccatcactctttagccatatccacatgggctaaaacaggtgtaatagtcaataaaatggtcccagaa

SEQ ID NO: 2802 - DNA, 2492 bp, Homo sapiens
gtgcaggcgagcttcttggcctaagggcaggaagagatggcagcgggggagacgcagctctacgccaaggtctccaacaagctcaagagccgcagcagcccctcgctcctggagcccctcctggccatgggcttcccggtgcacaccgcgctgaaagcgttggcagccacggggaggaagacggcggaggaggccttggcctggctgcatgatcattgcaatgacccttccctagacgaccccatcccccaggagtatgcccttttcctctgtccaacggggcccctgctggaaaaacttcaagagttctggagagagagcaagcgccagtgtgcaaagaacagagctcatgaggtcttcccacacgtgacactctgtgacttcttcacgtgtgaagaccagaaggtggaatgcctgtacgaggcgctgaagagagctggagacaggctcctgggctccttccccacggccgtgcctctggctctccactcctccatcagctacctcggcttcttcgtcagtggcagccccgcagacgtcatccgggaattcgccatgaccttcgccacggaagcatctctcttagcaggcacttccgtttcccgcttctggattttcagccaggtgcctggacatggccctaacctgaggctgagcaatttaactagagcctccttcgtgagccactacatccttcaaaaatactgctccgtgaagccttgcaccaaacagctgcatctgaccttggcccacaagttctacccccaccaccagaggacgctggagcagctggccagagccatccccctgggccacagctgccagtggaccgcagcactctactcccgagacatgcgctttgtgcactaccagaccctgagagccctattccagtacaaaccccagaacgtggatgagctgacgctaagtcctggtgactacatctttgtggaccccacgcagcaggacgaagccagcgagggctgggtgattgggatctcacagcggacgggctgccggggcttcctgccggaaaactacacggatcgagccagtgagtctgacacgtgggtgaagcacaggatgtacaccttcagtctagccacagacctgaactccagaaaggatggtgaagccagcagcagatgcagcggggaatttcttccacaaacggcaaggagtcttagcagcttacaggccttgcaggctaccgttgcaaggaagagcgtgctggtggttcgccacggggagagagtggatcagatcttcgggaaggcatggctgcagcaatgctccactcctgatgggaaatactacaggccagacctgaatttcccctgcagtctgccaagacggagtcgtgggatcaaagactttgaaaacgatcccccattatcatcgtgtggcattttccagtccagaattgcaggggacgcgctactggacagtggtatcagaatcagctctgtgtttgcctccccagccctccgctgtgtgcagacggccaaactcatcctggaagaactcaaactggagaaaaaaatcaagatacgagtggaacctggaatctttgaatggacaaaatgggaagctggcaaaaccaccccaaccctcatgagcctggaagagctgaaagaggcaaatttcaacattgacactgattacaggcccgcgtttcccctgtccgccctcatgccggccgagagctaccaggagtacatggacaggtgcacggcgagcatggtgcaaatcgtcaacacctgtccacaggacacgggtgtcatcctaattgtgagtcacggctccactctggactcctgcacgcggccactgctcgggctgccgccccgggaatgtggggattttgcccaactcgtgagaaagatcccttccctgggcatgtgcttctgtgaagaaaataaagaggaaggaaaatgggagttggtgaacccaccggtgaagaccctgacccacggggcgaacgcagcatttaactggaggaactggatctcaggcaactgagagccacggtgatgttgtcataacctcagagtggagaggcagaaaccatgtgcagaggctgggagatgctgctgtttccagaggcgtcttagtctcacccaatgtgatttgtagaagcacgagacgcacttttatatcccggaatatttccctccggctttcgcctttgtaactcccatctgtggacccatcgtccaccagcccagctgcggggagcacagggcaggtggctgggtgaggatgccgccctgcagcatgtacaccgagtgtctgcagctggggacacaactgcccgggactctaacttccaggaattaaagactcaccacacacgaaggatctaaccacttcattttccatggtctaatcattaaattcccaatcgttttttctttttctgggtccatcactctttagccatatccacatgggctaaaacaggtgtaatagtcaataaaatggtcccagaa

SEQ ID NO: 2803 - DNA, 5705 bp, Homo sapiens
ttgcgcgctgcagggcaacaccccggcgtccctggaagctgggggagcgggagaaataactttatttggactgagagctggagaatgagaataggacctgagagtatattgggctaaggaggagaggtgtttgagcccagatgagtcatggctggacgacccctccgcataggagatcagctggttctggaagaagattatgatgagacctacattcctagtgagcaagaaattcttgaatttgcccgggagattggtattgatcccatcaaggaaccagaactgatgtggctggcgcgagagggcatcgtggccccactgcctggagagtggaaaccatgccaggacatcacaggtgacatttactatttcaacttcgccaacgggcagtctatgtgggaccatccatgtgacgaacactatcggagcttggtgatccaagagcgggcaaagctgtcaacttctggggccattaagaagaagaaaaaaaaaaaggaaaagaaagacaagaaggacagagacccccccaaaagttcgctggccttgggttcctcattagccccagttcatgttcctcttgggggcctggctcctttacgaggtcttgtggataccccaccctctgctcttcgtggatctcaaagcgtgagcctggggagctcagtggagtctggacgtcagcttggagaactcatgctgccttcacagggtctcaagacctctgcttatacaaagggtctcttgggctccatatatgaggacaagactgctctcagcctcttgggtttaggagaagaaaccaatgaggaggatgaggaggaaagtgacaaccagagtgtccacagctcaagtgagcctcttaggaacctacacctggacattggggcactggggggtgactttgagtatgaggagtctctgagaacaagccagccagaggagaagaaggatgtttctctggattcagatgctgccggtccccctactccctgcaagccctccagcccaggtgcagacagcagtctgagcagtgctgttggcaaagggcgacagggaagtggagcaagacctggtcttccagaaaaagaggaaaatgagaagagtgaacctaagatttgcaggaatctggtgacccccaaggcagaccctacaggcagtgagcctgccaaagcctctgaaaaggaagcaccagaggacacagtagatgcaggagaggagggttccaggagggaagaggcagccaaggagccaaagaagaaggcttctgctctggaagagggcagttcagacgccagccaagaactggaaattagtgaacacatgaaggaaccacagctctcagactccatagcttctgaccccaagtccttccatggcctggacttcggttttcgcagccggatctcggagcacctgctggatgttgatgtgctttccccagtcctgggtggagcttgtcggcaggcccagcaaccactgggaatagaagacaaggatgacagccagtccagccaagatgagctgcagagcaagcagtccaaaggcctggaggagaggttatctcctccacttccacacgaggagcgggcccagagtccccctcgcagcctggccactgaagaagagcccccccagggccccgaggggcagcccgagtggaaggaggcagaggagcttggggaggactctgcagccagcctcagcctgcagctgtccctccagagggagcaggccccaagcccacctgctgcctgtgagaagggcaaggagcagcattcccaggccgaggagctgggccctgggcaggaagaggcagaggatcctgaggagaaggtggcggtcagccccaccccgccagtctctccagaggtgcgatccacagagcctgtggctcccccagagcagctctcagaggctgcactaaaggccatggaagaggcagtggcccaagtactcgagcaagaccagaggcacctgctggaatccaagcaagagaagatgcagcaactgcgggagaagctgtgccaagaggaggaagaggagatcctccggcttcaccagcagaaagagcaatctctcagttccttgagggagcggctgcagaaagccattgaggaggaggaggcccggatgagagaggaggaaagccagaggctatcctggctccgagctcaggtccagtccagcacacaagcagatgaggaccaaatcagggctgagcaagaggcttccctgcagaaactgagagaagagttggagtctcaacagaaggctgagagggccagcttggaacagaaaaataggcaaatgctggagcagctcaaggaagagatagaggcttcggagaagagcgagcaggctgccctgaatgctgcaaaggagaaggctctgcagcagctgagggagcagctggaaggggagaggaaagaagctgtggcaacgctggagaaggagcacagtgctgagctggagcggctctgctcctcattggaggccaagcaccgggaggtggtctccagcctccagaagaagatacaggaagctcagcagaaagaggaggcccagctgcagaagtgccttgggcaagtggagcacagagttcaccagaagtcttatcacgtggctgggtatgagcacgagctcagcagtctcctgcgagagaagcgccaggaagtggaaggggagcatgagaggaggttggacaagatgaaggaggagcaccagcaagtgatggctaaggccagagagcagtatgaagctgaggagaggaagcagcgggctgagcttctggggcacctgaccggagagctggagcgcctgcagagggcccatgaacgagaactggagactgtgaggcaggagcaacacaagcgtcttgaggacttgcggcgccggcacagggagcaggaaaggaagctccaggatttagagttggaccttgaaaccagagctaaagatgtcaaggccagattggctctgctggaggtccaggaggagaccgcccggagggagaagcagcagctgcttgatgtgcagaggcaggttgctctgaagagtgaggaagccacagccacccatcagcagctggaggaggcacagaaggagcacacccacctgttgcagtcaaaccagcagctccgagaaattcttgatgagctgcaggcccgcaagctgaagctggagtcccaagtggatctgctgcaggctcagagccagcaactgcagaaacacttcagcagcctggaggctgaagctcaaaagaagcagcacctgttgagagaagtgacagttgaggaaaataatgcttccccacattttgagccagatctccatattgaggacctgaggaaatcccttggaacaaaccagaccaaagaggtgtcttcttctctctcccagagcaaggaggacttatacttggacagcctgtcctcccacaatgtctggcacctcctctctgctgagggggtagccctccgtagtgccaaggagttccttgtgcggcagacacgctccatgcggaggcggcagacagctctgaaagctgcccagcagcattggcgccatgagctggccagtgcgcaggaggtggccaaagacccaccaggcatcaaggccctggaagatatgcgcaagaacctggagaaggagaccaggcacctggatgagatgaagtcggccatgcggaaaggccacaacctgctgaagaagaaagaggagaagctgaatcagttggagtcctctctttgggaagaggcctcagatgagggcactctgggaggatcccccaccaagaaggcagtaaccttcgacctcagtgacatggacagcctgagcagtgaaagttctgaatctttttccccgcctcaccgtgagtggtggcggcagcagaggatcgactcaaccccgagtctcacctcccgcaagatccacgggcttagccactccctccggcagatcagcagccagctgagcagtgtcctcagcatcctggacagcctcaaccctcagtcgccgccgccgctcctcgcctccatgccagcccagctccctccccgggaccctaagagcacccccacccccacctactatggctccctggccaggttctcagccttatcatctgctacacccacgtccacccaatgggcctgggattcagggcaggggcccaggctcccctcctctgtggctcaaacggtggacgacttcctgttggagaagtggcgcaagtattttccatctggcatcccgctgctcagcaatagccccaccccgctggagagcaggctgggttacatgtctgccagtgagcagctccggctcctacagcactcccattcgcaagtccctgaggcgggcagcaccacctttcagggcataattgaggccaaccggaggtggctggaacgtgtcaagaatgaccccaggttacctctcttctcttcaacacccaagccaaaagctactttgagcctcctgcagctgggccttgatgagcacaacagagtgaaggtgtatcgcttctgaggccctgagcaggggcttggggcagcccagcctctcctccacccagaccaagtgcctgaggagctgcctgccttcttccatctgagaaagcaccctccttccccctttgacttgcaggagccaccagggaccagggggttgagtggaacagtaaagccacacattctgtgactatataacctatctcaggctaaaatgtgtggacttgtacgagctcttgtcattgacatggcaagctgatggcgtgcggtggctgcggggtatcagggccgggagccctttgggaggaagggaggcgttagaggagctgccttcggaggctcagggagtccctttggagctggttgtttccttggccctgcagcgcactgctcggggctcccaaggaggttgtgtgtatggttcttaattcatcaggacaaagacccccagcatgtgtgtaccctgggacccgatttctctgggcccacatctatctccaatacctcagcctcagatcagacccttttttttttgtctttcttctcttaatttttaaatgcctcttttcttgagcattccatctctctttttgaccctctcaggactgggcttagctgtccagagccctgccggagggtgctgggggctgtccctctgcaggcactgtgttttcctcaggggctgtcctcagaacacccctcctgctccctggggctcctcagggagccatttcagctggagtctcaggtctcaaaaacaacttctccaggaggccaaaaaaagactgggttggcttctggtcctcatgacggcttttatcctcctgggacactttgggtatattcatgggcattgtttccatctgtcttttctacctgtgccacccctgccctgattccacggctgcctcaggcaggcaggcaaggagctaggccggtgcccggccctggcagcaaggggtctttgtgcagttggagatgctgccgttgtggcagagcgtcctgcagccccgcttccatcagcaggctctggggtgggggctttgcaggggatgctctctgatgtttgttccgttgtttaaataaaatgcacttatttttgtttttttttttgcaagcaaaaaaaaaaaaaaaaaaaaaaaaaaaaaaaaaaaaaaaaaaaaaaaaaaaaaaaagaaaaaaaaaaaaaaaaaa

SEQ ID NO: 2804 - DNA, 1144 bp, Homo sapiens
agaagcagtcagcccagggctctcggatgcagggagcctgggcccaaacagcagcttccggagtcggaaggagctgaggaagaagacagactgaaggagcttgcgacttttccgcctcggcaaccggacccagcagcaagcaggacgggcggcgctctgctactggtcccgttaagccagagtagcccaagccctgaagtcactgctcatccggaatggaaatcccgccgaccaactacccagcctccagggcggccttggtggcacagaactacatcaactaccagcaggggaccccgcacagggtgtttgaggtgcagaaggtcaaacaagccagcatggaggatattccaggaagaggacataagtatcgccttaaatttgctgttgaagaaattatacaaaaacaagttaaggtgaactgcacagctgaagtactttacccttcaacgggacaagaaactgcaccagaagtcaacttcacatttgaaggagaaactggaaagaatccagatgaagaagacaacacattttatcaaagacttaagtccatgaaggaaccgctagaagcacaaaatattccagacaattttggaaatgtatctccagaaatgacgctcgttctacatttagcctgggttgcctgtggttatataatatggcaaaattctactgaagacacatggtataaaatggtaaaaattcaaactgtcaagcaagtgcaaagaaatgatgactttattgaattagactacaccattctacttcataatatagcatctcaggagattattccctggcaaatgcaagttctctggcatccacaatacggcactaaagtaaaacataatagccgtctgccaaaggaagtacaactggaataaacaaaaaccctaacactggaagtgtaaacatgtctattgatgtgtatgccaatttcactggcatctagcttatgaggccaaataatcccaaagtgtcactttatataaatgtcttgattacagtatagaactttatagagtccataatacaaagtatcactacataaaaatgtctttaaaacagtaatagtggtatgtatatccaaaataaaaagcttcaatttcagccaaaaaaaaaaaaaaaaaaaaaaaaaaaaaaa

SEQ ID NO: 2805 - DNA, 713 bp, Homo sapiens
atggaagactaccaggctgcggaggagactgcttttgttgttgatgaagtgagcaacattgtaaaagaggctatagaaagcgcaattggtggtaacgcttatcaacacagcaaagtgaaccagtggaccacaaatgtagtagaacaaactttaagccaactcaccaagctgggaaaaccatttaaatacatcgtgacctgtgtaattatgcagaagaatggagctggattacacacagcaagttcctgcttctgggacagctctactgacgggagctgcactgtgcgatgggagaataagaccatgtactgcatcgtcagtgccttcggactgtctatttgacctgcagtccagcctatggcctttctccttttgtctctagttcatcctctaaccaccagccatgaattcagtgaactcttttctcattctctttgttttgtggcactttcacaatgtagaggaaaaaaccaaatgaccgcactgtgatgtgaatggcaccgaagtcagatgagtatccctgtaggtcacctgcagcctgcgttgccacttgtcttaactctgaatatttcatttcaaaggtgctaaaatctgaaatctgctagtgtgaaacttgctctactctctgaaatgattcaaatacactaattttccatactttatacttttgttagaataaattattcaaatctaaaaaaaaaaaaaaaaaaact

SEQ ID NO: 2806 - DNA, 3656 bp, Homo sapiens
ccacgtcatcgagcagctccccctccccttgctacaagtcgcacgcgcggaagtaaacacctctacgtcatcagggcgcgtcctcgtctttcccctcccatctcctcagatcggtggacgtgctcgcctccactcggggccaggtctatgtcccggtttcccgcagtcgcgggcagggcgccaaggcggcaggaggagggtgagcggtcaagagacctccaggaagagcggctctcggctgtttgcatcgccgatagagaagagaaaggatgcacgtcccaggagggaggaactactccaacttttcctattcagaaacaaagaaaaaagattattcaagctgtgagggacaattcattccttattgttactggaaatacaggaagtggtaaaacaactcaactcccaaaatatctatatgaagcagggttttcacaacatggtatgattggtgtaactcaaccacgaaaagtagctgctatatcagttgctcagagagtagctgaagaaatgaaatgcactttgggatccaaagtaggataccaagttcgttttgatgattgcagttctaaggagacagcaatcaaatatatgactgatggatgtttactgaaacatattctgggagacccaaatcttaccaaattcagtgtcattattttggatgaagcccatgaaagaactctaactacagatatcttatttggtttattgaagaagctatttcaggagaagtctcctaataggaaggagcatttaaaagtggtggtaatgtcagcaactatggaattagccaagctctctgcattctttggaaattgtccaatatttgatatacctggaaggctttatccagtcagagagaaattctgcaatttgattggtccacgagacagagaaaatactgcgtatattcaagcgattgtggaagtcaccatggatatccatttgaatgaaatggctggagacatcttggtttttctgactggccagtttgaaatagaaaaaagttgtgagttactttttcagatggcagagtctgttgattatgattatgatgttcaagataccaccctcgatggcttgttaatattgccgtgttatggatcaatgacaacagatcaacagaggaggatatttttgccaccaccacctggaattagaaaatgtgtcatatccaccaatatttctgcaacgtctttgacaatagatggaatcagatatgtggtagatggtggcttcgtgaagcagttaaatcacaaccccagattagggttggacatcctggaggtggttccaatttcaaagagcgaggcattacagcgaagtggccgagctggcaggacttcttcaggaaaatgctttcggatctatagtaaagatttttggaaccagtgtatgcctgaccatgtgatccctgaaattaagagaactagtttgacatctgtagttctgaccttaaagtgccttgccatacacgatgtcataaggtttccctatttggatccacctaatgagagacttattttagaagctcttaaacaactttaccagtgtgatgctattgacaggagtggccatgtcaccagattgggtttgtctatggtggagtttcctttgcctccacatctgacatgtgcagtaataaaagctgcttccctggattgtgaagatctactacttccaatagcagcaatgttgtctgtggaaaacgtcttcattagacctgttgatccagagtaccagaaggaagcagaacagagacatcgagaattggcagctaaagctggaggatttaatgactttgcaactttagctgtcatctttgaacaatgcaaatcaagtggagctccagcttcatggtgccaaaaacactggattcattggaggtgcttattttctgcatttcgtgtggaagctcaacttcgagaactaatcaggaagcttaaacagcaaagtgatttcccaaaagagacctttgaaggccctaaacatgaagtactacgaagatgtctttgtgcgggctatttcaaaaatgtagctcgaagatctgttgggagaacgttttgcacagtggatggtcgtggaagcccagttcacattcatccttcctcagcacttcatgaacaggaaaccaaacttgaatggatcatttttcatgaggtattggttaccaccaaagtctacgcaagaattgtatgcccaatccgttatgaatgggtaagagacttgttacccaagttgcatgaatttaatgcacatgatttgagcagtgtggcccgacgtgaagtgagagaagatgcaagaaggagatggacaaataaggaaaatgtaaagcagctaaaggatggaatatcgaaagacgtcttaaagaaaatgcaaagaagaaatgatgacaaatccatatctgatgcacgggctcgtttccttgagagaaagcagcagaggacccaggaccacagtgacacacgaaaggaaacaggctaaggtggtgaaccctccaattcaggaagtgggaaaaggagccaggaaatgtgcttctactttgccagttatttcagacagcactaccaagaggaggtggtcggcacttgttattggcctatgaactaaaagcaaatcaaagctcataaatcaaagctcatcagttcccataaatgcagttgtcaaagaaaagatttggttgccatagtcataagcaatgatacatgaaaccaatgaaagacagtacatgtaataatattttcctcagtacaattttgctggccttaactggtatcaaacgctgtcattgagatgttttcaaagaacattgagttgtatttaatcagcgtgtactccatttgcattgaagcattaaaaattatttttcttaaaatctctttaaggccttcttgttgctgttagaatagtgctatatatcaggtatgtgaccatttatttcagaaggctgaacataagaggtttctactcagcaatacttagatgtctaactgtttaattgctacagagctttatagatatttagagaaaagacttaatcaattagtaaataaaattgcctatggcaggattctttcttgaattaatattaatccttaaattgatttttctgggattatacaaattcctttttatataaaagtatattgtttaaaacagtagctatagccattaaccaaaggacagatgatatatatatatatgatatatatatatatataagttcttttttagctgtacctacgtacttatatcagcaccatgtatgtaggtgtgatagtactttcaaacagcgcctccacctggcctactctgttatttccacctgtttgggtagggccatttaacttccattatgccaaacttgggatgggattttcgaagcagacaacactatttcatcgtgtttcaaattggaaccttgaggctagttagtatcacactcaggccacactcagcacttgcccactcttgtttactgccttgtattctagttatttgtgtatttgtctccctcactagattatacgctccttgtgggcagggactgtgtcttttttcatctttgtatctttcatgcacctagcatagtgctttgcacatagtagtcactcagtgtttgttaaataaagctattagtgtcattaaaattc

SEQ ID NO: 2807 - DNA, 2140 bp, Homo sapiens
cgggccctgggcggggccttcccggctgacggcctgcgtgcactgcgcttgcgcgggttgagggcggtggctcaggctcctggaaaggaccgtccacccctccgcgctggcggtgtggacgcggaactcagcggagaaacgcgattgagaaatggaaaagaaaatgaaataaatcagcagttatgaggcagagcctaagagaactatggcaacatcaggtgactgtcccagaagtgaatcgcagggagaagagcctgctgagtgcagtgaggccggtctcctgcaggagggagtacagccagaggagtttgtggccatcgcggactacgctgccaccgatgagacccagctcagttttttgagaggagaaaaaattcttatcctgagacaaaccactgcagattggtggtggggtgagcgtgcgggctgctgtgggtacattccggcaaaccatgtggggaagcacgtggatgagtacgaccccgaggacacgtggcaggatgaagagtacttcggcagctatggaactctgaaactccacttggagatgttggcagaccagccacgaacaactaaataccacagtgtcatcctgcagaataaagaatccctgacggataaagtcatcctggacgtgggctgtgggactgggatcatcagtctcttctgtgcacactatgcgcggcctagagcggtgtacgcggtggaggccagtgagatggcacagcacacggggcagctggtcctgcagaacggctttgctgacatcatcaccgtgtaccagcagaaggtggaggatgtggtgctgcccgagaaggtggacgtgctggtgtctgagtggatggggacctgcctgctgtttgagttcatgatcgagtccatcctgtatgcccgggatgcctggctgaaggaggacggggtcatttggcccaccatggctgcgttgcaccttgtgccctgcagtgctgataaggattatcgtagcaaggtgctcttctgggacaacgcgtacgagttcaacctcagcgctctgaaatctttagcagttaaggagtttttttcaaagcccaagtataaccacattttgaaaccagaagactgtctctctgaaccgtgcactatattgcagttggacatgagaaccgtgcaaatttctgatctagagaccctgaggggcgagctgcgcttcgacatcaggaaggcggggaccctgcacggcttcacggcctggtttagcgtccacttccagagcctgcaggaggggcagccgccgcaggtgctcagcaccgggcccttccaccccaccacacactggaagcagacgctgttcatgatggacgacccagtccctgtccatacaggagacgtggtcacgggttcagttgtgttgcagagaaacccagtgtggagaaggcacatgtctgtggctctgagctgggctgtcacttccagacaagaccccacatctcaaaaagttggagaaaaagtcttccccatctggagatgacagttgatgctttatttggaaagcagtgtgcatatcttgaggggtgatgaacacaagcaaaccaagttgcacctggcttctgcacactcctgcgaaagtcggtgaacattcactccacattgacccctccctagcctggcaggtgacgtcagggtccttcacagacaaacacgcttgggctcggcaggagctgccgtggccacccccgctgcccagtgtctgccctctagaagtaggctgtgtttccaggtgttcacccgtggtgcccacagtgccgacccgtggctgggtcggagctccatgttcctaagctaggtctaggtctacactcctaggacgcacgcatatcagcccgtgtaccctgtgacagtgactgtccccacctcctatgttagtggtgcccttactgccgtcgctcatccactcgtgtgggacgtaggattgcacagggctgtgccagtggcgtgtagggaacactgccctggctcagcgtgcgagctaaggtggtgatgtatgcgatgggactctgcatgggatagtacagttgtgtagacgtcttccaaataaattatgtgttggtccatcgcacatgctcaataaatatttttaaatgagtgaatgtcaaaaaaaaaa

SEQ ID NO: 2808 - DNA, 2249 bp, Homo sapiens
cgggccctgggcggggccttcccggctgacggcctgcgtgcactgcgcttgcgcgggttgagggcggtggctcaggctcctggaaaggaccgtccacccctccgcgctggcggtgtggacgcggaactcagcggagaaacgcgattgagagcagtgtgtggattacactatcactggaaaaatacgaattgagaagaaggaaaagactggaagatgcagaccttggttcctgttagtggaaacactgtaaggtcccagaaatggaaaagaaaatgaaataaatcagcagttatgaggcagagcctaagagaactatggcaacatcaggtgactgtcccagaagtgaatcgcagggagaagagcctgctgagtgcagtgaggccggtctcctgcaggagggagtacagccagaggagtttgtggccatcgcggactacgctgccaccgatgagacccagctcagttttttgagaggagaaaaaattcttatcctgagacaaaccactgcagattggtggtggggtgagcgtgcgggctgctgtgggtacattccggcaaaccatgtggggaagcacgtggatgagtacgaccccgaggacacgtggcaggatgaagagtacttcggcagctatggaactctgaaactccacttggagatgttggcagaccagccacgaacaactaaataccacagtgtcatcctgcagaataaagaatccctgacggataaagtcatcctggacgtgggctgtgggactgggatcatcagtctcttctgtgcacactatgcgcggcctagagcggtgtacgcggtggaggccagtgagatggcacagcacacggggcagctggtcctgcagaacggctttgctgacatcatcaccgtgtaccagcagaaggtggaggatgtggtgctgcccgagaaggtggacgtgctggtgtctgagtggatggggacctgcctgctgtttgagttcatgatcgagtccatcctgtatgcccgggatgcctggctgaaggaggacggggtcatttggcccaccatggctgcgttgcaccttgtgccctgcagtgctgataaggattatcgtagcaaggtgctcttctgggacaacgcgtacgagttcaacctcagcgctctgaaatctttagcagttaaggagtttttttcaaagcccaagtataaccacattttgaaaccagaagactgtctctctgaaccgtgcactatattgcagttggacatgagaaccgtgcaaatttctgatctagagaccctgaggggcgagctgcgcttcgacatcaggaaggcggggaccctgcacggcttcacggcctggtttagcgtccacttccagagcctgcaggaggggcagccgccgcaggtgctcagcaccgggcccttccaccccaccacacactggaagcagacgctgttcatgatggacgacccagtccctgtccatacaggagacgtggtcacgggttcagttgtgttgcagagaaacccagtgtggagaaggcacatgtctgtggctctgagctgggctgtcacttccagacaagaccccacatctcaaaaagttggagaaaaagtcttccccatctggagatgacagttgatgctttatttggaaagcagtgtgcatatcttgaggggtgatgaacacaagcaaaccaagttgcacctggcttctgcacactcctgcgaaagtcggtgaacattcactccacattgacccctccctagcctggcaggtgacgtcagggtccttcacagacaaacacgcttgggctcggcaggagctgccgtggccacccccgctgcccagtgtctgccctctagaagtaggctgtgtttccaggtgttcacccgtggtgcccacagtgccgacccgtggctgggtcggagctccatgttcctaagctaggtctaggtctacactcctaggacgcacgcatatcagcccgtgtaccctgtgacagtgactgtccccacctcctatgttagtggtgcccttactgccgtcgctcatccactcgtgtgggacgtaggattgcacagggctgtgccagtggcgtgtagggaacactgccctggctcagcgtgcgagctaaggtggtgatgtatgcgatgggactctgcatgggatagtacagttgtgtagacgtcttccaaataaattatgtgttggtccatcgcacatgctcaataaatatttttaaatgagtgaatgtcaaaaaaaaaa

SEQ ID NO: 2809 - DNA, 1998 bp, Homo sapiens
cttttttggggacagatcccgaagttcgagcatccctcggataggccgggtgtcaggcctggtctctcaggcccgtccaggcccatcttgacgattccaagaccacccccttgagcaagaatgccatcccctctgggtcccccatgcctgcccgtcatggacccagagaccaccctcgaggagcctgagactgcccgcctccgcttccgagggttctgctaccaggaggtggcaggtccccgagaagccctggcccggctgcgtgagctgtgttgccagtggctgcagcctgaggcacactccaaggagcagatgctggagatgctggtgctggagcagttcctgggcacactgcctcccgagatccaggcctgggtgcgcggtcagcggccaggcagtcctgaggaggccgctgccctagtcgaaggactgcagcatgaccctgggcaactgttgggctggatcacagcccatgtcctgaagcaggaggtgctccctgcagcccagaagacagaggaaccacttgggagcccccacccctcagggacagtggagtcccctggggaaggtccccaggacaccagaatagaggggtctgtccagctcagctgcagtgtgaaggaggagcccaatgtcgatggacaggaagtggcaccctccagccctccacttgcagcacagtcccctgaggggaaccatggacaccaagaaccagcctccacatccttccacccacccaggattcaggaggagtgggggctgctggaccggtcacagaaggaactgtactgggatgcgatgctggagaagtacggcacagtggtctccctggggttaccgccccaccagccagaggcacaggcccagtcagagctggggatgctgctcacggggacaggcgtctgcagaagcctgcgctcgggaaatgagagtgagggtccacctggctgcccagaggcccagccgccccagggcccagggccggcagcctgggagggcttgtctggggctgccactcctgcccccactgtgcgcccagggacaccgccagtgcccactcagcccacacctgcagagacgagactggagccggctgccacccccaggaagccctacacgtgcgagcagtgtggccgcggcttcgactggaagtcagtgttcgtcatccaccaccggacacacacgagtgggccaggtgtgcagtccccggggctagccaccggggaaagcacagagaagccaccacaaggggaggtggcctttccgcaccacccccgacgctcactcacgggcccccggagttacccgtgtgaggagtgcgggtgcagcttcagctggaagtcgcagctggtcatccaccgcaagagccacacaggccagcggcgtcacttctgcagtgactgtggccgcgccttcgactggaagtcgcagctggtcatccaccgcaagggccaccggccggaggttccatgagcagccagacagcacagtccctcggggcctcggtgttctcggggcctggatacagcctctggggcaccagcagaagactctggaggcagcaggggatgccagagtgaacaaggggtcccaagccagttccctgcccctggtctggtctcccccaaaagacctgggtgcaaggaaaaggagctgctctctctcttcttgcccctgcctcctagagggaggtctgggttcccttctatggctgaccagtgcctgtggggtgactgccaagcaccaggctccctccctccctgtgacatggcctgggctgacaacactccctctcctgggacctccttgcctcaggtgggtgttcaaaaactgtgcctccccactcgtctgtgcagaggctgggcctgaggtctcagtgtggagagcagcagaagacccaggaaagcacagttggcttccgtttctcctgctccctgtgtgtgttagaattttaacataaattccactttcataataaaaaaaaaaaaaaaaaaaaaa

SEQ ID NO: 2810 - DNA, 3539 bp, Homo sapiens
ccggaaccggccttggaacaactgtggaacctgaggccgcttgccctcccgccccatggagcggcccccggggctgcggccgggcgcgggcgggccctgggagatgcgggagcggctgggcaccggcggcttcgggaacgtctgtctgtaccagcatcgggaacttgatctcaaaatagcaattaagtcttgtcgcctagagctaagtaccaaaaacagagaacgatggtgccatgaaatccagattatgaagaagttgaaccatgccaatgttgtaaaggcctgtgatgttcctgaagaattgaatattttgattcatgatgtgcctcttctagcaatggaatactgttctggaggagatctccgaaagctgctcaacaaaccagaaaattgttgtggacttaaagaaagccagatactttctttactaagtgatatagggtctgggattcgatatttgcatgaaaacaaaattatacatcgagatctaaaacctgaaaacatagttcttcaggatgttggtggaaagataatacataaaataattgatctgggatatgccaaagatgttgatcaaggaagtctgtgtacatcttttgtgggaacactgcagtatctggccccagagctctttgagaataagccttacacagccactgttgattattggagctttgggaccatggtatttgaatgtattgctggatataggccttttttgcatcatctgcagccatttacctggcatgagaagattaagaagaaggatccaaagtgtatatttgcatgtgaagagatgtcaggagaagttcggtttagtagccatttacctcaaccaaatagcctttgtagtttagtagtagaacccatggaaaactggctacagttgatgttgaattgggaccctcagcagagaggaggacctgttgaccttactttgaagcagccaagatgttttgtattaatggatcacattttgaatttgaagatagtacacatcctaaatatgacttctgcaaagataatttcttttctgttaccacctgatgaaagtcttcattcactacagtctcgtattgagcgtgaaactggaataaatactggttctcaagaacttctttcagagacaggaatttctctggatcctcggaaaccagcctctcaatgtgttctagatggagttagaggctgtgatagctatatggtttatttgtttgataaaagtaaaactgtatatgaagggccatttgcttccagaagtttatctgattgtgtaaattatattgtacaggacagcaaaatacagcttccaattatacagctgcgtaaagtgtgggctgaagcagtgcactatgtgtctggactaaaagaagactatagcaggctctttcagggacaaagggcagcaatgttaagtcttcttagatataatgctaacttaacaaaaatgaagaacactttgatctcagcatcacaacaactgaaagctaaattggagttttttcacaaaagcattcagcttgacttggagagatacagcgagcagatgacgtatgggatatcttcagaaaaaatgctaaaagcatggaaagaaatggaagaaaaggccatccactatgctgaggttggtgtcattggatacctggaggatcagattatgtctttgcatgctgaaatcatggagctacagaagagcccctatggaagacgtcagggagacttgatggaatctctggaacagcgtgccattgatctatataagcagttaaaacacagaccttcagatcactcctacagtgacagcacagagatggtgaaaatcattgtgcacactgtgcagagtcaggaccgtgtgctcaaggagctgtttggtcatttgagcaagttgttgggctgtaagcagaagattattgatctactccctaaggtggaagtggccctcagtaatatcaaagaagctgacaatactgtcatgttcatgcagggaaaaaggcagaaagaaatatggcatctccttaaaattgcctgtacacagagttctgcccggtcccttgtaggatccagtctagaaggtgcagtaacccctcagacatcagcatggctgcccccgacttcagcagaacatgatcattctctgtcatgtgtggtaactcctcaagatggggagacttcagcacaaatgatagaagaaaatttgaactgccttggccatttaagcactattattcatgaggcaaatgaggaacagggcaatagtatgatgaatcttgattggagttggttaacagaatgagttgtcacttgttcactgtccccaaacctatggaagttgttgctatacatgttggaaatgtgtttttcccccatgaaaccattcttcagacatcagtcaatggaagaaatggctatgaacagaaactacatttctactatgatcagaagaacatgattttacaagtataacagttttgagtaattcaagcctctaaacagacaggaatttagaaaaagtcaatgtacttgtttgaatatttgttttaataccacagctatttagaagcatcatcacgacacatttgccttcagtcttggtaaaacattacttatttaactgattaaaaataccttctatgtattagtgtcaacttttaacttttgggcgtaagaccaaatgtagttttgtatacagagaagaaaacctcaagtaataggcattttaagtaaaagtctacctgtgtttttttctaaaaaggctgctcacaagttctatttcttgaagaataaattctacctccttgtgttgcactgaacaggttctcttcctggcatcataaggagttggtgtaatcattttaaattccactgaaaatttaacagtatccccttctcatcgaagggattgtgtatctgtgcttctaatattagttggctttcataaatcatgttgttgtgtgtatatgtatttaagatgtacatttaataatatcaaagagaagatgcctgttaatttataatgtatttgaaaattacatgttttttcatttgtaaaaatgagtcatttgtttaaacaatctttcatgtcttgtcatacaaatttataaaggtctgcactcctttatctgtaattgtaattccaaaatccaaaaagctctgaaaacaaggtttccataagcttggtgacaaaattcatttgcttgcaatctaatctgaactgaccttgaatctttttatcccatttagtgtgaatattcctttattttgctgcttgatgatgagagggagggctgctgccacagactgtggtgagggctggttaatgtagtatggtatatgcacaaaactacttttctaaaatctaaaatttcataattctgaaacaacttgccccaagggtttcagagaaaggactgtggacctctatcatctgctaagtaatttagaagatattatttgtcttaaaaaatgtgaaatgcttttatattctaatagtttttcactttgtgtattaaatggtttttaaattaaaaaaaaaaaaaaaa

SEQ ID NO: 2811 - DNA, 2359 bp, Homo sapiens
cgaccgagcacagacacgttgcccaccgctcctctcccgaggtctgtagtcgcggagaaacacatgttgcgttactaacgttcagaggtctgcgacagcttcgatttgaatgactagccgggaacaccaagtttcactgtgtaattgcgtccccctactccggcgcctcctttgcgacgctccctggagaaaagcacgcccactgcacgcgctcagtcgctacttccgctctcgagtgtctccaagcaagatggcggaggagccgcagtctgtgttgcagcttcctacttcaattgctgctggaggggaaggacttacggatgtctccccagaaacaaccaccccggagcccccgtcttccgctgcagtttccccgggaacagaggaacctgctggcgacaccaagaaaaaaattgacattttgctaaaggctgtgggagacactcctattatgaaaacaaagaagtgggcagtagagcgaacacgaaccatccaaggactcattgacttcatcaaaaagtttcttaaacttgtggcctcagaacagttgtttatttatgtgaatcagtcctttgctccttccccagaccaagaagttggaactctctatgagtgttttggcagtgatggtaaactggttttacattactgcaagtctcaggcgtggggatgaaccacaaagaaaatcaacttgctactacatgaaatggattttcacggaagagacagctctgaaaagttttgatgcttgtggcaagagacttaacagatgtgatctatttagtatgtgtctactctatgtttatgcataagaaaacatccatagcatgaatggactcagaaaaatgtgatttgtattaatgcaccagtcatcataaaagatggtcatgatagtacacccattgctcctacttgttactattattgctgcagatctgcctccaaggttgaaaaggagactaagactgtataaacatcttcattgtcagttctcaaaatgactgaaattgttttcatggtaaaagttaatatactaaagggttcctttttttttaatgtttacatttatctctatgtttacctttttagtcacattgacctgctggctgaatacctcaaatagtccagtagagggcagtccaccaggcagaaaaggttaggcgttttggtttcacatctttgctggggaataataggggaaatggctgtttttgctaatttttagctaatatctagccaggagagcaagcacataggacagactgaaagactgtaattttacacaatacacatggcttaattattttattgggatacagaaaaatataaattctggacaaataagtcatatacctgttttcagtcctaacatttaaggattcttgagtcccaatcacataactgtggtgttactctgtcatttatatggtgtcaaaagcacttgatgagtaaacccagtagcatctttttgagtgtttcataatgcattttccaacttgaaaacaataattgaaaaatagccttattgtatattttatgccatgactaaaagtgccatttttactgatgctattagactgataatttcttgaagtgaaatttaacctttttttctctttagtattatgtttataatgccatatttttagaaagcattccagatcaggcatggtggcttacacctgtaatcccagcactttggaaggctgaggtgtggggattgcgtgaagccacaagtttgagaccagcctggttagcaaggcaagatccccaactctacaaaaaaataaaaattaaaaaaaaattattaggctgcagaggcaagaggatcccctgagcccagaagttcaagggtatagtgagtcgtgattgtaccactgcattcctgctgagcaacagagtgagaccccatctcaaaaaagaaaaaaaaaggcattctagtaaatcgaatgtaatgtgaatggaatttcaaaacaggatctaagatggtatgtagtagaattcaaagtaatatcattttaaagttaaatgagtatggaaaaggtctgttctctagttttgtccagttcagtttactgaaggaatatatttaattatattcatatatttaacaaataaaaatatgttgaattttcgtattgtttgccactgagggttcagatgatagacctcaaaaaatcgaaaatactggttgaaatttgtagcatccatttagttattctttttgacctaaataacttaatagtttattaaatctaaggttagctaaatatgtagctaaccttatttgttttctttcctaacaactctgaagaatacataggactttgcactttttttttttttttttttttttaaa

SEQ ID NO: 2812 - DNA, 596 bp, Homo sapiens
tggctgggatcatccgcggcggccgggctcgtggggcgcctggagtgagggttctggttcccgccggcgaggattgttaaaatgagtcttcggaagcaaacccctagtgacttcttaaagcaaatcatcggacgaccagttgtggtaaaattaaattctggagtggattatcgaggggtcctggcttgcctggatggctacatgaatatagccctggagcagacagaagaatatgtaaatggacaactgaagaataagtatggggatgcatttatccgaggaaacaatgtgttgtacatcagtacacagaagagacggatgtgaagacaccaagagagcaacgcttttcatagttggatatatttttttatgaattttttctaatttttgcttcttttgtgatacaatttgtcctctttttataatagttggtgatttttcactgacatgtgagtaagataaatgtatacaattgtggatttaattgtgaaatgttctttcacttgtaagtttcagtcattttcttttacctcgttgtcagtgtacagaatgctaaaataattaaaaaaagacaaaataaaaaaaaaaaaaaaaaa

SEQ ID NO: 2813 - DNA, 3147 bp, Homo sapiens
aggcgtctgaggggcggacggaggcggcggcggcggcggcgggagcgggagcgggcggcgagtggggagcggggccgggagtggagcagccgccgcggcgggactggaccgagcctcgccggcgcgcacctgcccgcagcgcccgcggagcgcgcagcgcggcccgagcgcgacgacctgccgagcggcggccgaggcggcggtgtgggcgcgtcaggccgcgacgagggcgctgagacaaatttacatgtattggagaccagaccagaagcccttctgaattaagatctcacattcttgaaggtggcattgaagagcactaagatcggaagatgagtgagcttgaccagttacggcaggaggccgagcaacttaagaaccagattcgagacgccaggaaagcatgtgcagatgcaactctctctcagatcacaaacaacatcgacccagtgggaagaatccaaatgcgcacgaggaggacactgcgggggcacctggccaagatctacgccatgcactggggcacagactccaggcttctcgtcagtgcctcgcaggatggtaaacttatcatctgggacagctacaccaccaacaaggtccacgccatccctctgcgctcctcctgggtcatgacctgtgcatatgccccttctgggaactatgtggcctgcggtggcctggataacatttgctccatttacaatctgaaaactcgtgaggggaacgtgcgcgtgagtcgtgagctggcaggacacacaggttacctgtcctgctgccgattcctggatgacaatcagatcgtcaccagctctggagacaccacgtgtgccctgtgggacatcgagaccggccagcagacgaccacgtttaccggacacactggagatgtcatgagcctttctcttgctcctgacaccagactgttcgtctctggtgcttgtgatgcttcagccaaactctgggatgtgcgagaaggcatgtgccggcagaccttcactggccacgagtctgacatcaatgccatttgcttctttccaaatggcaatgcatttgccactggctcagacgacgccacctgcaggctgtttgaccttcgtgctgaccaggagctcatgacttactcccatgacaacatcatctgcgggatcacctctgtctccttctccaagagcgggcgcctcctccttgctgggtacgacgacttcaactgcaacgtctgggatgcactcaaagccgaccgggcaggtgtcttggctgggcatgacaaccgcgtcagctgcctgggcgtgactgacgatggcatggctgtggcgacagggtcctgggatagcttcctcaagatctggaactaacgccagtagcatgtggatgccatggagactggaagaccattccaacttggacgcgttaccatgagagcatatcctatccaaccgtactaacgtggacaccctacacctcccctcagaacttcaaaagggcaagatcttttttccttcacttattgctgaaaccaagagcacaattcccattgagagaaagatctctgtgctgtaaactaaaacaaattgtgcattccttccggggccatcgtctttgttttcttttttgtcttgaatgaattttaaaaggaaatatataataaaaatgttaaccagaaggtaaacttgagtgtaattgtcagacagacacacttttccaccagtgtatttgaattttagaccagtgaccctgttttgtggcattcatgcaaaacatgctgagggctttgttcatctggtcatcgtgtccaaatttcagtcatgtttgtagcaagattttggaagcattcatatttcctttttaaaatgtattcctttgtgttcaacagttaatcaaaaccagagagtctagggcagcctctctgatgttgtcaatgatgtaaattcagtccctggtttttaattttctgtctgatgtcacagatcattgttgcacacaaacgtggcatagaaaagaacatgttcagaagccatggggccaagcacatgcggggacggtctcaaatgcgtgatcagagaatccttcacctttgctgaaaagtgagctcagatccagcaccatgttcctcctgacccatcctgtctatcttctcagttgagtttttaatctcactttgggtttccttgtgaagttggagggaagtttataatagcctaacactaccccacccccaactaggaggaacctctgttttcaagagagatgcctgtcctgtgcttggatagtcagtcaattatttgtgtatgaaacaatgtacaaatcaatgttttgaaaataatgatctcagactttctaagttaaattttaaaaattttgattgtttgccatattgggtgggtttactcttagaatcgcatgctgtagaaatgctcaaaagtgcatatgggactcagtccttaggtgttctttttcttttaagaaataacctcttacagttgtaaccattgcggctctgtccacttctcgttgctgctctgtggcacatatcggaagcagtacagcgcgcggctctacacgcttgggtagcgggataagtcactgttttctttatttctttaaaaaaaaaaaagttctgttgcaaacgactgctgttggattctgagggtggggagggagagagagggagggagagggagtgaagagcctgccctcctatatggattcttcagggccctccacatctgaggtggctcattcccatcacacacagattgtcctggtgttcatttcaaggccagtgttcagcagcagcgtttggaaagcaggttctgtgggaccccccgccccgccccccgcactccttcatagcagcagtagtggcttctccatcctgttttctgcaacattctatacaaaactgtgctgtgaccttgcggtaggcctggatctggcaaagagaatacaaatgaaaccccttctttctctttccgtccaacaactctgtagagctctctgcacccttacccctttccaccttttgtatttaattttaaagtcagtgtactgcaaggaagctggatgcaagatagatactatattaaactgtactgttatttaagatgtaataaagcagtttgacatgaaaaaaaaaaaaaaaaaaaa

SEQ ID NO: 2814 - DNA, 2303 bp, Homo sapiens
ggggaagggaaaagcgagagcggggcaaggcggaagaggaagcggggcggaagggaagcccgggccgcagacggcgaaggaggcagccgggccgggggctgacgcgggagcgagggcatgcccaagggaggaagcagagggaggcagaagcgtggaggaaggggcgagaggcatcgtcaagggagtcgaggggagcgcaggggccgggaaggaggcacaaggaagagagtatgggaagaaggaggaatggagggtcagggctaggcggcgggagggcgccaggccgggaagagcacagggacgagggggtcaggcttgggccgacatcgcggggacaggggtggccatggcggcggcggccggggaggaggaggaggaggaggaggcggctcgggagtcggctgcccgcccggccgcggggcctgcgctctggcgcctgccggaggagctgctgctgctcatctgctcctacctggacatgcgggccctcggccgcctggcccaggtgtgccgctggctgcggcgcttcaccagctgcgatctgctctggcgccggatagcccgggcctcgctcaactccggcttcacgcggctcggcaccgacctgatgaccagtgtcccagtgaaggaacgagtgaaggtgtctcagaactggagactggggcgctgccgagaggggattctgctgaagtggagatgcagtcagatgccctggatgcagctagaggatgattctctgtacatatcccaggctaatttcatcctggcctaccagttccgtccagatggtgccagcttgaatcgtcggcctctgggagtctttgctgggcatgatgaggacgtttgccactttgtgctggccaactcgcatattgttagtgcaggaggggatgggaagattggcattcataagattcacagcaccttcactgtcaagtactcggctcatgaacaggaggtgaactgtgtggattgcaaagggggcatcattgtgagtggctccagggacaggacggccaaggtgtggcctttggcctcaggccggctggggcagtgcttacacaccatccagactgaagaccgagtctggtccattgctatcagcccattactcagctcttttgtgacagggacggcttgttgcgggcacttctcacccctgagaatctgggacctcaacagtgggcagctgatgacacacttgggcagtgactttcccccaggggctggggtgctggatgtcatgtatgagtcccctttcacactgctgtcctgtggctatgacacctatgttcgctactgggacctccgcaccagcgtccggaaatgtgtcatggagtgggaggagccccacgacagcaccctgtactgcctgcagacagatggcaaccacctgctggccacaggttcctcctactacggtgttgtacggctgtgggaccggcgtcaaagggcctgcctgcacgccttcccgctgacgtcgactcccctcagcagccctgtgtactgcctgcgtctcaccaccaagcatctctatgctgccctgtcttacaacctccacgtcctggattttcaaaacccatgaccgtcagggccacccctgcctctgggccagggaaaccagctactcagggacttctcttgcctggagggtgcagtgatagctcctcctcactgccccactgtgctcctgggcctgtgaccccagtgctcaggcaccttgcactagaggcttctgactcctgggactttggagcttaccagagatgcagtccctcccaggaacctgttggagaggcaggacctgctgctttagagtgcggctgaacccgggccttgcgtccctgtttggccagagcaaggatctggcctggagaggcccatcctataccccttattagagccatgacagcctacagagtgaggtgaggtgctcccaccttcccagatggttcctttctgccccttcctggaaggaaaggtgaggctgccaatagcctcctggcaccagccagacctcacccttgaccaacctctcggggctgggggttcattcctggggcactgtggcctggttttgctttgaaaccaagaaagagcaaagggaacccagcagttctgagtgagttctgagccagccctacctcaggctggctgttgagacatgctacaattttcatttttgtaaaaataaagcttgattgttcacagaaaaaaaaaaaaaaaaaaaaaaaaaaaaaaaaaaaaaaaaaaaaaaaaaaaaaaaaaaaaaaaaaaaaaaaaaaaaaaaaaaaaaaaaaaaa

SEQ ID NO: 2815 - DNA, 4684 bp, Homo sapiens
cttcggtctcttctccccggctgatcccagcactctccgtgacagcgcctcctgactcagcccaggaccggcttcttctcacgacctgctggagactggacgcccacacctgacccggaactcggaggcgtgcttcctccacccgccggctagcagccccgggccctgagctcccgccgacgccgctggggggcccgacaggcccctcggcgctgatgctgagtgggatcgagggcccggggcggcggcggagtacgggcctctggcgccttaggccagccgcaggtgtcggttcttaggctctccaggctcgctagctcccgccccggcttggatgggtctccctgcgccataaatgtggctgctgaggcggcggtggccgtggcccgtcgcgctgctgctgcggcgctccaagttcatctccgccccggggctctcctgccccacctcggggctgccgccacccgctccttatcccctggccctggccttgcagcgtggcgacaatggacaagatcctggagggccttgtgagttcctcgcatcccctgcccctcaagcgggtgattgtgcggaaggtggtggaatcggcggagcactggctagacgaggcgcagtgcgaggccatgtttgacctgacgacccggctcatcctggagggccaggaccctttccagcggcaggtggggcaccaggtgctggaggcctacgcacgataccaccggccagagttcgagtccttcttcaacaagaccttcgtgttgggcctccttcatcagggctaccactctctggacaggaaggatgtagccatcctggactacattcacaacggcctgaagctgattatgagctgtccgtcggtgctggatctctttagcctcctgcaggtagaggtgttacggatggtgtgtgagaggccggagccgcagctctgtgcccgactgagcgaccttctgaccgactttgtgcaatgcatccccaaggggaaattgtccatcacgttctgtcaacagctggttcgaacgataggccatttccagtgcgtgtccacccaggaaagagagctgcgggaatatgtctcccaggtgacaaaagtgagtaacttgctgcagaacatctggaaggccgagcctgccacactactgccttccctgcaagaagtttttgcaagcatctcttccacagatgcatcatttgaaccttctgtagcattggcaagccttgtgcagcatattcctcttcagatgattacagttctcatcaggagccttactacggatccaaatgtaaaagatgcaagtatgacccaagccctttgcagaatgattgactggctatcctggccattggctcagcatgtggatacatgggtaattgcactcctgaaaggactggcagctgtccagaagtttactattttgatagatgttactttgctgaaaatagaactggtttttaatcgactttggtttcctcttgtgagacctggtgctcttgcagttctttctcacatgctgcttagctttcagcattctccagaggcgttccatttgattgttcctcatgtggttaatttggttcattctttcaaaaatgatggtctgccttcaagtacagccttcttagtacaattaacagaattgatacactgtatgatgtatcattattctggatttccagatctctatgaacctattctggaggcaataaaggattttcctaagcccagtgaagagaagattaagttaattctcaatcaaagtgcctggacttctcaatccaattctttggcgtcttgcttgtctagactttctggaaaatctgaaactgggaaaactggtcttattaacctaggaaatacatgttatatgaacagtgttatacaagccttgtttatggccacagatttcaggagacaagtattatctttaaatctaaatgggtgcaattcattaatgaaaaaattacagcatctttttgcctttctggcccatacacagagggaagcatacgcacctcggatattctttgaggcttccagacctccatggtttactcccagatcacagcaagactgttctgaatacctcagatttctccttgacaggctccatgaagaagaaaagatcttgaaagttcaggcctcacacaagccttctgaaattctggaatgcagtgaaacttctttacaggaagtagctagtaaagcagcagtactaacagagacccctcgtacaagtgacggtgagaagactttaatagaaaaaatgtttggaggaaaactacgaactcacatacgttgtttgaactgcaggagtacctcacaaaaagtggaagcctttacagatctttcgcttgccttttgtccttcctcttctttggaaaacatgtctgtccaagatccagcatcatcacccagtatacaagatggtggtctaatgcaagcctctgtacccggtccttcagaagaaccagtagtttataatccaacaacagctgccttcatctgtgactcacttgtgaatgaaaaaaccataggcagtcctcctaatgagttttactgttctgaaaacacttctgtccctaacgaatctaacaagattcttgttaataaagatgtacctcagaaaccaggaggtgaaaccacaccttcagtaactgacttactaaattattttttggctccagagattcttactggtgataaccaatattattgtgaaaactgtgcctctctgcaaaatgctgagaaaactatgcaaatcacggaggaacctgaataccttattcttactctcctgagattttcatatgatcagaagtatcatgtgagaaggaaaattttagacaatgtatcactgccactggttttggagttgccagttaaaagaattacttctttctcttcattgtcagaaagttggtctgtagatgttgacttcactgatcttagtgagaaccttgctaaaaaattaaagccttcagggactgatgaagcttcctgcacaaaattggtgccctatctattaagttccgttgtggttcactctggtatatcctctgaaagtgggcattactattcttatgccagaaatatcacaagtacagactcttcatatcagatgtaccaccagtctgaggctctggcattagcatcctcccagagtcatttactagggagagatagtcccagtgcagtttttgaacaggatttggaaaataaggaaatgtcaaaagaatggtttttatttaatgacagtagagtgacatttacttcatttcagtcagtccagaaaattacgagcaggtttccaaaggacacagcttatgtgcttttgtataaaaaacagcatagtactaatggtttaagtggtaataacccaaccagtggactctggataaatggagacccacctctacagaaagaacttatggatgctataacaaaagacaataaactatatttacaggaacaagagttgaatgctcgagcccgggccctccaagctgcatctgcttcatgttcatttcggcccaatggatttgatgacaacgacccaccaggaagctgtggaccaactggtggagggggtggaggaggatttaatacagttggcagactcgtattttgatcctgagagagtccaaaatgcactggtcacgaaacgtctaatactatgactgttaaaatgtcagactataacaaatatctatcttttatttttcattagacccttatacttcaagagaacacactcagtgcttgtttttattttcttgacacatttattaacaaaatgcatcatggaaaaaaaatctacctcttaaaattccatttgcttttatggttagacatgcttgaccaaaaatgttcagaagaaaatatgtacctggtccctaattaagctgcgttaaatttggtagaagcatttaaatggtctatcttcagttttactgaacaaaaaatgtaatttatttagcattctttataaaagaattgatgctagaggtaaaaaaaaatacttgtttttaaaaaatcctttacgtcttgtgtaattaccccattattaaattcaagtccttgaaaatcaactagagattataaagtctctaaagaaggcaataacaaaatttatcaagatatagtacttttcagtttttgtttagtgtcttcagcatcactgtgtctgtatttcaagtacaaatgtttttaaaaaggattctttatacatatgtgctgaattgattttaagaaagttgcatgatcctgtaggagcaacatttttacctaaaaaatgctaactttatagtatttctaattgttcaaggattttaaaattctatttcagggagtatatcttctgtggttttgaaggaggtgagttctgtatgtgccttgcagtactgtaattcaaaaataggaatctttggctgcaaaattttaatgaaatgttaggaagtaattttcgtgctaacattaaaattataactttttgaaaggtaatagattttccagaagtaaaatctgatggttctaaatcaatcaatgtgatagttcatttttaactcttagaagaattcagaggaaattaacccagctaagtaaaaaatctgtcttgattttgttacttattcctcagaatattaaacattgatcacataaaaaaaaaaaaaaaaaaaa

SEQ ID NO: 2816 - DNA, 4344 bp, Homo sapiens
gggatctgctagaagttggtcttccgccaggactagagtttcctcgcggtaacagcctccgtggcctccggaggaccatgtcattagactttggcagtgtggcactaccagtgcaaaatgaagatgaagagtatgacgaagaggactatgaaagagagaaagagttgcagcagttactcacagaccttccccatgacatgctggatgacgacctctcctctccagagctccagtattcggactgcagcgaggatggcacagacggacaaccacatcatcctgagcaattggagatgagctggaatgagcaaatgctgcccaaatctcaaagtgtaaatggtcccagttgtcaaggtttggaaccgtataataaagtgacatataaaccttatcagtcttctgcccagaataatggctcaccagcccaggagataacaggaagtgacacattcgaaggcctgcaacaacaatttttaggagctaatgagaactctgcagaaaatatgcagattattcaacttcaggttcttaacaaagcaaaagagagacaactggagaacttaattgaaaagttaaatgaaagtgaacgtcaaattcgatatctgaatcaccagcttgtaataataaaagatgaaaaggatggtttgactctcagccttcgagaatcacagaaactctttcagaatggaaaagaaagagagatacagcttgaagctcaaataaaagcactggagactcagatacaagcattaaaagtcaatgaagaacagatgatcaagaagtccagaacaactgaaatggctctggaaagcttgaagcagcagctggtggaccttcatcattctgaatcacttcaacgagctagagaacagcatgagagcattgttatgggcctcacaaagaagtacgaagagcaagtattgtccttacaaaagaatttggatgccacagtcaccgcacttaaagaacaggaagacatttgctctcgtctgaaagatcacgtgaaacaactggaaaggaatcaagaagcaatcaagttagaaaagactgagatcattaataagttgacaagaagtctagaggagagtcaaaagcagtgtgcccacttgttgcagtccgggtcagtacaagaggtggctcagctacagttccagctgcagcaagcacagaaggcacatgctatgagtgcaaacatgaacaaggctttgcaagaagaattaacagaactaaaagatgaaatttctctctatgaatctgctgcaaaactaggaatacatccaagtgactcagaaggagaattaaatatagaactcactgaatcgtatgtggatttgggtattaaaaaggtcaactggaaaaaatccaaagttaccagcattgtacaagaagaagacccaaatgaagagctttcaaaagatgagttcattctgaagttaaaggcagaagtacagcgtttgctgggtagcaactcaatgaagcgtcatctggtgtctcagttacaaaatgacctcaaagactgtcataagaaaattgaagatctccaccaagtgaagaaggatgaaaaaagcattgaggttgagactaaaacagatacctcagaaaaaccaaagaatcaattatggcctgagtcttctacttctgatgttgtcagagatgatattctgctgcttaaaaatgaaattcaagttttacaacaacaaaatcaggaacttaaagaaactgaaggaaaactgagaaatacaaatcaagacttatgtaatcaaatgagacaaatggtacaagattttgaccatgacaaacaagaagctgtggataggtgtgaaaggacttatcagcagcaccatgaagccatgaaaactcaaatacgtgaaagcctattagcaaagcatgctttggagaagcagcagctctttgaggcttatgagagaactcatttgcaactgaggtctgagttggataagttgaataaggaggtgactgctgtgcaggaatgttacctagaagtgtgcagagagaaggataatctagaattgactctcaggaagaccactgaaaaggagcaacagactcaggagaagatcaaagaaaaactcattcaacagcttgaaaaggagtggcagtctaagctggatcaaactataaaggcaatgaaaaagaagaccttagattgtggcagccaaactgaccaagtaaccaccagtgatgttatttccaagaaagagatggcaattatgatagaagagcagaagtgcacaatccagcaaaacttagaacaagagaaggacatagccatcaagggggctatgaagaaactcgaaattgaattggaactcaaacattgtgaaaatattaccaaacaggtagaaatagctgtgcaaaatgctcatcagcgatggctgggagaactaccagagctggcagagtatcaagcacttgtgaaggcagaacagaaaaagtgggaagaacagcatgaggtctctgtgaacaaaaggatatcatttgctgtttctgaagctaaagagaaatggaagagtgagcttgaaaatatgaggaaaaatatacttcctggaaaggaattggaagagaagattcattctcttcagaaggaacttgagttaaagaacgaagaagtccctgtggtcatcagggctgagttagctaaggctcggagtgaatggaacaaagaaaagcaagaagaaatccacagaatccaagaacaaaatgagcaagattaccggcaatttttagatgatcaccgaaataaaattaatgaggtgcttgcggcagctaaagaagactttatgaaacaaaaaactgaactacttcttcagaaggagacagaattacaaacttgtctagaccagagtcgtagagaatggactatgcaggaagccaagcggatccaactggaaatctatcagtatgaggaagacatcctgactgtacttggggttcttttaagtgatacccaaaaggagcacatcagtgattctgaggacaagcagcttttggaaatcatgtcgacttgttcttcaaaatggatgtctgtgcaatattttgaaaaactaaagggctgcatacagaaagcatttcaagatacacttcctctgcttgtagaaaacgctgacccagaatggaaaaagagaaatatggccgagctctctaaggattctgccagccagggcactggccaaggagaccctggacctgctgctggacaccatgctcagcccttggccttacaagcaacagaagcagaagctgataagaaaaaggtccttgaaattaaggatttatgctgtggacactgcttccaagaacttgaaaaggcaaagcaggaatgtcaagatctgaaaggaaaactggagaaatgctgtaggcatcttcagcatttagaaaggaagcacaaagctgtagtggaaaaaattggagaagagaataataaagttgttgaagaattaatagaagaaaacaacgacatgaagaataaattggaagaattgcaaacactttgtaaaacaccaccaaggtcattgtcagcaggggccattgaaaatgcttgcctgccatgcagtgggggagccttggaagaacttcgtgggcagtacattaaagctgtaaaaaaaattaaatgtgacatgcttcgttatattcaggagagtaaggaacgagctgcagaaatggtaaaagcagaggtactgcgagaacgtcaagaaaccgcccgaaagatgcgcaaatattatttgatttgcctccaacagattttgcaggatgatggaaaagaaggggctgagaaaaagattatgaatgctgctagcaaacttgctacaatggcaaaattactggaaacacctatttctagtaagtcccaaagcaaaactacacagtcaggtatgtcaaagtgagtcgccaaatggtttttctatcttttcttctttagctatttaatattttcagtatgaagaaggcagggaaggtaaggagtgagagttaatttgtgaagttttgtatgttttacttaaactagaagtttacgcaaaaagagtacacagtttccaatttaagtaggcagactgagcatgcccatcagtttcctattgctgcttccatccctcgaaatgatagaaaagattttaaacagcaaataaagaatgagaaaaagaagaaattataagtgggttttaaaaagttgcagtgggccaggcatcatggctcacacctgtaatcccagcactttgggaggctgaggtgggaggatcccttgatcccaggaatttgaggttgcagtaagctatgattgtgccactgtactccagcctgggtgacagagtgaggccctgtctc

SEQ ID NO: 2817 - DNA, 1550 bp, Homo sapiens
tcaacgcctgcctcccctcgagcgtcctcagcgcagccgccgcccgcggagccagcacgaacgagcccagcaccggccggatggagcgtccgcaacccgacagcatgccccaggatttgtcagaggccctgaaggaggccaccaaggaggtgcacacccaggcagagaatgctgagttcatgaggaactttcagaagggccaggtgacccgagacggcttcaagctggtgatggcctccctgtaccacatctatgtggccctggaggaggagattgagcgcaacaaggagagcccagtcttcgcccctgtctacttcccagaagagctgcaccgcaaggctgccctggagcaggacctggccttctggtacgggccccgctggcaggaggtcatcccctacacaccagccatgcagcgctatgtgaagcggctccacgaggtggggcgcacagagcccgagctgctggtggcccacgcctacacccgctacctgggtgacctgtctgggggccaggtgctcaaaaagattgcccagaaagccctggacctgcccagctctggcgagggcctggccttcttcaccttccccaacattgccagtgccaccaagttcaagcagctctaccgctcccgcatgaactccctggagatgactcccgcagtcaggcagagggtgatagaagaggccaagactgcgttcctgctcaacatccagctctttgaggagttgcaggagctgctgacccatgacaccaaggaccagagcccctcacgggcaccagggcttcgccagcgggccagcaacaaagtgcaagattctgcccccgtggagactcccagagggaagcccccactcaacacccgctcccaggctccgcttctccgatgggtccttacactcagctttctggtggcgacagttgctgtagggctttatgccatgtgaatgcaggcatgctggctcccagggccatgaactttgtccggtggaaggccttctttctagagagggaattctcttggctggcttccttaccgtgggcactgaaggctttcagggcctccagccctctcactgtgtccctctctctggaaaggaggaaggagcctatggcatcttccccaacgaaaagcacatccaggcaatggcctaaacttcagagggggcgaaggggtcagccctgcccttcagcatcctcagttcctgcagcagagcctggaagacaccctaatgtggcagctgtctcaaacctccaaaagccctgagtttcaagtatccttgttgacacggccatgaccactttccccgtgggccatggcaatttttacacaaacctgaaaagatgttgtgtcttgtgtttttgtcttatttttgttggagccactctgttcctggctcagcctcaaatgcagtatttttgttgtgttctgttgtttttatagcagggttggggtggtttttgagccatgcgtgggtggggagggaggtgtttaacggcactgtggccttggtctaacttttgtgtgaaataataaacaacattgtctg

SEQ ID NO: 2818 - DNA, 2272 bp, Homo sapiens
gaagcgactctgagtcccgggctcggagcgcaggctcagctccgcgctgcgagcgctacgggcgcaggggcggggagccggcccggagcgcagtttccagtggggccggggtttcacccgggccctctctgtttgaaccgaacccgacaaatgggcgcatgacgatggagagcagggaaatggactgctatctccgtcgcctcaaacaggagctgatgtccatgaaggaggtgggtgatggcttacaggatcagatgaactgcatgatgggtgcactgcaagaactgaagctcctccaggtgcagacagcactggaacagctggagatctctggagggggtcctgtgccaggcagccctgaaggtcccaggacccagtgcgagcacccttgttgggagggtggcagaggtcctgccaggcccacagtctgttccccctccagtcaaccttctcttggcagcagcaccaagtttccatcccataggagtgtctgtggaagggatttagcccccttgcccaggacacagccacatcaaagctgtgctcagcaggggccagagcgagtggaaccggatgactggacctccacgttgatgtcccggggccggaatcgacagcctctggtgttaggggacaacgtttttgcagacctggtgggcaattggctagacttgccagaactggagaagggtggggagaagggtgagactgggggggcacgtgaacccaaaggagagaaaggccagccccaggagctgggccgcaggttcgccctgacagcaaacatctttaagaagttcttgcgtagtgtgcggcctgaccgtgaccggctgctgaaggagaagccaggctgggtgacacccatggtccctgagtcccgaaccggccgctcacagaaggtcaagaagcggagcctttccaagggctctggacatttccccttcccaggcaccggggagcacaggcgaggggagaatccccccacaagctgccccaaggccctggagcactcaccctcaggatttgatattaacacagctgtttgggtctgaatcctagagacagaaagttgactgagcctgaaagggccaggtcccagtgctgggcccctggggaggagggagggtgggcggtatggctctcgaaagcccaactccaagttcctttcccccagaaagcggggagaagccagagttcttggctcaggactgaagggaaggtggttgggagaggctgtcttgggggctagctggtggaggaggtaagagtagctggagagtgagctgtgcgtgtgtgtgtgtgtgtgtgcatgtgtgtgtctgtctggcatgcatgcactcactttggggctggaggtgacagtaggtgagggcagaggaggagatcagaaaatccctctgacatctccactgcccccaaagacctccgttgaacattctgtatggaaaagagccctggagcatcaggttccccagataggcccccaaataaagacctgtctatggctctcccaaccttctgtcagcttctttggcaagacattgctccaggcacagggactgaaccccaggcctcctgggactggagcagcagtgaggcaaaacccgacctgctagccctttctgccttggaggtttcagtccatacctggactctgagaaaatgagctgaataaggagtacagtgtgtaaggagcagccagggaagccctagacactccccgcgtctcccccatgcacaggggaaggatgttgacatagcactgggctgtttgaatgccttttcatctccatggtctcatttgaaagtgagcgaggcaggcaggcatgatcccattttccagataaggaaacaagcctagatatgctacatgtccaggaacaactgcagccaggaggcagaacagcctaggtctaactgcagagtagaagctggaccctggagttaccaacactcctccccaacagttcttagcgccccgcaggctgggcgctgtggctcacgcctgtaatcccagcactttgggagggcaaggcaggcggattacctggggtcaggagttcatgaccagcctggccaacatggtgaaaccccgtctctactaaaaaaatacgtaaaaattagccaggcgtggtggcacacgcctgtaaacccagctactcgggaggctgaggcaggagaattgcttgagcccgggagagggaggttgcagtgagccgagatcatgccactgcactccagcctggctgacagagcaagactcccctgtctc

SEQ ID NO: 2819 - DNA, 2154 bp, Homo sapiens
agggacgggagtcggaggctgagagactgcccagacacacaaaaaatgtggcctgaggaaagccccaagagggaggagaggaaagatgaggcaactgatgtccatgaaggaggtgggtgatggcttacaggatcagatgaactgcatgatgggtgcactgcaagaactgaagctcctccaggtgcagacagcactggaacagctggagatctctggagggggtcctgtgccaggcagccctgaaggtcccaggacccagtgcgagcacccttgttgggagggtggcagaggtcctgccaggcccacagtctgttccccctccagtcaaccttctcttggcagcagcaccaagtttccatcccataggagtgtctgtggaagggatttagcccccttgcccaggacacagccacatcaaagctgtgctcagcaggggccagagcgagtggaaccggatgactggacctccacgttgatgtcccggggccggaatcgacagcctctggtgttaggggacaacgtttttgcagacctggtgggcaattggctagacttgccagaactggagaagggtggggagaagggtgagactgggggggcacgtgaacccaaaggagagaaaggccagccccaggagctgggccgcaggttcgccctgacagcaaacatctttaagaagttcttgcgtagtgtgcggcctgaccgtgaccggctgctgaaggagaagccaggctgggtgacacccatggtccctgagtcccgaaccggccgctcacagaaggtcaagaagcggagcctttccaagggctctggacatttccccttcccaggcaccggggagcacaggcgaggggagaatccccccacaagctgccccaaggccctggagcactcaccctcaggatttgatattaacacagctgtttgggtctgaatcctagagacagaaagttgactgagcctgaaagggccaggtcccagtgctgggcccctggggaggagggagggtgggcggtatggctctcgaaagcccaactccaagttcctttcccccagaaagcggggagaagccagagttcttggctcaggactgaagggaaggtggttgggagaggctgtcttgggggctagctggtggaggaggtaagagtagctggagagtgagctgtgcgtgtgtgtgtgtgtgtgtgcatgtgtgtgtctgtctggcatgcatgcactcactttggggctggaggtgacagtaggtgagggcagaggaggagatcagaaaatccctctgacatctccactgcccccaaagacctccgttgaacattctgtatggaaaagagccctggagcatcaggttccccagataggcccccaaataaagacctgtctatggctctcccaaccttctgtcagcttctttggcaagacattgctccaggcacagggactgaaccccaggcctcctgggactggagcagcagtgaggcaaaacccgacctgctagccctttctgccttggaggtttcagtccatacctggactctgagaaaatgagctgaataaggagtacagtgtgtaaggagcagccagggaagccctagacactccccgcgtctcccccatgcacaggggaaggatgttgacatagcactgggctgtttgaatgccttttcatctccatggtctcatttgaaagtgagcgaggcaggcaggcatgatcccattttccagataaggaaacaagcctagatatgctacatgtccaggaacaactgcagccaggaggcagaacagcctaggtctaactgcagagtagaagctggaccctggagttaccaacactcctccccaacagttcttagcgccccgcaggctgggcgctgtggctcacgcctgtaatcccagcactttgggagggcaaggcaggcggattacctggggtcaggagttcatgaccagcctggccaacatggtgaaaccccgtctctactaaaaaaatacgtaaaaattagccaggcgtggtggcacacgcctgtaaacccagctactcgggaggctgaggcaggagaattgcttgagcccgggagagggaggttgcagtgagccgagatcatgccactgcactccagcctggctgacagagcaagactcccctgtctc

SEQ ID NO: 2820 - DNA, 3275 bp, Homo sapiens
agaccgtgtcccgcggggctgtcacctccgcctctgctccccgacccggccatgcgcggcctcgggctctggctgctgggcgcgatgatgctgcctgcgattgcccccagccggccctgggccctcatggagcagtatgaggtcgtgttgccgtggcgtctgccaggcccccgagtccgccgagctctgccctcccacttgggcctgcacccagagagggtgagctacgtccttggggccacagggcacaacttcaccctccacctgcggaagaacagggacctgctgggctccggctacacagagacctatacggctgccaatggctccgaggtgacggagcagcctcgcgggcaggaccactgcttctaccagggccacgtagaggggtacccggactcagccgccagcctcagcacctgtgccggcctcaggggtttcttccaggtggggtcagacctgcacctgatcgagcccctggatgaaggtggcgagggcggacggcacgccgtgtaccaggctgagcacctgctgcagacggccgggacctgcggggtcagcgacgacagcctgggcagcctcctgggaccccggacggcagccgtcttcaggcctcggcccggggactctctgccatcccgagagacccgctacgtggagctgtatgtggtcgtggacaatgcagagttccagatgctggggagcgaagcagccgtgcgtcatcgggtgctggaggtggtgaatcacgtggacaagctatatcagaaactcaacttccgtgtggtcctggtgggcctggagatttggaatagtcaggacaggttccacgtcagccccgaccccagtgtcacactggagaacctcctgacctggcaggcacggcaacggacacggcggcacctgcatgacaacgtacagctcatcacgggtgtcgacttcaccgggactaccgtggggtttgccagggtgtccgccatgtgctcccacagctcaggggctgtgaaccaggaccacagcaagaaccccgtgggcgtggcctgtaccatggcccatgagatgggccacaacctgggcatggaccatgatgagaacgtccagggctgccgctgccaggaacgcttcgaggccggccgctgcatcatggcgggcagcattggctccagtttccccaggatgttcagtgactgcagccaggcctacctggagagctttttggagcggccgcagtcggtgtgcctcgccaacgcccctgacctcagccacctggtgggcggccccgtgtgtgggaacctgtttgtggagcgtggggagcagtgcgactgcggcccccccgaggactgccggaaccgctgctgcaactctaccacctgccagctggctgagggggcccagtgtgcgcacggtacctgctgccaggagtgcaaggtgaagccggctggtgagctgtgccgtcccaagaaggacatgtgtgacctcgaggagttctgtgacggccggcaccctgagtgcccggaagacgccttccaggagaacggcacgccctgctccgggggctactgctacaacggggcctgtcccacactggcccagcagtgccaggccttctgggggccaggtgggcaggctgccgaggagtcctgcttctcctatgacatcctaccaggctgcaaggccagccggtacagggctgacatgtgtggcgttctgcagtgcaagggtgggcagcagcccctggggcgtgccatctgcatcgtggatgtgtgccacgcgctcaccacagaggatggcactgcgtatgaaccagtgcccgagggcacccggtgtggaccagagaaggtttgctggaaaggacgttgccaggacttacacgtttacagatccagcaactgctctgcccagtgccacaaccatggggtgtgcaaccacaagcaggagtgccactgccacgcgggctgggccccgccccactgcgcgaagctgctgactgaggtgcacgcagcgtccgggagcctccccgtcttcgtggtggtggttctggtgctcctggcagttgtgctggtcaccctggcaggcatcatcgtctaccgcaaagcccggagccgcatcctgagcaggaacgtggctcccaagaccacaatggggcgctccaaccccctgttccaccaggctgccagccgcgtgccggccaagggcggggctccagccccatccaggggcccccaagagctggtccccaccacccacccgggccagcccgcccgacacccggcctcctcggtggctctgaagaggccgccccctgctcctccggtcactgtgtccagcccacccttcccagttcctgtctacacccggcaggcaccaaagcaggtcatcaagccaacgttcgcacccccagtgcccccagtcaaacccggggctggtgcggccaaccctggtccagctgagggtgctgttggcccaaaggttgccctgaagccccccatccagaggaagcaaggagccgagctcccacagcaccctaggggggcacctgcgcctgtgtggaaatttggagaagttgcggcagagaagccatgcgttccagcattccacggtccagctagtgccgctcagccctagaccctgactttgcaggctcagctgctgttctaacctcaggaatgcatctacctgagaggctcctgctgtccacgccctcagccaattccttctccccgccttggccacgtgtagccccagctgtctgcaggcaccaggctgggatgagctgtgtgcttgcgggtgcgtgtgtgtgtacgtgtctccaggtggccgctggtctcccgctgtgttcaggaggccacatatacagcccctcccagccacacctgcccctgctctggggcctgctgagccggctgccctgggcacccggttccaggcagcacagacgtggggcatccccagaaagactccatcccaggaccaggttcccctgcgtgctcttcgagagggtgtcagtgagcagactgcaccccaagctcccgactccaggtcccctgatcttggggcctgtttcccatgggattcaagagggacagccccagctttgtgtgtgtttaagcttaggaatcgcctttatggaaagggctatgtgggagagtcagctatcttgtctggttttcttgagacctcagatgtgtgttcagcagggctgaaagcttttattctttaataatgagaaatgtatattttactaataaattattgaccgagttctgtaaaaaaaaaaa

SEQ ID NO: 2821 - DNA, 941 bp, Homo sapiens
gggggccgttggcgaagccagctgctggaggtgccgagaatctgagtttcggcaagcagccaggtctggaaactgtaacaggacattcagttagtaatgatggttgcaggttgaatagtctcgccctagatctcacctaacttgcagaatattttaaaaatgactacaccaaacaagacacctcctggtgctgaccccaagcagttggaaaggactggaacagtacgggaaattgggtcacaagctgtttggtcactctcatcttgcaaaccaggatttggagtggatcagttacgagatgacaatctagaaacttattggcaatcagatggttcccagcctcatttagtgaacatccaattcagaagaaaaacaacagtgaagacattatgtatttatgcagactacaaatctgatgaaagctatactccaagcaagatctcagtcagagtaggaaataattttcacaacctacaagaaattcggcaacttgagttggtggaaccaagtggctggattcatgttcccttaactgacaatcataagaagccaactcgttcattcatgatacagattgctgttctagccaatcacctgaatggaagagacacccatatgagacaaattaaaatatacacaccagtagaagagagctccattggtaaatttcctagatgtacaactatagatttcatgatgtatcgttcaataaggtgactttaaaatgagacgaaaatcattaaacgtatctttgttttatcctgtattcaaataatatatcatgtacctttattgaacaaggcatccgttatatctaattttgtatatgtttaaaaatattttattgtaactttgacaaataaatttggggtcatattatctttattttctttaacatgtaataaagctcacatattttacaaaaaaaaaaaaaaaaaaac

SEQ ID NO: 2822 - DNA, 1419 bp, Homo sapiens
gcgctcagtgcgcaggcgcgaagaagctggcaggggcacgagccgggggcgggtttgaagacgcgtcgttgggttttggaggccgtgaaacagccgtttgagtttggctgcgggtggagaacgtttgtcaggggcccggccaagaaggaggcccgcctgttacgatggtgtccatgagtttcaagcggaaccgcagtgaccggttctacagcacccggtgctgcggctgttgccatgtccgcaccgggacgatcatcctggggacctggtacatggtagtaaacctattgatggcaattttgctgactgtggaagtgactcatccaaactccatgccagctgtcaacattcagtatgaagtcatcggtaattactattcgtctgagagaatggctgataatgcctgtgttctttttgccgtctctgttcttatgtttataatcagttcaatgctggtttatggagcaatttcttatcaagtgggttggctgattccattcttctgttaccgactttttgacttcgtcctcagttgcctggttgctattagttctctcacctatttgccaagaatcaaagaatatctggatcaactacctgattttccctacaaagatgacctcctggccttggactccagctgcctcctgttcattgttcttgtgttctttgccttattcatcatttttaaggcttatctaattaactgtgtttggaactgctataaatacatcaacaaccgaaacgtgccggagattgctgtgtaccctgcctttgaagcacctcctcagtacgttttgccaacctatgaaatggccgtgaaaatgcctgaaaaagaaccaccacctccttacttacctgcctgaagaaattctgcctttgacaataaatcctataccagctttttgtttgtttatgttacagaatgctgcaattcagggctcttcaaacttgtttgatataaaatatgttgtcttttgtttaagcatttattttcaaacactaaggagctttttgacatctgttaaacgtctttttgtttttttgttaagtcttttacattttaatagtttttgaagacaatctaggttaagcaagagcaaagtgccattgtttgcctttaattggggggtgggaagggaaagagggtacttgccacatagtttcctttttaactgcactttctttatataatcgtttgcattttgttacttgctaccctgagtactttcaggaagactgacttaaatattcggggtgagtaagtagttgggtataagatctgaacttttcatctgcagaggcaagaaaaatatttgacattgtgacttgactgtggaagatgatggttgcatgtttctagtttgtatatgtttccatctttgtgataagatgatttaataaatctctttaaatact

SEQ ID NO: 2823 - DNA, 2470 bp, Homo sapiens
gaattcggcacgagccgggatcctgtgtagcggctgcagagggtgccgccgccctaggcgaagtagggccgtcctgagcgaaagaaccgcccccagcaggagcaccaccacggcttagcaaagaatcccagaccccgcccgggaaggcagccgcaccatggagtcttccagttcatctaactcttatttctccgttggcccaaccagtcccagcgctgtcgtgctcctctactcgaaggagctcaaaaagtgggatgagtttgaagatattttagaagagaggaggcatgtcagtgacttgaaatttgcaatgaaatgctacacacctcttgtctataagggaattactccatgtaaaccaattgatattaaatgtagtgttctcaattctgaggagattcattatgtcattaaacagctttccaaggaatcccttcaatctgtggatgtcctccgagaggaagtgagtgagatcttagatgaaatgagtcacaaactgcgtcttggagccattcggttttgtgccttcaccctgagcaaagtatttaaacaaattttctcgaaggtgtgtgtaaatgaagaaggtattcagaaactacaaagagccatccaggagcatcctgttgttctgctgcctagtcatcgaagttacattgacttcctcatgttgtcttttcttctatacaattatgatttgcctgtgccagttatagcagcaggaatggacttcctgggaatgaaaatggttggtgagctgctacgaatgtcgggtgcctttttcatgcggcgtacctttggtggcaataaactctactgggctgtattctctgaatatgtaaaaactatgttacggaatggttatgctcctgttgaatttttcctcgaagggacaagaagccgctctgccaagacattgactcctaaatttggtcttctgaatattgtgatggagccattttttaaaagagaagtttttgatacctaccttgtcccaattagtatcagttatgataagatcttggaagaaactctttatgtgtatgagcttctaggggttcctaaaccaaaagagtctacaactgggttgctgaaagccagaaagattctctctgaaaattttggaagcatccatgtgtactttggagatcctgtgtcacttcgatctttggcagctgggaggatgagtcggagctcatataacttggttccaagatacattcctcagaaacagtctgaggacatgcatgcctttgtcactgaagttgcctacaaaatggagcttctgcaaattgaaaacatggttttgagcccctggaccctaatagttgctgttctgcttcagaaccggccatccatggactttgatgctctggtggaaaagactttatggctaaaaggcttaacccaggcatttggagggtttctcatttggcctgataataaacctgctgaagaagttgtcccggccagcattcttctgcattccaacattgccagccttgtcaaagaccaggtgattctgaaagtggactccggagactcggaagtggtcgatgggcttatgctccagcacatcactctcctcatgtgctcagcttataggaaccagctgctcaacatttttgtgcgcccatccttagtagcagtagcattgcagatgacaccagggttcaggaaagaggatgtctacagttgctttcgcttcctacgtgatgtttttgcagatgagttcatcttccttccaggaaacacactaaaggactttgaagaaggctgttacctgctttgtaaaagtgaagccatacaagtgactacgaaagacatcctagttacagagaaaggaaatactgtgttagaatttttagtaggactctttaaaccttttgtggaaagctatcagataatttgcaagtaccttttgagtgaagaagaggaccacttcagtgaggaacagtacttggctgcagtcagaaaattcacaagtcagcttctcgatcaaggtacctctcaatgttatgatgtattatcttctgatgtgcagaaaaacgccttagcagcctgtgtgaggctcggagtagtggagaagaagaagataaataataactgtatatttaatgtgaatgaacctgccacaaccaaattagaagaaatgcttggttgtaagacaccaataggaaaaccagccactgcaaaactttaataatcaacaaatagttatggaaaattcggtcacgtaattactctcatcgaaggactcattacaacaaacagggaagtaaaggaagagacacatcctctcatactccctgagactctgagaacagtggacgcagagggaagagatgatcattggaagcaatcagtttactcttccccaccacagtggttaaaaggcgtttgtatctgacactatgtgtgtgttttaaaataaacttttggaaacatgaaaaaaaaaaaaaaaaaactcgag

SEQ ID NO: 2824 - DNA, 4816 bp, Homo sapiens
cgtcttcccggtctcctttcccggccgcacagggtagattttcgttccgtcacccaggctggagtgcagtggtgtgaccttggcttgctgcaaccctttgcctcctgggttcaagtgattctcattgcctcagcctcctaagtagctgggattacaggttttataggatcacattgacaaaagtaccatggagttttatgagtcagcatattttattgttcttattccttcaatagttattacagtaattttcctcttcttctggcttttcatgaaagaaacattatatgatgaagttcttgcaaaacagaaaagagaacaaaagcttattcctaccaaaacagataaaaagaaagcagaaaagaaaaagaataaaaagaaagaaatccagaatggaaacctccatgaatccgactctgagagtgtacctcgagactttaaattatcagatgctttggcagtagaagatgatcaagttgcacctgttccattgaatgtcgttgaaacttcaagtagtgttagggaaagaaaaaagaaggaaaagaaacaaaagcctgtgcttgaagagcaggtcatcaaagaaagtgacgcatcaaagattcctggcaaaaaagtagaacctgtcccagttactaaacagcccacccctccctctgaagcagctgcctcgaagaagaaaccagggcagaagaagtctaaaaatggaagcgatgaccaggataaaaaggtggaaactctcatggtaccatcaaaaaggcaagaagcattgcccctccaccaagagactaaacaagaaagtggatcagggaagaagaaagcttcatcaaagaaacaaaagacagaaaatgtcttcgtagatgaaccccttattcatgcaactacttatattcctttgatggataatgctgactcaagtcctgtggtagataagagagaggttattgatttgcttaaacctgaccaagtagaagggatccagaaatctgggactaaaaaactgaagaccgaaactgacaaagaaaatgctgaagtgaagtttaaagattttcttctgtccttgaagactatgatgttttctgaagatgaggctctttgtgttgtagacttgctaaaggagaagtctggtgtaatacaagatgctttaaagaagtcaagtaagggagaattgactacgcttatacatcagcttcaagaaaaggacaagttactcgctgctgtgaaggaagatgctgctgctacaaaggatcggtgtaagcagttaacccaggaaatgatgacagagaaagaaagaagcaatgtggttataacaaggatgaaagatcgaattggaacattagaaaaggaacataatgtatttcaaaacaaaatacatgtcagttatcaagagactcaacagatgcagatgaagtttcagcaagttcgtgagcagatggaggcagagatagctcacttgaagcaggaaaatggtatactgagagatgcagtcagcaacactacaaatcaactggaaagcaagcagtctgcagaactaaataaactacgccaggattatgctaggttggtgaatgagctgactgagaaaacaggaaagctacagcaagaggaagtccaaaagaagaatgctgagcaagcagctactcagttgaaggttcaactacaagaagctgagagaaggtgggaagaagttcagagctacatcaggaagagaacagcggaacatgaggcagcacagcaagatttacagagtaaatttgtggccaaagaaaatgaagtacagagtctgcatagtaagcttacagataccttggtatcaaaacaacagttggagcaaagactaatgcagttaatggaatcagagcagaaaagggtgaacaaagaagagtctctacaaatgcaggttcaggatattttggagcagaatgaggctttgaaagctcaaattcagcagttccattcccagatagcagcccagacctccgcttcagttctagcagaagaattacataaagtgattgcagaaaaggataagcagataaaacagactgaagattctttagcaagtgaacgtgatcgtttaacaagtaaagaagaggaacttaaggatatacagaatatgaatttcttattaaaagctgaagtgcagaaattacaggccctggcaaatgagcaggctgctgctgcacatgaattggagaagatgcaacaaagtgtttatgttaaagatgataaaataagattgctggaagagcaactacaacatgaaatttcaaacaaaatggaagaatttaagattctaaatgaccaaaacaaagcattaaaatcagaagttcagaagctacagactcttgtttctgaacagcctaataaggatgttgtggaacaaatggaaaaatgcattcaagaaaaagatgagaagttaaagactgtggaagaattacttgaaactggacttattcaggtggcaactaaagaagaggagctgaatgcaataagaacagaaaattcatctctgacaaaagaagttcaagacttaaaagctaagcaaaatgatcaggtttcttttgcctctctagttgaagaacttaagaaagtgatccatgagaaagatggaaagatcaagtctgtagaagagcttctggaggcagaacttctcaaagttgctaacaaggagaaaactgttcaggatttgaaacaggaaataaaggctctaaaagaagaaataggaaatgtccagcttgaaaaggctcaacagttatctatcacttccaaagttcaggagcttcagaacttattaaaaggaaaagaggaacagatgaataccatgaaggctgttttggaagagaaagagaaagacctagccaatacagggaagtggttacaggatcttcaagaagaaaatgaatctttaaaagcacatgttcaggaagtagcacaacataacttgaaagaggcctcttctgcatcacagtttgaagaacttgagattgtgttgaaagaaaaggaaaatgaattgaagaggttagaagccatgctaaaagagagggagagtgatctttctagcaaaacacagctgttacaggatgtacaagatgaaaacaaattgtttaagtcccaaattgagcagcttaaacaacaaaactaccaacaggcatcttcttttccccctcatgaagaattattaaaagtaatttcagaaagagagaaagaaataagtggtctctggaatgagttagattctttgaaggatgcagttgaacaccagaggaagaaaaacaatgaccttcgggagaaaaactgggaagcaatggaagcattggcatcaactgaaaaaatgctgcaggacaaagtgaacaagacttccaaggaaaggcagcaacaggtggaagctgttgagttggaggctaaagaagttctcaaaaaattatttccaaaggtgtctgtcccttctaatttgagttatggtgaatggttgcatggatttgaaaaaaaggcaaaagaatgtatggctggaacttcagggtcagaggaggttaaggttctagagcacaagttgaaagaagctgatgaaatgcacacattgttacagctagagtgtgaaaaatacaaatccgtccttgcagaaacagaaggaattttacagaagctacagagaagtgttgagcaagaagaaaataaatggaaagttaaggtcgatgaatcacacaagactattaaacagatgcagtcatcatttacatcttcagaacaagagctagagcgattaagaagcgaaaataaggatattgaaaatctgagaagagaacgagaacatttggaaatggaactagaaaaggcagagatggaacgatctacctatgttacagaagtcagagagctgaaagatctgttgactgaattgcagaaaaaacttgatgattcatattctgaagcagtaagacagaatgaagagctaaatttgttgaaggcacagttaaatgaaacactcacaaaacttagaactgaacaaaatgaaagacagaaggtagctggtgatttgcataaggctcaacagtcactggagcttatccagtcaaaaatagtaaaagctgctggagacactactgttattgaaaatagtgatgtttccccagaaacggagtcttctgagaaggagacaatgtctgtaagtctaaatcagactgtaacacagttacagcagttgcttcaggcggtaaaccaacagctcacaaaggagaaagagcactaccaggtgttagagtgatcatcctctggcctaccttgacacatgctctccttcaaaatgctaattcagagtgaagtaattgggaaactgttcatttgaggataaaaaaggcattgtattatattttgccaaattaaagccttatttatgttttcaccctttctactttgtcagaaacactgaacagagttttgtcttttctaatccttgttagactactgatttaaagaaggaaaaaaaaaagccaactctgtagacaccttcagagtttagttttataataaaaactgtttgaataattagacctttacattcctgaagataaacatgtaatcttttatcttattttgctcaataaaattgttcagaagatcaaagtggtaaagacaatgtaaaatttaacattttaatactgatgttgtacactgttttacttaacattttgggaagtaactgcctctgacttcaactcaagaaaacacttttttgttgctaatgtaatcggtttttgtaatggcgtcagcaaataaaaggatgcttattattcaaaaaaaaaaaaaaaaaaaaaaaaaa

SEQ ID NO: 2825 - DNA, 6518 bp, Homo sapiens
ggcacgcagaggccgtcacgtgggtcgccgaggctcgcaagtgcgcgtggccgtggcggctggtgtggggttgagtcagttgtgggacccggagctgctgacccagcgggtggcccaccgaaccggtgacacagcggcaggcgttagggctcgggagccgcgagcctggcctcgtcctagagctcggccgagccgtcgccgccgtcgtcccccgcccccagtcagcaaaccgccgccgcgggcgcgcccccgctctgcgctgtctctccgatggcgtccgcctcaggggccatggcgaagcacgagcagatcctggtcctcgatccgcccacagacctcaaattcaaaggccccttcacagatgtagtcactacaaatcttaaattgcgaaatccatcggatagaaaagtgtgtttcaaagtgaagactacagcacctcgccggtactgtgtgaggcccaacagtggaattattgacccagggtcaactgtgactgtttcagtaatgctacagccctttgactatgatccgaatgaaaagagtaaacacaagtttatggtacagacaatttttgctccaccaaacacttcagatatggaagctgtgtggaaagaggcaaaacctgatgaattaatggattccaaattgagatgcgtatttgaaatgcccaatgaaaatgataaattgggtataactccaccagggaatgctccgactgtcacttcaatgagcagcatcaacaacacagttgcaacacctgccagttatcacacgaaggatgaccccaggggactcagtgtgttgaaacaggagaaacagaagaatgatatggaacctagcaaagctgttccactgaatgcatctaagcaagatggacctatgccaaaaccacacagtgtttcacttaatgataccgaaacaaggaaactaatggaagagtgtaaaagacttcagggagaaatgatgaagctatcagaagaaaatcggcacctgagagatgaaggtttaaggctcagaaaggtagcacattcggataaacctggatcaacctcaactgcatccttcagagataatgtcaccagtcctcttccttcacttcttgttgtaattgcagccattttcattggattctttctagggaaattcatcttgtagagtgaagcatgcagagtgctgtttctttttttttttttctcttgaccagaaaaagatttgtttacctaccatttcattggtagtatggcccacggtgaccatttttttgtgtgtacagcgtcatataggctttgcctttaatgatctcttacggttagaaaacacaataaaaacaaactgttcggctactggacaggttgtatattaccagatcatcactagcagatgtcagttgcacattgagtcctttatgaaattcataaataaagaattgttctttctttgtggttttaataagagttcaagaattgttcagagtcttgtaaatgttattttaataatccctttaaattttatctgttgctgttacctcttgaaatatgatttatttagattgctaatcccactcattcaggaaatgccaagaggtattccttggggaaatggtgcctcttacagtgtaaatttttcctcctttacctttgctaatatcatggcagaatttttcttatcccttgtgaggcagttgttgactgagtttttcatccttacaatcctgtcccatggtatttaacataaaaaaaaataaaactgttaacagattcttgctcgatagcttgtttgtgtctgtcgtgttattagagggaactccactatatatggtcacttgaaattatgatgcaaaggtttctcttgcattgaaaccctcttggatattacagtatttttaattgaaagtcctaattctgttaaggaaaggagttgattaaattttaaggtaccactggtattttgggagattataatcagtttgttttcaagataatagaaaataaggtccatgagaatagaagttatgtgatttcagtgagttgatgtgtacagcatggctgtgctccatctgatttaccccattcttaagttctgagagtatgttctcaaggaagatttaactctctttggttttaaattactttttaaccagcctaataaataagtcttactacttttcataatatttcataatagttaaaagtaggtgtttttttcgtgctcaatttggcactcaaaataatgttcattatggaagtttggtaatactgagcaagcctgtggaattttctttatgaaaaatgattttagcctttgcaaatgttaaccatgtgaaacacattttcagtataagtatgcgttacagggtttgatactttcctgcacttaggtttgtcctattcttcatttattcatactaggatagaaaattttggaatcagaaaatagatccagtgtttagctacatacaatctagtacaagtgaatttttattcttaaacataggtgtgttggctctttttttaaaagatgcgctctacctgaaaaggaaattggattttagaactggatgtggtgcagtgaagtattttaggcccaggtctgtgtacacattttatagaagaatgaagtactctgaagtattttggttgccttttcatttcaactgtgttttgaatttgtcagatcacacatatattgtgttattgggcgctgtggtatcttttataaaacctcttgcttgtgtgcaaaagttcctaaaaggaaacacaagtaatgcctatccattactagcatgctatgctgcatgctttactgccattgctgtatgctttactgtctttgtaaaaatccccctctccccttttctggtaactggaaaagcatgctaaaaatagtcttatattttcaccccataaatgcagaatcagtaattccttggcttaaagctcttatataatcaatattattggtggtaaataccaagtttggtatctcatagctatctttttttaaagaaattaagttcttgaaaatttagccaaatcccgttttatgggaatgctctttagaattcattttgttcagcccctttgttctatggttgagaaatctgaggccttacgaaggttaagagaactttccccgtgtctcacaggtaggtagaggcagagctggaactagatatctggtctgttgactctagctcagtgtcttctggtaactgttgaaaattgtcttagtttgagagatggctgaaataatgaacataaaatgctatttataataacaagtatatgtgaaatttcttattgtaagactactaccggcttactgttgaatagtttggttatagtgtttaggctagaaatgcctcccacattggtaataaacattacaaaatacaatgtatttttaggtaggcattttataaaatgcattatgccatggttgcttttgagatagattgtagtctgggtagcatctttaaaatgtatgtgggcttaactgttgttcatatcaggagatgctctgattgtataggtgagactctgtttctgttatttttaattgctgtatgaaatgtgatcagattattttactaccaacagttatagtttgaaagtccaactgtattaattgactgataatatgataatatagagattaaattgtttgtcttcattccttatatgtttagaagtttttgctttgtctgcctgcttacttgtatatgtaagcatgagggaaatacactgttgctaatactgaaattacaatcaagtaactaaggccttgagttcatatgtgacactgaatgcactagcttccttcgttctataactaatgtaccttaacttcccccattcttatatttacaagaagctaagtcattatgttctgagtgtgtggtatgttcccttaaaaaaaaatgacacttggaagaaaaatgtatgaaattcagaaattccgatcaaagaaaagtaattctttctttttttttttgagacagagtcttgctttgttgcccaggctggagggcagtggtgtgatctcacctcactgcagcttccgcctcctgggttcaagtgattctcatggctcagccgcctgagtagctgggattacaggtgtgagccaacaagcccggctaatttttgtatttttagtagagacaaggtttcaccatgttggtcaggctgggctcaaactcctgaatccgcctgcctcggcctcccaaagtgctgggattacaggtgtgagctgccgcacccagccaagaaaaataatactcttaaatacttagatgttcacctaaagttgatattatttggtatgggaattacttttgaactgtaatctttcagattacaccactttgaaaacaagttttaacagtagggtaaaaatatagtttttgagggtattcccaacttgtgatcttctaccactttagagacattcaagtaatagttttcttagagctttgcacattcctattcactgagattttaaaaatttcacctttattcgagggaaggatcaatgcttattaccatttggaaaaacgaagatcagaaggtaaatgatctttattttctagctttaaagggaaattaaaccattcatgaataaactttaaaaatgtgaagtgtccttttccttttcacaatacaaaaaaaatttcaacagattgtgtggtttgtgcatttatatcctgttaagcattaatagctaatcactgggacttgaattctgatggcagatagtctcttgcttagtgagatggagttaactattttttagtaggaagtgagaacagctgattttcatgccacgtttcatagccccacttttggtagactaccaccacgcttcttcgcgtaagcagtggcatcttgggaatgaatgcccagccgctcgtgggttggtgcaaagaagtataaacatatatcactaaggaaaaagaaagtttgtcttgcccttctgacacagtgtgtgcacttcaggcaatttttggaaaatataaaaaattccaaattctgcctttcagcagcatcaattgctaggaacatttcattcatttccctgtaatattaatgttctttaagcataatcactaattataagttgtatcctatttttttccagcttaatttctgtggtttattgaaaaccaagtataaatgtgactaaaagcattttgctttgtttttatagttaactttcttaaggttatggacattttataatgtaacatttgattggcctggcctcttgacaattcccttctagttatgcatatcctcctgttgccacatttcttgttttaaaactcagtttcttgttttccagttgttgctatgtataacacccatcttgaaagagagtatataggaagttattcagataacttttgtagtagtgatattcaactatagcagtaccttaactcatgatgagcttaggaacataaaagataattgttgcttgaatagcacccccagagatactgacctaattggtctggggtggagatctggcatggtagtttttttcaagctccaatcatcggccagacagttgctttatgtaggtttttaaatgccaaaggcagatatgaagtagatttaattaagacttgacttcagcaatacaggggaacttaaaatacttatttttctttaaactgcaggagtcactgttaggtattgcttaaaaaaaattgcataaaagctttgcttgtcaagttaggattgctggaataccactaaagatttttgacttgtgaataaatgagctgtcatcgcaaaaaggcgatttgagaaatgtgggcttcagtattaattgccattttgctgacacccagtgtacctacctacctgagaaatttattttgtccatcatgtatttctcaaagcaaaaggtggttttcaagtataatgtcgttttcaacatgcttattacttagttttacgtcagctcatttcatcatcattgataacttgtgaaatacttatctccatcctatggaataggggagacgggtttagacaggttcaattagctcaagtctacacagctgaagtagcagagaaagtgggatctagatggtctgatcctagtgatctaccatatgaaggacatagtttgtgtcctggtccaagtcaaatattgactcctcacaaacagtaagtatggcaattttgtgatgcctttgattccactttacatggagtactattatttgtgaaatgtctttaagatttttggtcttaaatttttgaagactgctttccccctttatctcccagaaaattgagaagaagtaaactcctgcccactaacaatctcagtccgtgaacaaaaccaacatgaacattcctaaacaagagtgtgtgttactctaagaagaaggctatagaatttatggaaatggcttatgtaacctacaagactggagaacagaatgtgactggccttttctaatggtcctttaagatttaatgattaaagcaagagttttttat

SEQ ID NO: 2826 - DNA, 6383 bp, Homo sapiens
ggcacgcagaggccgtcacgtgggtcgccgaggctcgcaagtgcgcgtggccgtggcggctggtgtggggttgagtcagttgtgggacccggagctgctgacccagcgggtggcccaccgaaccggtgacacagcggcaggcgttagggctcgggagccgcgagcctggcctcgtcctagagctcggccgagccgtcgccgccgtcgtcccccgcccccagtcagcaaaccgccgccgcgggcgcgcccccgctctgcgctgtctctccgatggcgtccgcctcaggggccatggcgaagcacgagcagatcctggtcctcgatccgcccacagacctcaaattcaaaggccccttcacagatgtagtcactacaaatcttaaattgcgaaatccatcggatagaaaagtgtgtttcaaagtgaagactacagcacctcgccggtactgtgtgaggcccaacagtggaattattgacccagggtcaactgtgactgtttcagtaatgctacagccctttgactatgatccgaatgaaaagagtaaacacaagtttatggtacagacaatttttgctccaccaaacacttcagatatggaagctgtgtggaaagaggcaaaacctgatgaattaatggattccaaattgagatgcgtatttgaaatgcccaatgaaaatgataaattgaatgatatggaacctagcaaagctgttccactgaatgcatctaagcaagatggacctatgccaaaaccacacagtgtttcacttaatgataccgaaacaaggaaactaatggaagagtgtaaaagacttcagggagaaatgatgaagctatcagaagaaaatcggcacctgagagatgaaggtttaaggctcagaaaggtagcacattcggataaacctggatcaacctcaactgcatccttcagagataatgtcaccagtcctcttccttcacttcttgttgtaattgcagccattttcattggattctttctagggaaattcatcttgtagagtgaagcatgcagagtgctgtttctttttttttttttctcttgaccagaaaaagatttgtttacctaccatttcattggtagtatggcccacggtgaccatttttttgtgtgtacagcgtcatataggctttgcctttaatgatctcttacggttagaaaacacaataaaaacaaactgttcggctactggacaggttgtatattaccagatcatcactagcagatgtcagttgcacattgagtcctttatgaaattcataaataaagaattgttctttctttgtggttttaataagagttcaagaattgttcagagtcttgtaaatgttattttaataatccctttaaattttatctgttgctgttacctcttgaaatatgatttatttagattgctaatcccactcattcaggaaatgccaagaggtattccttggggaaatggtgcctcttacagtgtaaatttttcctcctttacctttgctaatatcatggcagaatttttcttatcccttgtgaggcagttgttgactgagtttttcatccttacaatcctgtcccatggtatttaacataaaaaaaaataaaactgttaacagattcttgctcgatagcttgtttgtgtctgtcgtgttattagagggaactccactatatatggtcacttgaaattatgatgcaaaggtttctcttgcattgaaaccctcttggatattacagtatttttaattgaaagtcctaattctgttaaggaaaggagttgattaaattttaaggtaccactggtattttgggagattataatcagtttgttttcaagataatagaaaataaggtccatgagaatagaagttatgtgatttcagtgagttgatgtgtacagcatggctgtgctccatctgatttaccccattcttaagttctgagagtatgttctcaaggaagatttaactctctttggttttaaattactttttaaccagcctaataaataagtcttactacttttcataatatttcataatagttaaaagtaggtgtttttttcgtgctcaatttggcactcaaaataatgttcattatggaagtttggtaatactgagcaagcctgtggaattttctttatgaaaaatgattttagcctttgcaaatgttaaccatgtgaaacacattttcagtataagtatgcgttacagggtttgatactttcctgcacttaggtttgtcctattcttcatttattcatactaggatagaaaattttggaatcagaaaatagatccagtgtttagctacatacaatctagtacaagtgaatttttattcttaaacataggtgtgttggctctttttttaaaagatgcgctctacctgaaaaggaaattggattttagaactggatgtggtgcagtgaagtattttaggcccaggtctgtgtacacattttatagaagaatgaagtactctgaagtattttggttgccttttcatttcaactgtgttttgaatttgtcagatcacacatatattgtgttattgggcgctgtggtatcttttataaaacctcttgcttgtgtgcaaaagttcctaaaaggaaacacaagtaatgcctatccattactagcatgctatgctgcatgctttactgccattgctgtatgctttactgtctttgtaaaaatccccctctccccttttctggtaactggaaaagcatgctaaaaatagtcttatattttcaccccataaatgcagaatcagtaattccttggcttaaagctcttatataatcaatattattggtggtaaataccaagtttggtatctcatagctatctttttttaaagaaattaagttcttgaaaatttagccaaatcccgttttatgggaatgctctttagaattcattttgttcagcccctttgttctatggttgagaaatctgaggccttacgaaggttaagagaactttccccgtgtctcacaggtaggtagaggcagagctggaactagatatctggtctgttgactctagctcagtgtcttctggtaactgttgaaaattgtcttagtttgagagatggctgaaataatgaacataaaatgctatttataataacaagtatatgtgaaatttcttattgtaagactactaccggcttactgttgaatagtttggttatagtgtttaggctagaaatgcctcccacattggtaataaacattacaaaatacaatgtatttttaggtaggcattttataaaatgcattatgccatggttgcttttgagatagattgtagtctgggtagcatctttaaaatgtatgtgggcttaactgttgttcatatcaggagatgctctgattgtataggtgagactctgtttctgttatttttaattgctgtatgaaatgtgatcagattattttactaccaacagttatagtttgaaagtccaactgtattaattgactgataatatgataatatagagattaaattgtttgtcttcattccttatatgtttagaagtttttgctttgtctgcctgcttacttgtatatgtaagcatgagggaaatacactgttgctaatactgaaattacaatcaagtaactaaggccttgagttcatatgtgacactgaatgcactagcttccttcgttctataactaatgtaccttaacttcccccattcttatatttacaagaagctaagtcattatgttctgagtgtgtggtatgttcccttaaaaaaaaatgacacttggaagaaaaatgtatgaaattcagaaattccgatcaaagaaaagtaattctttctttttttttttgagacagagtcttgctttgttgcccaggctggagggcagtggtgtgatctcacctcactgcagcttccgcctcctgggttcaagtgattctcatggctcagccgcctgagtagctgggattacaggtgtgagccaacaagcccggctaatttttgtatttttagtagagacaaggtttcaccatgttggtcaggctgggctcaaactcctgaatccgcctgcctcggcctcccaaagtgctgggattacaggtgtgagctgccgcacccagccaagaaaaataatactcttaaatacttagatgttcacctaaagttgatattatttggtatgggaattacttttgaactgtaatctttcagattacaccactttgaaaacaagttttaacagtagggtaaaaatatagtttttgagggtattcccaacttgtgatcttctaccactttagagacattcaagtaatagttttcttagagctttgcacattcctattcactgagattttaaaaatttcacctttattcgagggaaggatcaatgcttattaccatttggaaaaacgaagatcagaaggtaaatgatctttattttctagctttaaagggaaattaaaccattcatgaataaactttaaaaatgtgaagtgtccttttccttttcacaatacaaaaaaaatttcaacagattgtgtggtttgtgcatttatatcctgttaagcattaatagctaatcactgggacttgaattctgatggcagatagtctcttgcttagtgagatggagttaactattttttagtaggaagtgagaacagctgattttcatgccacgtttcatagccccacttttggtagactaccaccacgcttcttcgcgtaagcagtggcatcttgggaatgaatgcccagccgctcgtgggttggtgcaaagaagtataaacatatatcactaaggaaaaagaaagtttgtcttgcccttctgacacagtgtgtgcacttcaggcaatttttggaaaatataaaaaattccaaattctgcctttcagcagcatcaattgctaggaacatttcattcatttccctgtaatattaatgttctttaagcataatcactaattataagttgtatcctatttttttccagcttaatttctgtggtttattgaaaaccaagtataaatgtgactaaaagcattttgctttgtttttatagttaactttcttaaggttatggacattttataatgtaacatttgattggcctggcctcttgacaattcccttctagttatgcatatcctcctgttgccacatttcttgttttaaaactcagtttcttgttttccagttgttgctatgtataacacccatcttgaaagagagtatataggaagttattcagataacttttgtagtagtgatattcaactatagcagtaccttaactcatgatgagcttaggaacataaaagataattgttgcttgaatagcacccccagagatactgacctaattggtctggggtggagatctggcatggtagtttttttcaagctccaatcatcggccagacagttgctttatgtaggtttttaaatgccaaaggcagatatgaagtagatttaattaagacttgacttcagcaatacaggggaacttaaaatacttatttttctttaaactgcaggagtcactgttaggtattgcttaaaaaaaattgcataaaagctttgcttgtcaagttaggattgctggaataccactaaagatttttgacttgtgaataaatgagctgtcatcgcaaaaaggcgatttgagaaatgtgggcttcagtattaattgccattttgctgacacccagtgtacctacctacctgagaaatttattttgtccatcatgtatttctcaaagcaaaaggtggttttcaagtataatgtcgttttcaacatgcttattacttagttttacgtcagctcatttcatcatcattgataacttgtgaaatacttatctccatcctatggaataggggagacgggtttagacaggttcaattagctcaagtctacacagctgaagtagcagagaaagtgggatctagatggtctgatcctagtgatctaccatatgaaggacatagtttgtgtcctggtccaagtcaaatattgactcctcacaaacagtaagtatggcaattttgtgatgcctttgattccactttacatggagtactattatttgtgaaatgtctttaagatttttggtcttaaatttttgaagactgctttccccctttatctcccagaaaattgagaagaagtaaactcctgcccactaacaatctcagtccgtgaacaaaaccaacatgaacattcctaaacaagagtgtgtgttactctaagaagaaggctatagaatttatggaaatggcttatgtaacctacaagactggagaacagaatgtgactggccttttctaatggtcctttaagatttaatgattaaagcaagagttttttat

SEQ ID NO: 2827 - DNA, 2420 bp, Homo sapiens
tccggggcggcccccggcagccagcgcgacgttccaaaatcgaacctcagtggcggcgctcggaagcggaactctgccggggccgcgccggctacattgtttcctccccccgactccctcccgcccccttcccccgcctttcttccctccgcgacccgggccgtgcgtccgtccccctgcctctgcctggcggtccctcctcccctctccttgcacccatacctctttgtaccgcaccccctggggacccctgcgcccctcccctcccccctgaccgcatggaccgtcccgcaggccgctgatgccgcccgcggcgaggtggcccggaccgcagtgccccaagagagctctaatggtaccaagtgacaggttggctttactgtgactcggggacgccagagctcctgagaagatgtcagcaatacaggccgcctggccatccggtacagaatgtattgccaagtacaacttccacggcactgccgagcaggacctgcccttctgcaaaggagacgtgctcaccattgtggccgtcaccaaggaccccaactggtacaaagccaaaaacaaggtgggccgtgagggcatcatcccagccaactacgtccagaagcgggagggcgtgaaggcgggtaccaaactcagcctcatgccttggttccacggcaagatcacacgggagcaggctgagcggcttctgtacccgccggagacaggcctgttcctggtgcgggagagcaccaactaccccggagactacacgctgtgcgtgagctgcgacggcaaggtggagcactaccgcatcatgtaccatgccagcaagctcagcatcgacgaggaggtgtactttgagaacctcatgcagctggtggagcactacacctcagacgcagatggactctgtacgcgcctcattaaaccaaaggtcatggagggcacagtggcggcccaggatgagttctaccgcagcggctgggccctgaacatgaaggagctgaagctgctgcagaccatcgggaagggggagttcggagacgtgatgctgggcgattaccgagggaacaaagtcgccgtcaagtgcattaagaacgacgccactgcccaggccttcctggctgaagcctcagtcatgacgcaactgcggcatagcaacctggtgcagctcctgggcgtgatcgtggaggagaagggcgggctctacatcgtcactgagtacatggccaaggggagccttgtggactacctgcggtctaggggtcggtcagtgctgggcggagactgtctcctcaagttctcgctagatgtctgcgaggccatggaatacctggagggcaacaatttcgtgcatcgagacctggctgcccgcaatgtgctggtgtctgaggacaacgtggccaaggtcagcgactttggtctcaccaaggaggcgtccagcacccaggacacgggcaagctgccagtcaagtggacagcccctgaggccctgagagagaagaaattctccactaagtctgacgtgtggagtttcggaatccttctctgggaaatctactcctttgggcgagtgccttatccaagaattcccctgaaggacgtcgtccctcgggtggagaagggctacaagatggatgcccccgacggctgcccgcccgcagtctatgaagtcatgaagaactgctggcacctggacgccgccatgcggccctccttcctacagctccgagagcagcttgagcacatcaaaacccacgagctgcacctgtgacggctggcctccgcctgggtcatgggcctgtggggactgaacctggaagatcatggacctggtgcccctgctcactgggcccgagcctgaactgagccccagcgggctggcgggcctttttcctgcgtcccagcctgcacccctccggccccgtctctcttggacccacctgtggggcctggggagcccactgaggggccagggaggaaggaggccacggagcgggcggcagcgccccaccacgtcgggcttccctggcctcccgccactcgccttcttagagttttattcctttccttttttgagattttttttccgtgtgtttattttttattatttttcaagataaggagaaagaaagtacccagcaaatgggcattttacaagaagtacgaatcttatttttcctgtcctgcccgtgaggtgggggggaccgggcccctctctagggacccctcgccccagcctcattccccattctgtgtcccatgtcccgtgtctcctcggtcgccccgtgtttgcgcttgaccatgttgcactgtttgcatgcgcccgaggcagacgtctgtcaggggcttggatttcgtgtgccgctgccacccgcccacccgccttgtgagatggaatcgtaataaaccacgccatgaggaaaaaa

SEQ ID NO: 2828 - DNA, 1614 bp, Homo sapiens
ggtagttggttgtgggcactgggttagaggtatcacgtgggggcactttcgtcttagcttttggacaagacgcaggcgcaacccacggctgctgcggggatccttgtggcccttccggtcggtggaaccaatccgtgcacagagaagcggggcgaactgaggcgagtgaagtggactctgagggctaccgctaccgccactgctgcggcaggggcgtggagggcagagggccgcggaggccgcagttgcaaacatggctcagagcagagacggcggaaacccgttcgccgagcccagcgagcttgacaacccctttcaggacccagctgtgatccagcaccgacccagccggcagtatgccacgcttgacgtctacaacccttttgagacccgggagccaccaccagcctatgagcctccagcccctgccccattgcctccaccctcagctccctccttgcagccctcgagaaagctcagccccacagaacctaagaactatggctcatacagcactcaggcctcagctgcagcagccacagctgagctgctgaagaaacaggaggagctcaaccggaaggcagaggagttggaccgaagggagcgagagctgcagcatgctgccctggggggcacagctactcgacagaacaattggccccctctaccttctttttgtccagttcagccctgctttttccaggacatctccatggagatcccccaagaatttcagaagactgtatccaccatgtactacctctggatgtgcagcacgctggctcttctcctgaacttcctcgcctgcctggccagcttctgtgtggaaaccaacaatggcgcaggctttgggctttctatcctctgggtcctccttttcactccctgctcctttgtctgctggtaccgccccatgtataaggctttccggagtgacagttcattcaatttcttcgttttcttcttcattttcttcgtccaggatgtgctctttgtcctccaggccattggtatcccaggttggggattcagtggctggatctctgctctggtggtgccgaagggcaacacagcagtatccgtgctcatgctgctggtcgccctgctcttcactggcattgctgtgctaggaattgtcatgctgaaacggatccactccttataccgccgcacaggtgccagctttcagaaggcccagcaagaatttgctgctggtgtcttctccaaccctgcggtgcgaaccgcagctgccaatgcagccgctggggctgctgaaaatgccttccgggccccgtgacccctgactgggatgccctggccctgctacttgagggagctgacttagctcccgtccctaaggtctctgggacttggagagacatcactaactgatggctcctccgtagtgctcccaatcctatggccatgactgctgaacctgacaggcgtgtggggagttcactgtgacctagtccccccatcaggccacactgctgccacctctcacacgccccaacccagcttccctctgctgtgccacggctgttgcttcggttatttaaataaaaagaaagtggaactggaactgacaaaaaaaaaaaaaaaaaaaaaaaa

SEQ ID NO: 2829 - DNA, 1525 bp, Homo sapiens
ggtagttggttgtgggcactgggttagaggtatcacgtgggggcactttcgtcttagcttttggacaagacgcaggcgcaacccacggctgctgcggggatccttgtggcccttccggtcggtggaaccaatccgtgcacagagaagcggggcgaactgaggcgagtgaagtggactctgagggctaccgctaccgccactgctgcggcaggggcgtggagggcagagggccgcggaggccgcagttgcaaacatggctcagagcagagacggcggaaacccgttcgccgagcccagcgagcttgacaacccctttcagccaccaccagcctatgagcctccagcccctgccccattgcctccaccctcagctccctccttgcagccctcgagaaagctcagccccacagaacctaagaactatggctcatacagcactcaggcctcagctgcagcagccacagctgagctgctgaagaaacaggaggagctcaaccggaaggcagaggagttggaccgaagggagcgagagctgcagcatgctgccctggggggcacagctactcgacagaacaattggccccctctaccttctttttgtccagttcagccctgctttttccaggacatctccatggagatcccccaagaatttcagaagactgtatccaccatgtactacctctggatgtgcagcacgctggctcttctcctgaacttcctcgcctgcctggccagcttctgtgtggaaaccaacaatggcgcaggctttgggctttctatcctctgggtcctccttttcactccctgctcctttgtctgctggtaccgccccatgtataaggctttccggagtgacagttcattcaatttcttcgttttcttcttcattttcttcgtccaggatgtgctctttgtcctccaggccattggtatcccaggttggggattcagtggctggatctctgctctggtggtgccgaagggcaacacagcagtatccgtgctcatgctgctggtcgccctgctcttcactggcattgctgtgctaggaattgtcatgctgaaacggatccactccttataccgccgcacaggtgccagctttcagaaggcccagcaagaatttgctgctggtgtcttctccaaccctgcggtgcgaaccgcagctgccaatgcagccgctggggctgctgaaaatgccttccgggccccgtgacccctgactgggatgccctggccctgctacttgagggagctgacttagctcccgtccctaaggtctctgggacttggagagacatcactaactgatggctcctccgtagtgctcccaatcctatggccatgactgctgaacctgacaggcgtgtggggagttcactgtgacctagtccccccatcaggccacactgctgccacctctcacacgccccaacccagcttccctctgctgtgccacggctgttgcttcggttatttaaataaaaagaaagtggaactggaactgaaaaaaaaaaaaaaa

SEQ ID NO: 2830 - DNA, 1545 bp, Homo sapiens
gaagacaccaccggaagcaaggaaggtgctgtgtaatcattaaggagcggaggcttttggagctgctaaaatgccggattacctcggtgccgatcagcggaagaccaaagaggatgagaaggacgacaagcccatccgagctctggatgagggggatattgccttgttgaaaacttatggtcagagcacttactctaggcagatcaagcaagttgaagatgacattcagcaacttctcaagaaaattaatgagctcactggtattaaagaatctgacactggcctggccccaccagcactctgggatttggctgcagataagcagacactccagagtgaacagcctttacaggttgccaggtgtacaaagataatcaatgctgattcggaggacccaaaatacattatcaacgtaaagcagtttgccaagtttgtggtggaccttagtgatcaggtggcacctactgacattgaagaagggatgagagtgggcgtggatagaaataaatatcaaattcacattccattgcctcctaagattgacccaacagttaccatgatgcaggtggaagagaaacctgatgtcacatacagtgatgttggtggctgtaaggaacagattgagaaactgcgagaagtagttgaaaccccattacttcatccagagaggtttgtgaaccttggcattgagcctcccaagggcgtgctgctctttggtccacccggtacaggcaagacactctgtgcgcgggcagttgctaatcggactgatgcgtgcttcattcgagttattggatctgagcttgtacagaaatacgtcggtgagggggctcgaatggttcgtgaactctttgaaatggccagaacaaaaaaagcctgccttatcttctttgatgaaattgatgctattggaggggctcgttttgatgatggtgctggaggtgacaatgaagtgcagagaacaatgttggaactgatcaatcagcttgatggttttgatcctcgaggcaatattaaagtgctgatggccactaacagacctgatactttggatccagcactgatgaggccagggagattggatagaaaaattgaatttagcttgcccgatctagagggtcggacccacatatttaagattcacgctcgttcaatgagtgttgaaagagatatcagatttgaactgttagcacgactgtgtccaaatagcactggtgctgagattagaagcgtctgcacagaggctggtatgtttgccatcagagcacggcgaaaaattgctaccgagaaggatttcttggaagctgtaaataaggtcattaagtcttatgccaaattcagtgctactcctcgttacatgacatacaactgaaccctgaaggctttcaagtgaaaactttaaattggaatcctaaccttatatagacttgttaataaccaattcataaacaaataaatggcttcaaaattgtatgcttttttccatatctcttcttgtaatataataaaaggtgatttctaatgttaaaaaaaaaaaaaaaaaaa

SEQ ID NO: 2831 - DNA, 3453 bp, Homo sapiens
cacggtgcctgcacgggacgccgctcgatccccgagccccctcgccgtccccgacagcccccccggcgccatgcaatcccggcttctactcctcggggcacccggaggccacggcggcccggcctcgcggcgcatgcggctgctcctgcggcaggtggtgcagcgcaggccgggtggcgacaggcagcggccggaggtcagactgttgcacgccggctcgggggccgacacaggtgatacagttaatattggagatgtatcctacaagttgaaaattcctaagaatccagaacttgtgccacagaactacatttcagactctctggctcaatctgtagttcagcatctaagatggataatgcagaaggatcttttggggcaagatgtttttctaataggacctcctgggcctcttcgacgctctattgctatgcagtacttggagctgaccaaacgggaggtcgaatacattgccctgtcaagggacaccactgaaactgatctcaaacagcgacgagagatccgtgcaggcacagccttttacattgatcagtgtgcagttcgtgcagccacagaaggcagaactctcattttggaaggtttggaaaaggcagagaggaatgttttgcctgttttgaacaacttgctggaaaacagagagatgcagcttgaagatggacgcttcctgatgtctgctgagcgttacgacaaacttctccgagatcataccaaaaaagagttggattcttggaaaattgtccgagttagtgaaaatttccgagtgattgccttgggcttgccagtgccaaggtattctgggaatccattagacccccctcttcgttctcgatttcaagccagggatatttattatttacccttcaaggaccaacttaagttgttatattcaattggagccaatgtttctgctgagaaagtttctcagctcttgtcctttgccacaactctgtgttcccaagaatcttctactcttggacttccagactttcctttagatagtttagcagctgcggttcaaatcttggattcctttcctatgatgccaatcaaacatgcaatccagtggctttatccatatagtattttactaggtcatgaagggaagatggctgtggaaggtgttttaaagcgctttgaacttcaagattcaggaagctctctacttcctaaagagattgtaaaagtagagaagatgatggaaaaccatgtgtcccaagcttctgtgaccatccggattgcagataaagaggtgaccattaaggtgccagccgggaccaggctattaagtcaaccttgtgcgtcagaccgtttcatacagactttgagccataagcagctacaggctgaaatgatgcagtctcacatggttaaagatatatgtttaattggaggaaagggttgtggaaaaacagtgatcgctaagaactttgccgataccttaggatacaacatagaacctattatgctctatcaggatatgacagcgcgtgatctgctacagcagagatacacccttccaaatggagacactgcctggcggtcctcaccccttgtgaatgctgctctggaaggcaagctggtcctgctggatggcattcaccgggtgaatgcgggcacgcttgctgtattgcaaaggttaatccatgatcgagagctaagcctctatgatggttctaggctgctgagagaagacaggtatatgcgtttaaaggaggagctgcaactgtctgatgaacagctacagaagagatccatttttcctatccatccctccttcagaatcattgccttggcagaaccccctgttattggaagcacagcacaccagtggctgggaccagaattcttaaccatgttctttttccattacatgaaaccacttgtgaaaagtgaagaaatccaagtgattaaggaaaaggtcccaaatgtacctcaggaagctctggataagttattatcatttacacacaaactcagagaaacacaggatccaacggcacaatcattagcggcatcactttctaccagacaactgttgcgaatttctcgtcggctgtcacagtatcctaatgaaaatcttcacagtgctgttactaaagcctgcctttccaggtttttacccagtcttgctaggtcagcattagaaaaaaatctggcagatgctacaatagaaataaatactgatgacaatttggagccagaactgaaggattacaaatgtgaagtaacatctggaactctgaggattggtgctgttagtgcaccgatctataatgcacatgagaaaatgaaagtgcctgatgttcttttctatgacaacattcagcatgtgatagtgatggaagatatgctgaaagactttctccttggagaacacttattattggttggcaaccagggtgtaggaaaaaacaagattgttgacagattccttcacctgctcaacagaccccgagaatatattcagctacacagggataccacagtacaaactcttacgcttcagccttcggttaaagacggacttattgtatatgaagactcacctttggttaaagcagtaaagttgggtcatattctggtagtagatgaggctgacaaagctccaacaaatgtcacgtgtattttaaaaactctagtagaaaatggagaaatgattctagcagatggaagacgcattgttgcaaattctgctaatgtgaatggaagagaaaatgttgtagtgattcatcctgattttaggatgattgttctggcaaatagacctggatttcctttcctaggcaatgatttcttcggtaccttaggtgatatttttagctgccatgcagttgataaccccaaaccccactcggagctcgagatgctcagacagtatggaccaaatgtgcctgagcccatccttcagaagcttgtggctgcctttggagagctgaggagtttggctgaccaagggattattaactatccttattctaccagagaagttgtcaacatagtcaaacatttacagaaatttccgactgaaggtctctccagtgtagttcgaaatgtgtttgactttgattcctacaacaatgacatgagggagatattgattaacactttacacaaatacgggatacctatcggagcaaagcctaccagtgtgcagctggcaaaggagtaaggcaaattcagtactcttctgattcttaaatgctgatagttcttgatttatcattccattctacaaaactgagttgctatggaaattactttccatgagtaagcttttcaaatacatgtatatgttgctgtttgctggctgcttttcagttaaatagcattatttataggcctgtaaattgaaaattttgattattatgtatgtcccatgagtagatgtaataaataaagggaaatatttgtttctttaaaaaaaaaaaaaaa

SEQ ID NO: 2832 - DNA, 7169 bp, Homo sapiens
cacggtgcctgcacgggacgccgctcgatccccgagccccctcgccgtccccgacagcccccccggcgccatgcaatcccggcttctactcctcggggcacccggaggccacggcggcccggcctcgcggcgcatgcggctgctcctgcggcaggtggtgcagcgcaggccgggtggcgacaggcagcggccggaggtcagactgttgcacgccggctcgggggccgacacaggtgatacagttaatattggagatgtatcctacaagttgaaaattcctaagaatccagaacttgtgccacagaactacatttcagactctctggctcaatctgtagttcagcatctaagatggataatgcagaaggatcttttggggcaagatgtttttctaataggacctcctgggcctcttcgacgctctattgctatgcagtacttggagctgaccaaacgggaggtcgaatacattgccctgtcaagggacaccactgaaactgatctcaaacagcgacgagagatccgtgcaggcacagccttttacattgatcagtgtgcagttcgtgcagccacagaaggcagaactctcattttggaaggtttggaaaaggcagagaggaatgttttgcctgttttgaacaacttgctggaaaacagagagatgcagcttgaagatggacgcttcctgatgtctgctgagcgttacgacaaacttctccgagatcataccaaaaaagagttggattcttggaaaattgtccgagttagtgaaaatttccgagtgattgccttgggcttgccagtgccaaggtattctgggaatccattagacccccctcttcgttctcgatttcaagccagggatatttattatttacccttcaaggaccaacttaagttgttatattcaattggagccaatgtttctgctgagaaagtttctcagctcttgtcctttgccacaactctgtgttcccaagaatcttctactcttggacttccagactttcctttagatagtttagcagctgcggttcaaatcttggattcctttcctatgatgccaatcaaacatgcaatccagtggctttatccatatagtattttactaggtcatgaagggaagatggctgtggaaggtgttttaaagcgctttgaacttcaagattcaggaagctctctacttcctaaagagattgtaaaagtagagaagatgatggaaaaccatgtgtcccaagcttctgtgaccatccggattgcagataaagaggtgaccattaaggtgccagccgggaccaggctattaagtcaaccttgtgcgtcagaccgtttcatacagactttgagccataagcagctacaggctgaaatgatgcagtctcacatggttaaagatatatgtttaattggaggaaagggttgtggaaaaacagtgatcgctaagaactttgccgataccttaggatacaacatagaacctattatgctctatcaggatatgacagcgcgtgatctgctacagcagagatacacccttccaaatggagacactgcctggcggtcctcaccccttgtgaatgctgctctggaaggcaagctggtcctgctggatggcattcaccgggtgaatgcgggcacgcttgctgtattgcaaaggttaatccatgatcgagagctaagcctctatgatggttctaggctgctgagagaagacaggtatatgcgtttaaaggaggagctgcaactgtctgatgaacagctacagaagagatccatttttcctatccatccctccttcagaatcattgccttggcagaaccccctgttattggaagcacagcacaccagtggctgggaccagaattcttaaccatgttctttttccattacatgaaaccacttgtgaaaagtgaagaaatccaagtgattaaggaaaaggtcccaaatgtacctcaggaagctctggataagttattatcatttacacacaaactcagagaaacacaggatccaacggcacaatcattagcggcatcactttctaccagacaactgttgcgaatttctcgtcggctgtcacagtatcctaatgaaaatcttcacagtgctgttactaaagcctgcctttccaggtttttacccagtcttgctaggtcagcattagaaaaaaatctggcagatgctacaatagaaataaatactgatgacaatttggagccagaactgaaggattacaaatgtgaagtaacatctggaactctgaggattggtgctgttagtgcaccgatctataatgcacatgagaaaatgaaagtgcctgatgttcttttctatgacaacattcagcatgtgatagtgatggaagatatgctgaaagactttctccttggagaacacttattattggttggcaaccagggtgtaggaaaaaacaagattgttgacagattccttcacctgctcaacagaccccgagaatatattcagctacacagggataccacagtacaaactcttacgcttcagccttcggttaaagacggacttattgtatatgaagactcacctttggttaaagcagtaaagttgggtcatattctggtagtagatgaggctgacaaagctccaacaaatgtcacgtgtattttaaaaactctagtagaaaatggagaaatgattctagcagatggaagacgcattgttgcaaattctgctaatgtgaatggaagagaaaatgttgtagtgattcatcctgattttaggatgattgttctggcaaatagacctggatttcctttcctaggcaatgatttcttcggtaccttaggtgatatttttagctgccatgcagttgataaccccaaaccccactcggagctcgagatgctcagacagtatggaccaaatgtgcctgagcccatccttcagaagcttgtggctgcctttggagagctgaggagtttggctgaccaagggattattaactatccttattctaccagagaagttgtcaacatagtcaaacatttacagaaatttccgactgaaggtctctccagtgtagttcgaaatgtgtttgactttgattcctacaacaatgacatgagggagatattgattaacactttacacaaatacgggatacctatcggagcaaagcctaccagtgtgcagctggcaaaggagttgactctgccagaacaaacgttcatgggctactggacaattggtcaggcaagaagtgggatgcaaaaactcttgtgtccagtggaaactcatcatatagacataaagggtccagcacttataaatatacaggagtatccaatagaaagacatgaagaaagatccctaaactttactgaagaatgtgcctcatggagaataccattggatgaaattaatataatctgtgacattgctacatcacatgaaaatgagcaaaatactctctatgtagttacatgcaatcccgcttccctgtactttatgaatatgactgggaaaagtggcttctttgtggacttttttgatatcttcccaagaacagccaatggcgtttggcacccttttgtgacagtggcaccgctgggaagtcctctcaaaggtcaagtggttctccatgagcagcagagtaatgttatcctgttgttagatactactggccgggcccttcatcgtctcatcctcccttccgagaagtttacatctaagaaacctttctggtggaacaaagaagaagctgaaacttataaaatgtgtaaagaattttcacacaaaaactggctggtgttctacaaagaaaaagggaacagcctgactgtgctggatgttctagaagggcgaactcacaccatctcacttcccatcaacctcaagacagttttccttgtagcagaggacaaatggcttctggtggagagcaaaacaaatcagaaatatcttttaactaagcctgcacacatcgaatctgagggtagtggggtttgccagttgtatgtgctgaaagaggagccgcccagcacagggtttggagttacacaagaaacagagttcagcatacctcataaaatttccagtgatcaactatcatctgaacatctaagttcagctgtggaacaaaagattgcctctcccaacagaattctctcagatgagaaaaattatgctacaatagttgttggttttccagatctcatgtcacccagtgaagtttattcttggaagagaccatcatctttgcataaacgaagtggcactgatacatcattctatagaggaaagaagaaaagggggactccaaaacaaagcaattgtgtgactcttttagatacgaatcaggtagtgaggattttacccccaggagaagtccctctaaaagatatctacccaaaagatgttactcctccacaaacatctggttatatagaagtcactgatcttcaatcaaagaaactccgatatatccctattcccagatcagaatctctctcgccgtataccacatggctgtcgaccatttcagacacagatgcactgctggctgagtgggacaaaagcggtgttgttactgttgatatgggaggtcacatcaggctttgggaaactggacttgaacgtctgcagcgatcactcatggaatggagaaacatgattggacaagatgacagaaatatgcagataacaatcaacagagacagtggtgaagatgtaagctcccccaaacacgggaaggaggacccagacaacatgcctcacgtgggcggcaacacttgggctggcggaacagggggaagagacacggcaggcctgggtggcaaaggaggcccttaccggctggatgcaggccatacggtgtaccaggtctctcaggctgagaaagatgcagttcccgaagaggtcaagagagctgctagagagatgggccagagagcattccagcagaggctaaaggagatccaaatgagtgaatacgatgctgcaacctatgaaaggttttcaggtgctgttcggcgacaggtgcactccctccgaatcatcctggataatttacaggctaaaggtaaagaaagacaatggctaagacatcaagctactggagaattagatgatgccaagatcattgatgggctgactggagaaaaagccatctacaaacgtcggggtgagctggagccacaacttggcagcccacaacagaaacccaagcgtctgcgcctggtggtagatgtgtctggtagcatgtaccgtttcaacaggatggatggccggcttgagcgcacaatggaggctgtgtgtatggtcatggaagccttcgagaactatgaggagaagttccagtatgacatcgttggacactctggagatggctacaacattggtctggttccaatgaacaaaatccccaaggacaataagcaaagactagaaattctgaagacaatgcatgcccactctcagttctgcatgagtggggaccacacgttagaagggacagaacatgccatcaaggaaattgtcaaagaagaagctgatgagtactttgtcatagtcttgagtgatgcaaatctgtcacgatatggaatacatcctgctaagtttgctcaaatcctcacaagagaccctcaagtaaatgcttttgccatttttattggctctttaggtgatcaagcaaccaggcttcagagaactttaccagctggtcggtctttcgttgccatggataccaaggatatccctcagattttacaacagatcttcacctccaccatgttgtcgagtgtctaagaagtgcccttcatcaccctgatgacaccaggatttgaaataagacaggaataaagagtattctgaaaaaaagaagatatggatgaagtgaacccatgcagtgactggatgattccggcattcctgggtcttcctacacttgctccgtaatgagaattcagagaagcagccagaaggagacttaaacatggaaagatactccactgatgagtttagaagtgattagggcaagctagttgacctgcactttatcaaaggttggggttaaaggaaggtggttttgagaactatgtgtttggtctatttccaaaaacctgagggggagaaaatactttgcttttgccttaacacatcatctggtcacgttagaaaagtgaccccatcaaactgagcctttgatgtcacattctgacacaagatgcaagtctgtgcaaaacccaccaaaatgctcctatccaacaattatttttattttctccctgctctgtattgaccagaaaacaatgattttataatatttaacccaccaaaaagtccctccaacagcaatatcttatgaaaggctggctgttctcaataatttcattttcttggccaaagccaaaaggaatcaaaaaatccttggagtgcttgcctttccacgtgacttttaaaaggctcttaaagagcaaatgtcctcttctccttgctgctagagtgggaggagaaagatgtcttgccttaaaagtttactgtttcttctgttcttctagcatctctcaaaaaattcacagtactccattttggggtccaaactgtaatgctcaaaataataaatgcttacacgaaaattatttattgagaatattcatataaaaattacctaaagcaaagtaaaaaaagtaaaatcaaggtggtatatttgaagtgaatggtgattggaaatttttagctgtaacaaaaagaaagaaaacaactttttttaaagcctcattctcttttctttcaaaatgtaccttattcccacacactcttgggctgacctttattttatcaataagctcaatattactttgtttaaaataagatgcttcagcaaaagtcattctctctttaaccatataatttaaaaactcctcttcacgattgatagcaaaatcagaaacgttagggcaccagtgagttgaaaaaactggtcttaagttggaaaaactattattaataatattatcctatccatccatatctattgaaattgtacaggtccataatttcattttaattaattataggaaagaagaaaagataatacccatttgttctatcacccctctccctatcattaactatcaaataaataaataaaagcaatctgatttccaacgtggtactaaaaaaaaaa

SEQ ID NO: 2833 - DNA, 3860 bp, Homo sapiens
gtgaacgggcagaagcagggccatgcccaagccacccccaagatccccctgaacctgcacctccatcacgacccattcaggagcctccaggagcccagacaccagccccccaccatgggcagcaaggagcgcttccactggcagagccacaacgtgaagcagagcggcgtggatgacatggtgcttcttccccagatcaccgaagacgccattgccgccaacctccggaagcgcttcatggacgactacatcttcacctacatcggctctgtgctcatctctgtaaaccccttcaagcagatgccctacttcaccgaccgtgagatcgacctctatcagggcgcggcccagtatgagaatcccccgcacatctacgccctcacggacaacatgtaccggaacatgcttatcgactgtgagaaccagtgtgtcatcattagtggagagagtggagctgggaagacagtggcagccaaatatatcatgggctacatctccaaggtgtctggcggaggcgagaaggtccagcacgtcaaagatatcatcctgcagtccaacccgctgctcgaggccttcggcaacgccaagactgtgcgcaacaacaattccagccgctttggcaagtactttgagatccagttcagccgaggtggggagccagatgggggcaagatctccaacttcttgctggagaagtcccgcgtggtcatgcaaaatgaaaatgagaggaacttccacatctactaccagctgctggaaggggcctcccaggagcaaaggcagaacctgggcctcatgacaccggactactattactacctcaaccaatcggacacctaccaggtggacggcacggacgacagaagcgactttggtgagactctgagtgctatgcaggttattgggatcccgcccagcatccagcagctggtcctgcagctcgtggcggggatcttgcacctggggaacatcagtttctgtgaagacgggaattacgcccgagtggagagtgtggacctcctggcctttcccgcctacctgctgggcattgacagcgggcgactgcaggagaagctgaccagccgcaagatggacagccgctggggcgggcgcagcgagtccatcaatgtgaccctcaacgtggagcaggcagcctacacccgtgatgccctggccaaggggctctatgcccgcctcttcgacttcctcgtggaggccatcaaccgtgctatgcagaaaccccaggaagagtacagcatcggtgtgctggacatttacggcttcgagatcttccagaaaaatggcttcgagcagttttgcatcaacttcgtcaatgagaagctgcagcaaatctttatcgaacttaccctgaaggccgagcaggaggagtatgtgcaggaaggcatccgctggactccaatccagtacttcaacaacaaggtcgtctgtgacctcatcgaaaacaagctgagccccccaggcatcatgagcgtcttggacgacgtgtgcgccaccatgcacgccacgggcgggggagcagaccagacactgctgcagaagctgcaggcggctgtggggacccacgagcatttcaacagctggagcgccggcttcgtcatccaccactacgctggcaaggtctcctacgacgtcagcggcttctgcgagaggaaccgagacgttctcttctccgacctcatagagctgatgcagaccagtgagcaggccttcctccggatgctcttccccgagaagctggatggagacaagaaggggcgccccagcaccgccggctccaagatcaagaaacaagccaacgacctggtggccacactgatgaggtgcacaccccactacatccgctgcatcaaacccaacgagaccaagaggccccgagactgggaggagaacagagtcaagcaccaggtggaatacctgggcctgaaggagaacatcagggtgcgcagagccggcttcgcctaccgccgccagttcgccaaattcctgcagaggtatgccattctgacccccgagacgtggccgcggtggcgtggggacgaacgccagggcgtccagcacctgcttcgggcggtcaacatggagcccgaccagtaccagatggggagcaccaaggtctttgtcaagaacccagagtcgcttttcctcctggaggaggtgcgagagcgaaagttcgatggctttgcccgaaccatccagaaggcctggcggcgccacgtggctgtccggaagtacgaggagatgcgggaggaagcttccaacatcctgctgaacaagaaggagcggaggcgcaacagcatcaatcggaacttcgtcggggactacctggggctggaggagcggcccgagctgcgtcagttcctgggcaagagggagcgggtggacttcgccgattcggtcaccaagtacgaccgccgcttcaagcccatcaagcgggacttgatcctgacgcccaagtgtgtgtatgtgattgggcgagagaaagtgaagaagggacctgagaagggccaggtgtgtgaagtcttgaagaagaaagtggacatccaggctctgcggggagtctccctcagcacgcgacaggacgacttcttcatcctccaagaggatgccgccgacagcttcctggagagcgtcttcaagaccgagtttgtcagccttctgtgcaagcgcttcgaggaggcgacgcggaggcccctgcccctcaccttcagcgacacactacagtttcgggtgaagaaggagggctggggcggtggcggcacccgcagcgtcaccttctcccgcggcttcggcgacttggcagtgctcaaggttggcggtcggaccctcacggtcagcgtgggcgatgggctgcccaagagctccaagcctacgcggaagggaatggccaagggaaaacctcggaggtcgtcccaagcccctacccgggcggcccctgcgccccccagaggcatggatcgcaatggggtgcccccctctgccagagggggccccctgcccctggagatcatgtctggagggggcacccacaggcctccccggggccctccgtccacatccctgggagccagcagacgaccccgggcacgtccgccctcagagcacaacacagaattcctcaacgtgcctgaccagggcatggccggcatgcagaggaagcgcagcgtggggcaacggccagtgcctggtgtgggccgacccaagccccagcctcggacacatggtcccaggtgccgggccctataccagtacgtgggccaagatgtggacgagctgagcttcaacgtgaacgaggtcattgagatcctcatggaagatccctcgggctggtggaagggccggcttcacggccaggagggccttttcccaggaaactacgtggagaagatctgagctgggccctgggatactgccttctctttcgcccgcctatctgcctgccggcctggtggggagccaggccctgccaatgagagcctcgtttacctgggctgcaatagcctaaaagtccagtcctttggcctccagtcctgcccaggccctgggtcaccaggtcactgctgcagcccccgcccctgggccctggtcttcctccaacatcacacctgctgcccattctccatttctgtgtgtgtcaaaggggactaacagcagaatctacctcccaactgccatgtgattaagaaatgggtcttgagtcctgtgctgttggcaaagtgccaggcacagttggggaggggggggtccttaacaagcgtgactttgctcattctgtcatcactaaggcaataaacctttgccaggtgaaaaaaaaaaaaaaaaaaaaaaaaaaaaaaaaaaaa

SEQ ID NO: 2834 - DNA, 2769 bp, Homo sapiens
gcagagctgcgcgcgcactcgggaaaggggggaagggagcagggtccaggcagggggggttaggccccctgatccccctcgttaccccgactggcacggaataaggggaggaaatgatcgagatggcggcggagaaggagccgtttctggtgccggccccgccgccgccgctcaaagatgagtcgggcggagggggcggccccacggtgccaccgcaccaagaggccgcctctggggagctccgcggcgggacggagcgtggtccgggtcgttgcgcgccatctgcggggtccccagccgctgcggtcggtcgggaaagccccggggccgcggccacctcctccagtggtccccaggcgcagcagcaccgagggggcggcccccaggcgcagtcgcatggggaggcccgcctgtcggatcccccggggcgagccgctcccccggacgtgggggaggagcgccggggagggggcgggacagagctgggtccccctgctcctcctcgaccccgcaatggctatcagccccaccggccacctggggggggcgggggcaagaggagaaatagctgtaatgtagggggaggcgggggaggcttcaaacatccggccttcaagaggcgcaggcgggtgaattcggactgtgactctgtgttaccctccaacttcctcctggggggcaatatctttgatcccctgaacctgaatagcctcctggatgaggaagtgagccgcactctcaacgcggagacccctaagtcatccccccttccggccaaagggcgagatccggtggagatcctcatccccaaagatattactgacccgctcagtctcaatacttgcactgatgagggccatgtagttcttgcttcgccactcaagactggtcggaagcggcatagacaccggggacagcaccaccagcagcagcaggcagccggagggagtgagagtcaccccgtgccgcccacagcccctctcacccccttactccacggggagggcgcctcacagcagccgcggcacaggggccagaaccgggatgccccccaaccctatgaactcaacacagccatcaactgcagggatgaagtggtgtctccccttccatctgctctgcagggtccctcaggctccctatcagcccctccagctgcctcagttatctctgcacccccatcttcctcctcccgacatcgcaaacgtcgcaggacttccagcaagtcggaggcaggggctaggggtggaggccagggttccaaggaaaagggccgagggagttggggaggccgccaccaccaccaccacccactgcctgcagcaggcttcaaaaagcaacagcgcaagttccagtatgggaattattgcaaatactatgggtaccgcaatccttcctgtgaggatgggcgccttcgggtgttgaagcctgagtggtttcggggccgggacgtcctagatctgggctgcaatgtgggccatctgaccctgagcattgcctgcaagtggggcccgtcccgcatggtgggcctggatatcgattcccggctcatccattctgcccgccaaaacatccgacactacctttccgaggagctgcgtctcccaccccagactttggaaggggacccgggggcagagggtgaggaagggaccaccaccgttcgaaagaggagctgcttcccagcctcgctgactgccagccggggtcccatcgctgccccccaagtgcccttggatggagcggacacatcagtcttccccaacaatgttgtcttcgtcacgggtaattatgtgctggatcgagatgacctggtggaggcccaaacacctgagtatgatgtggtgctctgcctcagcctcaccaagtgggtgcatctgaactggggagacgagggcctgaagcgcatgtttcgccggatctaccggcacctacgccctgggggcatcctggtcctagagccccaaccctggtcgtcgtatggcaagagaaagactcttacagaaacgatctacaagaactactaccgaatccaattgaagccagagcagttcagttcctacctgacatccccagacgtgggcttctccagctatgagcttgtggccacaccccacaacacctctaaaggcttccagcgtcctgtgtacctgttccacaaggcccgatcccccagccactaagtggccccctaaacagaaagtgtgaagaggctgccctcgctgctcataaggacctgggggaagaggaaagtgtcccaaggtctttcctttctgactccaaaaatagtttcctttcttggatctgcaaagaaagcttttcttccgtcgctgcctcagcctcctccctatgcctctggcacctgcgcagcaaggctggctgtgctggagtcaccatcatcttcctctcccccagcctcccaggctggatggcatggactgtttgctgacctctgttctcttagggcatgggaggtgggaggatatcaaattctctagccctttcctcctattctcccaaggagagagattcccatttctcctcggccattgtacctagctcttgtccctagctgcatttcagtggaccatggatagagggactgagggttagacggggaagactggcagggaggcacgcaggtactgtgaaaatccttccctttgccctcccccagtgggagagggggttgggttttcaatgtgagaacagcacaataaacttgatgtctagggcagtggcccccaaaaaaaaaaaaaaaaaaaaaaa

SEQ ID NO: 2835 - DNA, 2013 bp, Homo sapiens
agttccggcatcgcgcctggtggcggagttctgccgagtggggcgccgcggccgctattgtcccgccccctgctccgcaagattcgagcctgagcggcctgggcgtctcgagaggtgagagagttggcggcgaggtctcggcggctaagcgagcgtcggcgactgtctctccgcgagaggaggcaagttggggtccaggctccaaagccggtggccgcgtaccgcggtggagccgctgtctttgaggtctgaggagagaacagacagagtctagctctttcacccaggctggagtgaagtggtgcaatctcagctcagtgcaacctccgccccctgggttcaagtgattctcctgcctcagcctccccagtagctgggattacagtgatatcctgagagaagatgggaaagggctgcaaggttgtggtttgtggattgttatctgtggggaaaactgcaattttggagcagctcctttatggaaatcatactattggaatggaagattgcgaaacaatggaagatgtatacatggcttcagtagaaacagaccgaggagtaaaagaacagttacatctttatgacaccagaggtctacaggaaggcgtggagctgccaaagcattatttttcatttgctgatggcttcgttcttgtgtacagtgtgaataaccttgaatcctttcaaagagtggagcttctgaagaaagaaatcgataagttcaaagacaaaaaagaggtagcaattgtggtattaggaaacaaaatcgacctttctgagcagagacaagtggacgctgaagtggcacagcagtgggcaaaaagtgagaaagtaagactgtgggaggtgactgttacagatcggaaaactctgattgaaccattcactttattagccagtaaactttctcaaccccagagcaaatcaagctttcctttgcctgggaggaaaaacaaagggaactctaattctgagaactaaaaatcagtaatttccacaattgtatgttgaatagtgattgcctttaagtgtctgtgaacatggagtaatattactatttaaaataggccatttgtatctacctttggtccttaggaaaattcctaaggaagtcaattaatgcactttagatgttaaaagtatttgggctaaggttattattgcctgatatgaaataatatattcttattctcattgtttgaaacctgtctttgaaattagcacctttgttatttatgttgtacttgtgaaaacagtaaaatagtttggatagttatgcaaatgcacctatgtgtaacttccccccaaccccaagctgtttcggaagatatcataatcattctgtgtaacattatgcaaacttctaagcccaaacatgactttgtttttaaaaagttcattaatctaatgtctaggattataaaacatttttttgtgtctaaattggacccaaaacattgaacagtttggggtagtaagctaaatttcatcttgtggagattttgctaaacagactaagacccatgatttagctttgctcaaattagaatgtttagcatgagttgaggtaccaggtagtgttaagtaggttcatcacgctctaaggccgttttttccttagccagacccctgttgatagaccagatacttgagggcaaactgtttgctcctcctcttgaaaatgattaggcacttaaggacagtaaagctgtattttctggaaggaagactgtatcttctggaatagttttctagaaaactagtcatatacaataaaagtatcaaaaatattgggctctaatttgatctgacttagatgtctgagtttgtgttgtttctctaaagattttggcaagactcaagcaatgtggctgactgtaactttattaatttaaaaggtaggaagtaagctacttagtggtttcacctgtgaaataactattttgactgaaatgtaaaataagctattcaacaaagaacatattaaaacatcaaaaaaaaaaaaaaaaaaaa

SEQ ID NO: 2836 - DNA, 9630 bp, Homo sapiens
gaaggctggagcgcggcggtgattttgtgccagggattcccagagacgcgctgaaaggctggcagggcttaggaagctggggggttagggacacacattcaagcccccacccccgggaggggaagggggctggaggcgaggcttgagggcggcggaggaatggtgtctgctcggggggaaggggcgagccctgcctgttggtactgaggggctgcgggcagtggaggctccgcgggtcgaaagcggctccatgcccatcggtgggtggaacgtgtagaggtcggaacgccgaggtcgagtctggtggcgcctcggtatccttaacgtggtctctgtttaacgtatttcatttagcccccgttgggattgattcattgggagcagtttcgctggtctggatcctccaggagctggacaaccttgacgggctttttgtcttgggttccagccccctttcccttcctcctcctccagatgccttttctctgcccctcctcgcccggtacagacatttccagcgcaggctgctgctcgtggtgtccgtcgtcgaagccacttcttgggatttcggctcgtttcactctggggtgttttttgaggagggagagtgcccccctcctccacgatgggatttttctcccttgccgaaatggactttcattgatttctacttacttccacgtttagtgaccaattccctaggcgtatttttgtggtagttccttttttcaaatacatactctgtaaaatggagaacgaaatttttactccccttctggagcagttcatgaccagccctttggtcacttgggttaaaacgtttggacctctggccgcaggaaatgggaccaaccttgatgaatatgtggctttggtggatggggtattcttgaaccaggtcatgctccaaattaatcctaaattggagagtcagagagtaaataaaaaagtcaataatgatgcctcacttagaatgcacaatctatccattttggtgagacagataaaattttattaccaggagactttgcagcaattgatcatgatgtcgttgccaaatgtcttaatcattggcaaaaatcccttttctgaacaaggcacagaagaagttaaaaaactgcttttacttttattgggttgtgcagttcagtgtcagaaaaaagaggaatttattgaaagaattcaaggtttagattttgatacaaaagcagcggttgccgcacatattcaagaggtaactcataatcaggaaaatgtgtttgacctgcaatggatggaagtgactgatatgtcgcaggaggacatagaaccactcttgaaaaatatggcattgcatctaaaaagacttatagatgagagagatgaacattcagagactatcatagaactctctgaagagcgggatggtctccattttctaccccatgcctcttcatctgcacagtcaccctgtggttctccaggcatgaagcgaacagaaagtcgacaacatctgtcggtggaactggcagatgctaaagccaagataagaaggcttaggcaggaattggaggaaaagactgagcagttgttggattgtaaacaagaacttgagcaaatggaaatagaactcaaaaggctgcaacaagagaacatgaatttgctttcggatgctcgctctgccagaatgtaccgagatgaattagatgcacttcgagagaaagcagtcagagtcgataagcttgaaagtgaagtcagcagatataaagagagactacatgatattgaattttataaggcaagagttgaggaattaaaagaagacaatcaagttttattagaaacaaaaaccatgttggaagaccaactagagggaactcgtgctcgttctgataaattacatgaattagaaaaagagaacttacaactgaaagctaaacttcatgatatggaaatggaacgagatatggatagaaaaaagattgaagaattaatggaagaaaatatgactttggaaatggcacagaaacaaagtatggatgaatcattacatcttggctgggaactggaacagatatccagaactagtgaactttccgaagcaccccagaaatccctgggccatgaggtgaatgagttgacatcaagtagattattgaagctagagatggaaaatcaaagtttgacaaaaaccgtagaagagcttcggactactgtggattctgtagaaggcaatgcttccaaaatcctgaaaatggaaaaagaaaatcaaaggctcagtaaaaaggttgagattcttgaaaatgagattgttcaagaaaagcaaagtcttcagaattgtcagaatttaagcaaggatctaatgaaggagaaagctcagcttgaaaaaacaatagaaacactgagagaaaattcagagagacagattaagatactggaacaggaaaatgaacatctgaatcaaacagtgtcttccttaaggcagcggtcccagataagtgcagaagcaagagtgaaagacattgaaaaagaaaacaaaattcttcatgaatctatcaaagaaacaagtagcaagctaagcaagattgaatttgaaaaaagacaaattaaaaaagaattggaacattataaagaaaaaggagaacgagctgaagaacttgaaaatgaattgcatcatcttgaaaaagaaaatgaattattacagaaaaaaataactaatttaaaaattacttgtgaaaaaattgaggccttagaacaagaaaattcagagctagaaagagaaaatagaaaattaaaaaaaacattggatagctttaaaaatctgacctttcagttagaatccctagaaaaagagaattcccaacttgatgaggaaaacttagaactgcgaaggaatgtagaatctttgaagtgtgcaagcatgaaaatggctcagctacagctagaaaacaaagaactggaaagtgaaaaagagcaacttaagaagggtttggagctcctgaaagcatctttcaagaaaacagaacgcttagaagttagctaccagggtttagatatagaaaatcaaagactgcaaaaaactttagagaacagcaataaaaaaatccagcaattagagagtgaactacaagacttagagatggaaaatcaaacattgcagaaaaacctagaagaactaaaaatatctagcaaaagactagaacagctggaaaaagaaaataaatcattagagcaagagacttctcaactggaaaaggataagaaacaattggagaaggaaaataagagactccgacaacaagcagaaattaaagataccacattagaagaaaataatgtgaagattggaaatttggaaaaagaaaacaaaaccctatccaaagaaattggtatatataaagaatcttgtgtccgtctgaaagaactagaaaaagaaaataaggagcttgtgaaaagagcaactattgatataaaaacgttggttacactacgtgaggatttggtgagtgaaaagttgaagacccaacagatgaacaatgatctcgaaaaattaactcatgagcttgagaagatagggttaaataaggagcgactcttacatgatgaacaaagtactgatgacagtaggtataaacttttggaatcaaaattagaatccactcttaagaagtctcttgaaataaaagaagaaaaaattgctgctttagaagctcgattagaagaatccacgaattataaccagcaattgcgccaagaacttaaaacagtgaaaaaaaattatgaagctctcaaacagagacaagatgaggaaaggatggtacagagctctcctccaatatctggtgaagacaacaaatgggagcgagaaagtcaagaaacgactagagaacttctgaaagttaaagacagattaattgaagtagaaagaaataatgctacactgcaagcagagaagcaagcgttgaaaactcaactgaagcaacttgagacacagaacaataatttgcaggctcagattcttgcacttcagaggcagacagtgtcattacaagaacagaataccactcttcaaacacagaatgccaagcttcaggttgaaaattccacccttaattcccaaagtacctcactcatgaaccagaatgcccaactcctaatccagcagtcttccttagaaaatgaaaatgaatctgtaatcaaagagcgagaagacctaaaatctctctatgattctctgatcaaagatcatgaaaagctggaacttcttcatgaacgtcaggcttcagagtatgaatctcttatctctaaacatggaactctgaagtctgcccacaaaaatcttgaggtggaacatagagaccttgaagaccgttacaatcagttattaaaacagaaaggacagttggaagatttggaaaaaatgctcaaagtagaacaggaaaaaatgctgcttgaaaataaaaatcatgaaacagtagctgcagaatacaagaaactttgtggtgaaaatgataggctgaatcatacctatagtcaacttttaaaagagactgaagttttacaaactgaccataaaaatttgaaaagtcttctgaataattccaaactggaacaaacaagattagaagctgaattttcaaaactaaaggaacaataccaacaattggatattacatcaaccaagctgaataaccagtgtgagttgctaagccaacttaaaggaaatttagaagaagaaaatcggcatctactagatcaaattcagacattaatgctacagaacagaacacttttggagcagaatatggaaagcaaggatctttttcatgttgaacaaagacagtacattgataagttaaatgaattaagacgtcagaaggagaaactagaagagaaaattatggatcaatacaaattttatgacccatctcctcctagaaggagaggcaactggattactctaaaaatgagaaaattgataaagtctaagaaagatattaatcgggaacgccagaaatctctaacattaacacccacccgctcagactccagtgaaggatttcttcagctccctcatcaagacagtcaagatagttcttcagtaggttcaaactctttagaagatggccagaccttggggaccaagaaaagcagcaccatgaatgacctggtgcagtccatggtcctagcaggacagtggacaggtagtactgagaatttggaggttcctgatgatatttcaacgggtaaaaggagaaaagaattgggagctatggccttctctactacagccatcaacttttcaactgtcaactcttctgcaggcttcagatccaagcagttggttaataataaagatactacatcctttgaagacataagtccacaaggtgttagtgatgattctagtacgggatcaagagttcatgcttcaagaccagccagccttgatagtggcagaacatccactagcaatagcaataataatgcttcactacatgaagtcaaagcaggtgcagttaataaccaaagcaggccacaaagccacagcagtggagaatttagcctgcttcatgaccatgaggcttggtccagcagtggtagcagtccaatccagtacttgaaaagacagaccagatcaagcccagtgctccagcacaaaatatctgaaacactggagagtcgacatcacaagatcaaaactggttcccctggaagtgaagttgttactctacaacagtttttggaagaaagcaataagcttacctcagtacagataaagtcctcaagtcaagagaatcttttagatgaagtaatgaaaagtttgtctgtctcttctgactttttgggaaaagacaaaccagttagctgtggtctggccaggtcagtaagtggaaaaaccccaggggacttctatgatagacggacaactaagcctgagtttttgagacctggtcctcgaaaaactgaagatacctacttcattagttctgcgggaaaacctacaccaggcactcaaggaaaaataaaattagtaaaagaatcttctctgtcacgacaatcaaaagatagtaacccttatgcaactttacctcgtgcaagcagcgtgatctcaactgccgaaggaactacacgaaggacaagcatccatgattttttgaccaaggacagtagactgcctatatcagttgattcaccaccagctgctgctgacagcaacaccactgcagcatctaatgtggacaaagtacaagaaagcagaaattcaaaaagcaggtctagggagcaacaaagctcctaattctattacccactacatgacatgtgggccaagtgagagaaaagtgtccttcagtttctcagtatgaagcctttatttctgaagtaacaagacacctagcaactataggaatcatttttaaaaatctttaaggagacttttaacagtccttcgtgaatagagcaggcaagaaatacaaaccttcattccttgaatcaaggagcactactggattcaactgccaaaattttttaaaggttttaggacttactataccttgtactgttaagatctactgaataaaggacgttctctcactaaggaccaggtgttttaaggttaagtgtttaaagaagtactccaagaacaatctgcttttttcatcatttgttttatgaatttatccatgtttgcttaatgcttctgctaagtgttagccaaaatctagccatttatatttagttgtgtaaacctaaattaaatgctgtagtattttgtggaatgtactatatagcaagatacagagaaaattgttttggcatgtcagagccttatttggttagcagactgcatgtgttgatactttttttttcttaaagccaattattttgatgcaaaagaaattcagtttataagataaatctgaaaaatccataatgaaataggagttataaaaaatttatagtgatattaatctttccatatttcccattaagcaacactaagcattcataagttaacccatggtaaagagtgtttttctgaaacttttttttagtaagatggtttttcagcaaatggcattcccaagataaagctgttgtgctttaactcatttcttttctttggtattgggttatgtatgcgtgtgcatttttttaacttgagagctgactgttgcttaagaagttttcttatggcaaaaataatgtaaataagttactatgatctgcattttgccagaaactcatttataattaaggctatcatttattaatgatttttttctcctttatgatattacattaaagttgataactgttattggtacttttgaaatatttgtatgcatttgttacctttaaacatttggaagaagcacaaaaaaatagatttagttaacccagggaaacatcaatttttttagtagttccaattttatatcacagttttattttcttatgaaatcaaaaaatgcattgatactcattaatgcaaattcattatttaacatcaatatcagagtaatcttcaaggtctgaaatgagaaacatactgactttttaaaattttaacagtgtacttcttaggctttcattaccagctctgaagaactttttggaataattccatattccatagtgtgtggtttatgagttgtgggtttcatcactaacccagtaaccataagaaaagtctctctctctctctctctctctttctctctccctctttctctctctctttcgtaggccagtagcaatgttgtgttcacagtctaatttccaaaagaccatcaataaaaaagagagcatgtttaaattgaaatggaacttagagaacttgagcttacttacgtacttcaatgccaccggtaacttaggttttaccaccaaatgctgttaacattaaatcattttgaaaatcttggatgaaaggtgctatgtaaatggaaatacaaaggattcttactaacatacaaaaataatgcacaacagaaatatctaaaaccttttccgtagactttgaaacatctctctctgtcataactccctggattcaagtagcacattggtaataggtatcagagcagtctagagacaattgcatgtcaaaaaatgtacattcatttttaggtggataaaagtaaacatagaaattatgttatggctaaatacagttagtgggtaacttagatttatattagctagcatctaatttgcacaactagaacacatcccagaacaattactgaaaagctgaaatttaatgggtggtgatgtagcccaatgagggcgaatgacattccagcttgacctctccagaacactaatatcctaaaatacagaacatgctgggttaagtgcattagtgcttcaagcagaaaatgctgaaaacaacgtgtaaagtactgaatctgagtaggctgaccctgagaagggacaattaaagagacaaccaagggaacacattgagactacaaaaatatgaataatctcaattatattcatcacacttttttcataccatttcaagaaacgactagacagtagtaaccacatgaatattttactttctccagtataccttgagaagcaaactttgtaggaagccactcttctcccctaaacaacttctgccaaacaataataaagccaactggaaacgaatcggagccattttcattttcctaaccggggcctgacatgctttaaattatctggctgtattctaaatcaacacctaacccctcaaggaaactgaagaatcaatatacagggtaatagctttggctcagagctccaataatgtgcttcagatctgtccatgtggaaatgctttcatccaaatttttaaattggtggttaccaaagagttcacaaaacaggtttgtatgtagcacctttcatgcaaggcatgcaaaaagcctattttaaaatcactgtgcatattatagagttgtagccacctcacaatgaagtactacagcctgtgctgtcttaatggtttatgtcaggaaatgaaaaagatactgtaccaaatctggaattacaatggggagtaataatgtatactaaatgacttttgtattttaagttactttttgtgagtggtgaatttttgtgtttttcttttcagctacacttagtcctgagatgtattttttctttaagtcttgaatgaatacaaaaggagcccattttataatataaaccttgatgtacatgttgagatatttggacaatgaaaatgccttaaaaggaatgcatatggataaagttgcacttataacacccttcaacaaaatctaattttaaattgtctttttcttttctattaagggttttctttttcagtgtctaccattgtacttataactgttattaaataccaaatcaaataataagctgtaacatttcctttaaaactaatgctaataagggatttagagttgaatggcaaaatgtttattacttggcaatacctgatgtcagtcacaggcatccaactcatgacaagagataccactgtttgttttttaaaaaacatttttcattttgtttctccttcaaaaattaagttggactaacattcacgtatcaaactaatataaaaagaaataaaaccaagaggtgatttttgtaacaaaa

SEQ ID NO: 2837 - DNA, 2473 bp, Homo sapiens
gcttgcgctgagcagcccgcgagggcggaagtgggagctgcgaccgcgctccctgtgaggtgggcaagcggcgaaatggcgccctccgggagtcttgcagttcccctggcagtcatggtgccgttgctttggggtgctccctggacgcacgggcggcggagcaacgttcgcgtcatcacggacgagaactggagagaactgctggaaggagactggatgatagaattttatgccccgtggtgccctgcttgtcaaaatcttcaaccggaatgggaaagttttgctgaatggggagaagatcttgaggttaatattgcgaaagtagatgtcacagagcagccaggactgagtggacggtttatcataaatgctcttcctactatttatcattgtaaagatggtgaatttaggcgctatcagggtccaaggactaagaaggacttcataaactttataagtgataaagagtggaagagtattgagcccgtttcatcatggtttggtccaggttctgttctgatgagtagtatgtcagcactctttcagctatctatgtggatcaggacgtgccataactactttattgaagaccttggattgccagtgtggggatcatatactgtttttgctttagcaactctgttttccggactgttattaggactctgtatgatatttgtggcagattgcctttgtccttcaaaaaggcgcagaccacagccatacccatacccttcaaaaaaattattatcagaatctgcacaacctttgaaaaaagtggaggaggaacaagaggcggatgaagaagatgtttcagaagaagaagctgaaagtaaagaaggaacaaacaaagactttccacagaatgccataagacaacgctctctgggtccatcattggccacagataaatcctagttaaattttatagttatcttaatattatgattttgataaaaacagaagattgatcattttgtttggtttgaagtgaactgtgacttttttgaatattgcagggttcagtctagattgtcattaaattgaagagtctacattcagaacataaaagcactaggtgtacaagtttgaaatatgatttaagcacagtatgatggtttaaatagttctctaatttttgaaaaatcgtgccaagcaataagatttatgtatatttgtttaataataacctatttcaagtctgagttttgaaaatttacatttcccaagtattgcattattgaggtatttaagaagattattttagagaaaaatatttctcatttgatataatttttctctgtttcactgtgtgaaaaaaagaagatatttcccataaatgggaagtttgcccattgtctcaagaaatgtgtatttcagtgacaatttcgtggtctttttagaggtatattccaaaatttccttgtatttttaggttatgcaactaataaaaactaccttacattaattaattacagttttctacacatggtaatacaggatatgctactgatttaggaagtttttaagttcatggtattctcttgattccaacaaagtttgattttctcttgtatttttcttacttactatgggttacattttttatttttcaaattggatgataatttcttggaaacattttttatgttttagtaaacagtatttttttgttgtttcaaactgaagtttactgagagatccatcaaattgaacaatctgttgtaatttaaaattttggccacttttttcagattttacatcattcttgctgaacttcaacttgaaattgttttttttttttttctttttggatgtgaaggtgaacattcctgatttttgtctgatgtgaaaaagccttggtattttacattttgaaaattcaaagaagcttaatataaaagtttgcattctactcaggaaaaagcatcttcttgtatatgtcttaaatgtatttttgtcctcatatacagaaagttcttaattgattttacagtctgtaatgcttgatgttttaaaataataacatttttatattttttaaaagacaaacttcatattatcctgtgttctttcctgactggtaatattgtgtgggatttcacaggtaaaagtcagtaggatggaacattttagtgtatttttactccttaaagagctagaatacatagttttcaccttaaaagaagggggaaaatcataaatacaatgaatcaactgaccattacgtagtagacaatttctgtaatgtccccttctttctaggctctgttgctgtgtgaatccattagatttacagtatcgtaatatacaagttttctttaaagccctctcctttagaatttaaaatattgtaccattgaagagtttggatgtgtaacttgtgatgccttagaaaaatatcctaagcacaaaataaacctttctaaccacttcattaaaaaaaaaaaaaaaaaagaaaaaaaaaaaaaaa

SEQ ID NO: 2838 - DNA, 1918 bp, Homo sapiens
gaggccccgccccctgagcctgggtagcggcgcgagggccgggagaaccgttcgcggaggaaaggcgaactagtgttgggatggccaccaactgggggagcctcttgcaggataaacagcagctagaggagctggcacggcaggccgtggaccgggccctggctgagggagtattgctgaggacctcacaggagcccacttcctcggaggtggtgagctatgccccattcacgctcttcccctcactggtccccagtgccctgctggagcaagcctatgctgtgcagatggacttcaacctgctagtggatgctgtcagccagaacgctgccttcctggagcaaactctttccagcaccatcaaacaggatgactttaccgctcgtctctttgacatccacaagcaagtcctaaaagagggcattgcccagactgtgttcctgggcctgaatcgctcagactacatgttccagcgcagcgcagatggctccccagccctgaaacagatcgaaatcaacaccatctctgccagctttgggggcctggcctcccggaccccagctgtgcaccgacatgttctcagtgtcctgagtaagaccaaagaagctggcaagatcctctctaataatcccagcaagggactggccctgggaattgccaaagcctgggagctctacggctcacccaatgctctggtgctactgattgctcaagagaaggaaagaaacatatttgaccagcgtgccatagagaatgagctactggccaggaacatccatgtgatccgacgaacatttgaagatatctctgaaaaggggtctctggaccaagaccgaaggctgtttgtggatggccaggaaattgctgtggtttacttccgggatggctacatgcctcgtcagtacagtctacagaattgggaagcacgtctactgctggagaggtcacatgctgccaagtgcccagacattgccacccagctggctgggactaagaaggtgcagcaggagctaagcaggccgggcatgctggagatgttgctccctggccagcctgaggctgtggcccgcctccgcgccacctttgctggcctctactcactggatgtgggtgaagaaggggaccaggccatcgccgaggcccttgctgcccctagccggtttgtgctaaagccccagagagagggtggaggtaacaacctatatggggaggaaatggtacaggccctgaaacagctgaaggacagtgaggagagggcctcctacatcctcatggagaagatcgaacctgagccttttgagaattgcctgctacggcctggcagccctgcccgagtggtccagtgcatttcagagctgggcatctttggggtctatgtcaggcaggaaaagacactcgtgatgaacaagcacgtggggcatctacttcgaaccaaagccatcgagcatgcagatggtggtgtggcagcgggagtggcagtcctggacaacccataccctgtgtgagggcacaaccaggccacgggaccttctatcctctgtatttgtcattcctctcctagccctcctgaggggtatcctcctaaagacctccaaagtttttatggaagggtaaatactggtaccttcccccagctttccatctgaggaccagaaaagttgtgtctcccttagatgagatctagacgcccccaaatccttgagatgtgggtatagctcagggtaagctgctctgaggtaaaggtccatgaaccctgccccactcctgtcagcccctcatcagccttttcagcaggttccagtgcctgacttgggataggactgagtggtaggaggagggggagtggaggggcatagcctttccctaattctgccttaaataaaactgcattgctgattcaaaaaaaaaaaaaaaaaaa

SEQ ID NO: 2839 - DNA, 3401 bp, Homo sapiens
tgcgttgtacccttttacgtgaggcggtgacggcggttcggaagtcgtctggcctccccgcggccgctcgcagcttgctggcctctcccgcgcctcacgtcggactccgtctccgcggcagggaagcagcatggaagctgaggacatccaggaggagttgacctgccccatctgcctggactatttccaggacccggtgtccatcgagtgcggccacaacttctgccgcggctgcctgcaccgcaactgggcgccgggcggcggcccgttcccctgccccgaatgtcggcacccatcggcgcccgccgcgctgcgacccaactgggccctggccaggctgactgagaagacgcagcgccggcgcctgggccccgtgcccccgggcctgtgcggccgccactgggagccgctgcggctcttctgcgaggacgaccagcggccagtgtgcctggtgtgcagggagtcccaggagcaccagactcacgccatggcacccatcgacgaggccttcgagagctaccggacaggtaactttgacatccacgtggatgaatggaagagaagactaattaggctgctcttgtaccattctaagcaggaggagaaacttcttaagtctcagcgtaatctcgtggccaagatgaagaaagtcatgcatttacaggatgtagaagtgaagaacgccacacagtggaaggataagataaagagtcagcgaatgagaatcagcacggagttttcaaagctgcacaacttcctggttgaagaagaggacctgtttcttcagagattgaacaaagaagaagaagagacgaagaagaagctgaatgagaacacgttaaaactcaatcaaactatcgcttcattgaagaagctcatcttagaggtgggggagaagagccaggctcccaccctggagctgcttcagaatccaaaagaagtgttgaccaggagtgagatccaggatgtgaactattcccttgaagctgtgaaggtgaagacagtgtgccagataccattgatgaaggaaatgctaaagcgattccaagtggctgtaaacctagctgaagacacagctcatcccaaactcgtcttctcccaggaagggagatacgtgaaaaatacagcatcagccagttcttggccagtgttttcttcagcatggaactactttgctggatggaggaatcctcagaagactgcttttgtagagagatttcagcacttaccctgtgttctgggaaaaaacgttttcacctcagggaaacattactgggaagttgagagtagagatagtctggaggttgctgttggggtgtgtcgggaggacgtcatgggaattactgatcgttcaaaaatgtccccagatgtgggcatctgggcgatttattggagtgctgctggctattggcccttgataggcttccctggaactcccacccagcaagagccagctctccaccgagtgggggtttacctggatcgtgggactgggaatgtctccttctacagcgctgtggacggagtgcacctgcacaccttttcttgttcttctgtctcacgcctccggccatttttttggttgagtccattagcatctttagtcattccaccagtgactgataggaaatgaggcttttcttcccctgaccaaaactccttccctgtagtccagctgagggacacacatccctgggccctcttctgcccttcatgtctctatcctggatggtccatcttctgggtctccctaacggtaccgtttggtatctgccctttgtgtgcttcacaagaggcagtcccatgggaggtgggtctggccaatggagatgggacaggaaattttccaagacgcttttgggaaatctttttgtagcttttaaagagatgtgcggggaagacatatggatgttagcagccatattggaactgagaacacaggaatggtggaaaggtagaagaaacagagtttttgttgccgttgtgaaattgttgaaatttccttcatgccaagcttcttgttatatgagataattacgcccttattgtataagacaattttagttgtatttggttacttgcagcctgaagtaccgtaactgcactaaagggacgtagtgtgaacatcccgcagtataggcttaagtcacttttgtgaaatttgacaaaggcatagaatctttttctatccagtcaggcattgcctattctttccagtaactactgattcccccacttttctgtcttagaaaattgtgggaatcccccctcactctgcctatgttgcactctctctcttcccaaccataactctgccctcagctattaactgtgctgtgtatttatcaagttggtatgttgtatgtacagtgttattcatgtcatcatgagaatgttgaacgcttgttaaataccttttgctagcctcttcatatgctgttgcatatgactctcatcacaactcagtgagatggaaagacaaatcctatttgtacaaatgagaaaactgaactctttagagtaactagctcagtattggccagctggtaaatggcagtgttgggattaaaatccagttcttatctactctccctttattcagaagcatttattggatgttgatctttgtttcaggttttgattttgttacttttttatactgtgtatattttcctcagtctacccttctgctctagattgtctggactcaggagattgtggcagttactggatagttatttttaagataatgattgcttttctctgtttatataagtcatgtgtacttattgtagaaagtttgtaagatgcaaaaagtataaaaattaaagttatgcactactaacatttcaatatattttctcccagattttcaataaagactttcaggcagtgatttaacgaggattttattttaacttatattttagtttaaggggaacacgtgcaggtttgttctatagatcaattacatgtcacaggggtttggtgtacatattatttcattacccaggtaataagcatagtacccaatagatacttttttgataccccaccctcctccaccctctaccctcaagtagtccctggtgtctgttgttcccttttttgtgtccatgggtactcaatgtttagctctcccttatacgtgagaacatgtgatgtttggttttctgttcatgtgttggtttgcttagggtaatggcctccagctccatccatgttgctgcaaagacatgatctcattctttttttatggctgcatagtattccatggtgtatatgtactatgttttctttatccagtctactgttgatgggcatttaggttgattccatgtctttgctattgtgaatagtgctgcaatgaatatatacatgcaaaaaaaaaaaaaaaaaaa

SEQ ID NO: 2840 - DNA, 3323 bp, Homo sapiens
tgcgttgtacccttttacgtgaggcggtgacggcggttcggaagtcgtctggcctccccgcggccgctcgcagcttgctggcctctcccgcgcctcacgtcggactccgtctccgcggcagggaagcagcatggaagctgaggacatccaggaggagttgacctgccccatctgcctggactatttccaggacccggtgtccatcgagtgcggccacaacttctgccgcggctgcctgcaccgcaactgggcgccgggcggcggcccgttcccctgccccgaatgtcggcacccatcggcgcccgccgcgctgcgacccaactgggccctggccaggctgactgagaagacgcagcgccggcgcctgggccccgtgcccccgggcctgtgcggccgccactgggagccgctgcggctcttctgcgaggacgaccagcggccagtgtgcctggtgtgcagggagtcccaggagcaccagactcacgccatggcacccatcgacgaggccttcgagagctaccgggagaaacttcttaagtctcagcgtaatctcgtggccaagatgaagaaagtcatgcatttacaggatgtagaagtgaagaacgccacacagtggaaggataagataaagagtcagcgaatgagaatcagcacggagttttcaaagctgcacaacttcctggttgaagaagaggacctgtttcttcagagattgaacaaagaagaagaagagacgaagaagaagctgaatgagaacacgttaaaactcaatcaaactatcgcttcattgaagaagctcatcttagaggtgggggagaagagccaggctcccaccctggagctgcttcagaatccaaaagaagtgttgaccaggagtgagatccaggatgtgaactattcccttgaagctgtgaaggtgaagacagtgtgccagataccattgatgaaggaaatgctaaagcgattccaagtggctgtaaacctagctgaagacacagctcatcccaaactcgtcttctcccaggaagggagatacgtgaaaaatacagcatcagccagttcttggccagtgttttcttcagcatggaactactttgctggatggaggaatcctcagaagactgcttttgtagagagatttcagcacttaccctgtgttctgggaaaaaacgttttcacctcagggaaacattactgggaagttgagagtagagatagtctggaggttgctgttggggtgtgtcgggaggacgtcatgggaattactgatcgttcaaaaatgtccccagatgtgggcatctgggcgatttattggagtgctgctggctattggcccttgataggcttccctggaactcccacccagcaagagccagctctccaccgagtgggggtttacctggatcgtgggactgggaatgtctccttctacagcgctgtggacggagtgcacctgcacaccttttcttgttcttctgtctcacgcctccggccatttttttggttgagtccattagcatctttagtcattccaccagtgactgataggaaatgaggcttttcttcccctgaccaaaactccttccctgtagtccagctgagggacacacatccctgggccctcttctgcccttcatgtctctatcctggatggtccatcttctgggtctccctaacggtaccgtttggtatctgccctttgtgtgcttcacaagaggcagtcccatgggaggtgggtctggccaatggagatgggacaggaaattttccaagacgcttttgggaaatctttttgtagcttttaaagagatgtgcggggaagacatatggatgttagcagccatattggaactgagaacacaggaatggtggaaaggtagaagaaacagagtttttgttgccgttgtgaaattgttgaaatttccttcatgccaagcttcttgttatatgagataattacgcccttattgtataagacaattttagttgtatttggttacttgcagcctgaagtaccgtaactgcactaaagggacgtagtgtgaacatcccgcagtataggcttaagtcacttttgtgaaatttgacaaaggcatagaatctttttctatccagtcaggcattgcctattctttccagtaactactgattcccccacttttctgtcttagaaaattgtgggaatcccccctcactctgcctatgttgcactctctctcttcccaaccataactctgccctcagctattaactgtgctgtgtatttatcaagttggtatgttgtatgtacagtgttattcatgtcatcatgagaatgttgaacgcttgttaaataccttttgctagcctcttcatatgctgttgcatatgactctcatcacaactcagtgagatggaaagacaaatcctatttgtacaaatgagaaaactgaactctttagagtaactagctcagtattggccagctggtaaatggcagtgttgggattaaaatccagttcttatctactctccctttattcagaagcatttattggatgttgatctttgtttcaggttttgattttgttacttttttatactgtgtatattttcctcagtctacccttctgctctagattgtctggactcaggagattgtggcagttactggatagttatttttaagataatgattgcttttctctgtttatataagtcatgtgtacttattgtagaaagtttgtaagatgcaaaaagtataaaaattaaagttatgcactactaacatttcaatatattttctcccagattttcaataaagactttcaggcagtgatttaacgaggattttattttaacttatattttagtttaaggggaacacgtgcaggtttgttctatagatcaattacatgtcacaggggtttggtgtacatattatttcattacccaggtaataagcatagtacccaatagatacttttttgataccccaccctcctccaccctctaccctcaagtagtccctggtgtctgttgttcccttttttgtgtccatgggtactcaatgtttagctctcccttatacgtgagaacatgtgatgtttggttttctgttcatgtgttggtttgcttagggtaatggcctccagctccatccatgttgctgcaaagacatgatctcattctttttttatggctgcatagtattccatggtgtatatgtactatgttttctttatccagtctactgttgatgggcatttaggttgattccatgtctttgctattgtgaatagtgctgcaatgaatatatacatgcaaaaaaaaaaaaaaaaaaa

SEQ ID NO: 2841 - DNA, 1133 bp, Homo sapiens
atgtcggcggccgtggcgtgcgtggattacttcgccgccgacgtgctcatggccatctcttcgggcgccgtggtgcaccgcgggcggcccggccccgagggcgcgggccccgccgccggcctggatgtgcgcgcggcgcgccgcgaggccgcctcacccgggaccccggggccacccccgccgccccccgccgcttctggcccgggccccggcgccgccgcggcgccccacctgctggccgccagcatcctggccgacctgcgcggcggacccggagccgccccggggggcgcctcgcccgcctcctcctcctcagccgcctcgtccccgtcctcgggccgcgcccccggcgccgcgccctccgccgccgccaagagccaccgctgtcccttcccggactgcgccaaagcctactacaagtcctcgcacctaaagtcgcacctgcggacgcacacaggggaacgcccttttgcttgtgactggcagggctgcgacaagaagttcgcccgctccgacgagctggcccgccaccaccggacgcacacgggcgagaagcgcttctcctgccctctgtgctccaagcgcttcacccgcagtgaccacctggccaagcacgcccgccgccaccccggcttccacccggacctgctccggcgccctggtgcccgcagtacctcccccagcgactcgctgccctgcagcctggccgggagccctgcgcccagccccgcgcccagcccagcccccgcaggcctgtagggccctcgtgcagcccaccctgaccgccaggatgcttctgccatccaggggtgtagtgaggacccacggggagcctgggccccttccagccgtgggcaaaccctgaagacacccctgcccccctccagagagtgaggagggggcctgagactggacctgggtctgcctgacctcagagtgtccaggggcttggagagacctgcgcccacccctccactctcccaggagtcgctgatcactgggacctggttccagccgtttgcaggggaggcggctccgagaggcgtgtgctttccgtgggtggcgcccctcccccgccctgcctggcctcatccttgtatttaattaattaaacaagcccctttttaaaccct

SEQ ID NO: 2842 - DNA, 4254 bp, Homo sapiens
ggggactacccagagggctgccgccgcctctccaagttcttgtggcccccgcggtgcggagtatggggcgctgatggccatggagggctaccggcgcttcctggcgctgctggggtcggcactgctcgtcggcttcctgtcggtgatcttcgccctcgtctgggtcctccactaccgagaggggcttggctgggatgggagcgcactagagtttaactggcacccagtgctcatggtcaccggcttcgtcttcatccagggcatcgccatcatcgtctacagactgccgtggacctggaaatgcagcaagctcctgatgaaatccatccatgcagggttaaatgcagttgctgccattcttgcaattatctctgtggtggccgtgtttgagaaccacaatgttaacaatatagccaatatgtacagtctgcacagctgggttggactgatagctgtcatatgctatttgttacagcttctttcaggtttttcagtctttctgcttccatgggctccgctttctctccgagcatttctcatgcccatacatgtttattctggaattgtcatctttggaacagtgattgcaacagcacttatgggattgacagagaaactgattttttccctgagagatcctgcatacagtacattcccgccagaaggtgttttcgtaaatacgcttggccttctgatcctggtgttcggggccctcattttttggatagtcaccagaccgcaatggaaacgtcctaaggagccaaattctaccattcttcatccaaatggaggcactgaacagggagcaagaggttccatgccagcctactctggcaacaacatggacaaatcagattcagagttaaacaatgaagtagcagcaaggaaaagaaacttagctctggatgaggctgggcagagatctaccatgtaaaatgttgtagagatagagccatataacgtcacgtttcaaaactagctctacagttttgcttctcctattagccatatgataattgggctatgtagtatcaatatttactttaatcacaaaggatggtttcttgaaataatttgtattgattgaggcctatgaactgacctgaattggaaaggatgtgattaatataaataatagcagatataaattgtggttatgttacctttatcttgttgaggaccacaacattagcacggtgccttgtgcagaatagatactcaatatgtgaatatgtgtctactagtagttaattggataaactggcagcatccctggcctgttgtcatgcagtcatttcctgttaattctgggagacaatgatttcacaactagagggaagcagtcctaaaagtttaaaatccgataaggaatatctgggacagggtttagatcatgactctacacagataccatgatgagagtatattaaagaaatttaggaaagcacctggttcctttctccccatgcctgccttctgctccctccccagctggtttgggctcaaattgtccctggagactagggtttatgttagggtattgatagattagagcaggtggttgaagagatcttctctggtcagacttggaagaatttccaaaagtgaagttagccccaagacttccctagggttgatgtactttatgatccagatgctaaacttcttagaatgaaaatatgcttcaacacttaagtagcatacactgccctacaaacctcagagagcacttttccccaagttcttgtttttatttttgaaagtactcacacagcacttactatgctccaaacactcctctaagcactttacacatattagctcattcagtccccagacagacgggatgaagtaggtattgttactgttcccattttacaggtgagagatttgaagcctggggaggctagtaactcaccccaaggtcacacggctcatacatggtgggactgagactcagatgcaggcagtctggcacctcagtctggattctaaccatttcactaagctatttttgtcttgtactactttgacccacccctgaataaacctcaattgctggagtggggtgtagttattaaagggatgctttttaccttttgctgtctgctgtggcagattccccagataaccaaggaaaaggggccacccatacctggaaataggccatagggcccctactactgccaacaagccatggcctaccttgacacttgtttgatcttaaaattgtgtcttggtaacaaaagatttggacaggcatatctgtagctttcaagttaattaattgcaatatttttttcttcaggattttagctgctgaacaactttcagtttggagctaaaagagacctgtctcatggtctgcccttccctggggcaatagctagggtctttcctgatttttatggaattttaggggatattttgagctttgggttctcagtagtgaattgagacttggaggtgacttttcatgtttggagtatcatctctgtctgggctctgggctgacaaattaaaacctagagtagtgcttatgctgaaatgatacttttcattttttggttgatttttttgccttcccttcaattttaaactgaagcattttaatgtgggtagaaactctacaccaaatacactaaacattttggtgcttagtggatttctttttaggtaactggtacttacttccaaagactgaatacaagccacactccatcatatcccttaaacttcatgaaaaaccattcaagatccccttgctgcaacactgttctcttcttctctactaaattctatttccaaaattggtaatagagccagaaggatccccagtacccagccctctgcctggcacaaagtggtagcacaattaaattcagtatgggtggagcatggtacagtcttggtgccatagaaggagtagttgcatagtcacacatcatttgataagttggatgttccattacatagaggaacacaaaattccagggtttttggaggaagggattagatagcgactaagccgccagaattgaggtggccattcctttttgtataggctaagaaacaggttatcagtgaaaagttaattatggctttggcactagaatagcactgttgcaaagtatttaagcaccccccatctcagccctttattttatctttcatgtgggctaatgtgaggataatcttacagatattataggaatttcttttctatctttatgaaaacaacgtatataaaatatatctagaaaacctttgtttgagactcttatttaatgggcttttgattctaatgataattgtacctttatctttcaaaagctgatatttcctacctaagcatctcccgagaaaaatatctcattaaaaagcccataaataataggggagaagaaagccttaggtatcaattccaaaacagtgattgaaatttcccaaaataattatggcttctgtcatctccagagataatctggcttggtttaccccataatctaatttcagaaaagaaagctttattttaacactcatctgaatcaacattaaagccttttctctcaaagcgtttattgagaaactcaaatgaatatactttttgaattactgtcatcaaaagtgtacggcttcctgtgctgcttgtgtcaaatggaacctgccctctaaagcactttctttcctttacttgcgtggtttcatgtaagctgtgctgtttagaaacaacatctcagactttacaaagaaatgacaaagaaggcaattgcactttttaagggatatcgacaagcagtttctgttttctaaaggacaaaatacagagtgtgtgtcatttttaattagattctttcccctgctgagttggaaattccagtgcagcactgattgaccacagttgccaatctaaaagcacaaagacagaagtaaagctttatgctaattttatttcaatatgatagaaaatttatcttggtatgtccttttttagataactccagcaggaaactgtaactgctatgtctttaggaaaacgtagaagaaagaacattattattctttaattcctacaaggtacttgaaaaccttaagtgaaaaagatttctatctttttatcttggcgcatttatggaaaaaatattaactgtcctgaatattttataattttgtaggaaaaatatgcatctattttttcttgacttcttttatatagtaataaaagttattttggaaaaaaaaaaaaaaaaaaaa

SEQ ID NO: 2843 - DNA, 4569 bp, Homo sapiens
ggagagaaggacgagggaaggaggagggcacgaagaggcaccgaccgtacccaggcgcaccggcaggagagcggcaccgtggctgccgcagcgcgcagaggctgtggaggggcttacggctcccagcccacgggtctcagacccaggggctgggcccccagcccccagtcccgatcccagctgggtcgagccatgctgcgctacctgctgaaaacgctgctgcagatgaacttgttcgcggactctctggccggggacatctccaactccagcgagctgctcttgggcttcaactcctcgctggcggcgctcaaccacaccctgctgcctcccggcgatccctctctcaacgggtcaagggtaggaccggaggacgctatgccccgcatcgtggagcagccgccagatctgctggtctcccgaggcgagcccgccacgttgccctgccgcgctgaaggccgaccccgacccaacattgagtggtacaagaacggggcgcgtgtggccactgtgcgggaggatccgcgtgcgcaccgcctgctgctgcccagcggcgccctcttcttcccgcgcatcgtgcacgggcgccgcgcgcggccggacgaaggtgtctacacttgcgtggctcgcaactacctgggggcagcagcgagcagaaacgcctcgctggaagtggcagtcctccgtgatgatttccggcagtctcctggaaacgtggtggtggcagtgggggagccagcagtactggaatgcgtgcccccccgcggccacccggagccttccgtgtcctggaggaaggacggtgcaagactcaaggaagaggaaggaaggatcacgatccgtggagggaagctgatgatgtcacatacactcaagagcgatgcaggcatgtatgtgtgcgtagcctccaacatggcgggagaacgggagagtgcggcagctgaagtcatggtactggagcgtccctcattcctgcgcagaccagtgaatcaggtggtcctggctgatgcccctgtgactttcctatgtgaggtgaagggggatcccccacctcgtctacgctggcgcaaggaggatggggaactgcccacaggcaggtatgagatccggagtgaccacagcctttggattgggcatgtgagtgccgaagatgagggaacgtacacctgtgtggcggagaacagtgtgggccgcgctgaagcatctggctccctcagtgttcacgtcccaccccagttggtgacccagccccaggaccagatggcagctcctggagagagcgtggctttccagtgcgagaccaaaggaaaccccccacctgccatcttctggcagaaggaggggagtcaggtcctgcttttccccagtcagtcacttcagccgacggggcgcttctcagtgtctccaagaggccaacttaacatcaccgcggtgcagcgtggggatgctgggtactacgtgtgccaggctgtcagtgtggctggcagcatcctggccaaggccctgctggagataaaaggagcctctttggatgggctgcctcctgtcatcctccagggaccagccaatcagacgctggtgcttggctcctccgtgtggctgccctgcagagtgactgggaaccctcaacccagtgtccgatggaagaaggatgggcagtggctgcagggggatgacctccagttcaagacaatggccaacggtaccctgtacatcgccaatgtgcaggagatggacatgggcttctacagctgcgtggccaagagttccacaggggaagccacatggagcggctggcttaagatgcgggaagactggggagtatcaccagacccccctacagaacccagttcccctccgggggctccctctcagccagtggtcactgagatcaccaagaacagcattaccctgacctggaagcccaacccacaaactggggctgcagtcacgtcttatgtgatagaggccttcagcccagcagctggcaacacatggcgtactgtggcagatggcgtgcagctggagacacacacagtcagcggtctgcagcccaataccatctacctgtttctggttcgagcagtgggagcctggggcctcagtgagcccagccccgtctctgagcctgtccgtacacaggatagcagcccctctaggccagtggaggacccatggagaggccagcagggactggcggaagtggctgtgcgcctgcaggagcccatagtcctgggaccccggaccctgcaggtgtcctggactgtggatggcccagtccagctggtgcaaggtttccgggtgtcttggagggtagcaggccctgagggaggaagctggacaatgttggacctacagtccccaagccagcaaagtactgtgctaagaggactccctccagggacccaaatccagatcaaggtgcaagcccaaggccaggaggggctgggggctgaaagcctctctgtgaccaggagcattcctgaggaggcccccagtggccccccacagggagtggcggtggccttggggggtgatggcaacagcagtatcactgtgtcctgggaacctccactcccctcccagcaaaatggggtcatcacggaataccagatctggtgcctgggcaatgagagccgctttcacctcaatcgatctgcagcaggctgggcacgctccgcaatgctccgaggactggtgcccggtctcctctatcgaaccctggtcgcggcggccaccagcgcaggcgtgggcgtgcccagtgccccagtgctggtgcagctgccgtccccgccggacctggagcccgggctggaggtgggcgcggggctggcggtgcggctggcgagggtgctgcgggagcccgccttcctcgcgggcagcggcgcagcctgcggggcgctgcttctcgggctctgcgccgccctctactggcgccggaaacagcgcaaagagctcagccactacacggcctcttttgcctacacaccggcagtgtccttcccgcactcagagggcctctctggagccagttccaggccacccatgggccttggccccgccccctactcatggctggcagattcgtggccccacccatctcgaagcccctcggcccaggaacccaggggaagctgctgccctagcaatcctgacccggacgacagatattacaacgaagcgggaatctccctgtatctagctcagacggccaggggcacggccgcccctggcgagggtcctgtctatagcaccattgacccagcgggggaggagctgcagaccttccatgggggcttcccccaacatccctcaggagatctgggtccctggagccagtacgctcctccagagtggagccagggggacagtggagccaagggaggcaaagtgaagcttctggggaaacctgtgcagatgccctctctgaactggccagaagccctgcccccacctcctccttcttgtgaactgagctgcctagaagggccggaggaggagctggagggcagctcagagccagaggagtggtgcccgccaatgcctgagagaagtcacctgacggagcccagctccagtggagggtgcctggtcaccccatcccgaagggaaaccccctctcccacaccttcctatggacagcagtccacagccactcttacaccctcacctcctgaccctccccagcccccaactgacatgccccatctccatcagatgcccaggagggtgccccttgggccgagttcccctctcagtgtatcccagcccatgctgggcatccgtgaagcgaggcctgctggcttgggtgctggccctgcagcctcaccccacctcagccccagtcctgcccctagcacagccagcagtgccccaggcagaacctggcaggggaatggggagatgactcccccacttcaaggaccccgtgctcgattccggaagaaacccaaggctcttccctacaggagggagaacagtcctggggacttgcccccaccacccttgccaccgccagaggaagaggcgagctgggccctagagctgagggcagcaggcagcatgtcctccctggagcgggagcgcagtggggagaggaaagcggtccaggccgtgcccctggcagcccagcgggtgctccacccagatgaagaggcctggctcccatacagcagaccaagcttcctgtcccggggccagggcaccagcacatgttccacggccggcagcaactcttccaggggctccagcagctctaggggctcccggggccctggccggagccggagtcggagtcagagccggagccagagccaaaggccaggacagaaacgccgagaggaaccaagatgacccttgttggggcattgagaatatcatgagtgccacggggaaggggagtagggatgtcttttcccccccagcagtgatgagtggggctagctgaagcccattggtttccacgatttcaattggctgagaaggcagagagctagctcctccctttctttctttttccacctgagacttgtttataaaaaacaaaacaataaaaagagtctgatcaga

SEQ ID NO: 2844 - DNA, 1382 bp, Homo sapiens
aagaaaggcacttccggtgtctgttgccaggcgcgggcccagtgggccgtaggggcgacattgttgccgtcgtctttccccccccagtcccggggatggagatgtcgggactcagcttttcagagatggagggctgccgtaacctacttggcctactggacaacgacgagatcatggccctatgcgacaccgtcaccaaccgcctggtgcagcctcaggaccgccaagatgctgttcatgcaatattagcatacagtcaaagtgcagaagaacttctgaggcgtagaaaagtccaccgagaagttatatttaagtacttggcaacacaggggattgttatacctccagctactgaaaaacacaatcttattcagcatgcaaaagattactggcaaaagcaaccacaactgaaattgaaggaaacgccagagccagttacaaagacagaggacatccacctatttcaacagcaggtgaaagaagataaaaaagctgaaaaagttgattttcgtcgcctaggagaagaattctgtcattggttctttggacttcttaattctcagaatccttttctaggaccacctcaagatgaatggggaccacagcacttctggcatgatgtgaagcttaggttttattacaacacatcagaacaaaatgttatggactaccatggagcagaaatcgtgagccttcgtttgctgtcactagtaaaagaagaatttctttttctcagccccaacctagattcacatggactgaaatgtgcatcttctcctcatgggctggttatggttggagttgctgggactgtccatcgaggaaacacttgtttgggcatttttgaacaaatttttggactcatccgctgcccttttgtggagaatacttggaaaatcaaatttatcaacctgaaaattatgggagagagttcccttgctcctggaacattaccgaaaccatctgttaaatttgaacaaagtgatctagaggccttttataatgtaatcactgtatgtggtaccaatgaagtacgacataatgtaaagcaggcttcggatagtggaactggggaccaagtttgaggtagtggaaatgagacattgctgaacaaaagagaactgggtttacctgaccctctaaagcgctaagtactgtcagcctgaaaaaaatcttctatacagaaactcttccaaatactatatcagtaatgtctgaatgatttcagatgtgaaaattgacatattttagttgaaatacctttctggactacagacttacatatcatgtgaatacttacctatttctacccgagttgcagcaagtattctgaaagcttaatgcaaataaatcccactttagatcctaaaaaaaaaaaaaaa

SEQ ID NO: 2845 - DNA, 3065 bp, Homo sapiens
gctgccaggtgagccccgggccaagggtggttgccctgctgaggccgaaaggactcgagcttcccatctcctcgcctcccccaggtctttcaccgtctggactcatctctgggtaactcatggtgtgagtggccacgtggctggctcaggctcagggccctgtccgggggcggcagcgtggcctccccacccccgtcccctgccatgcccaaatacaagctggctgactaccgttatgggcgagaggaaatgctggctctctacgtcaaggagaacaaggtgggtcccggaagagctgcaggacaaggagttcgccgcggtgctgcaggacgagccactgcagcccctggctctggagccgctgactgaggaggaacaggccgcggccgtggtgacagctgcttttaccaaagaagcatcgaagaaggcgatggggcctttggacgaagcccccgggaaatccagcgcagccagagctgggatgacagcacgatgtggctttgaggagggaggggctggcccaaggaaggagcacgcccgctcagacagcgagaactggcgctccctacgggaggaacaggaggaggaggaggagggcagctggaggctcggagcagggccccggcgagacggcgaccgctggcgctccgccagccctgatggtggtccccgctctgctggctggcgggaacatggggaacggcggcgcaagtttgaatttgatttgcgaggggatcgaggagggtgtggtgaagaggaggggcggggagggggaggcagctctcacctgcggcggtgccgagcgcctgaaggctttgaggaggacaaggatgggctcccagagtggtgcctggacgatgaggatgaagaaatgggcacctttgatgcctctggggccttcttgcctctcaagctgttctctgctccccaccccggccccatgcagaagggccccaaggagcccattcctgaggagcaggagctggacttccaagggttggaggaggaggaggaaccttccgaagggctagaggaggaagggcctgaggcagatgatattcgggggatccagctgagtcccggggtgggctcctctgctggcccacccggagatctggaggatgatgaaggcttgaagcacctgcagcagggcatccaggaggcggagaagctggtggcctccctgcaggacagctccttggaggaggagcagttcacggctgccatgcagacccagggcctgcgccactctgcagccgccactgccctcccgctcagccatggggctgcccggaagtggttctacaaggacccacagggcgagatccaaggccccttcacgacacaggagatggcagagtggttccaggccggctacttttccatgtcactgctggtgaagcggggctgcgatgagggcttccagccgctgggcgaggtgatcaagatgtggggccgcgtgccctttgccccagggccctcacctcccccactgctgggaaacatggaccaggagcggctgaagaagcaacaggagctggccgcggcggccttgtaccagcagctgcagcaccagcagtttctccagctggtcagcagccgccagctcccgcagtgcgcgctccgagaaaaggcagctctgggggacctgacaccgccaccaccgccgccgccacagcagcagcagcagcagctcacggcattcctgcagcagctccaggcgctcaaaccccccagttccaggagcgcagagaagtggagctcagggcgaagcgggaggaagaggaacgcaagcgtcgagaggagaagcgccgccagcagcagcaggaggagcagaagcggcggcaggaggaggaagagctgtttcggcgcaagcacgtgggggctgtccatgaagacgctcctggagttgcagctggagggcgagcggcagctgcacaaacagcccccacctcgggagccagctcgggcccaggcccccaaccaccgagtgcagcttgggggcctgggcactgcccccctgaaccagtgggtgtctgaggctgggccactgtggggcgggccagacaagagtgggggcggcagcagcggcctggggctctgggaggacacccccaagagcggcgggagcctggtccgtggcctcggcctgaagaacagccggagcagcccatctctcagtgactcatacagccacctatcgggtcggcccattcgcaaaaagacggaggaagaagagaagctgctgaagctgctgcagggcattcccaggccccaggacggcttcacccagtggtgcgagcagatgctgcacacgctgagcgccacgggcagcctggacgtgcccatggctgtagcgatcctcaaggaggtggaatccccctatgatgtccacgattatatccgttcctgcctgggggacacgctggaagccaaagaatttgccaaacaattcctggagcggagggccaagcagaaagccagccagcagcggcagcagcagcaggaggcatggctgagcagcgcctcgctgcagacggccttccaggccaaccacagcaccaaactcggccccggggagggcagcaaggccaagaggcgggcactgatgctgcactcagaccccagcatcctggggtactccctgcacggatcttctggtgagatcgagagcgtggatgactactgaccagcccggacccccagcccctgggctgtaggccagggcagccacagcggcgtggaccgagggtcccagcctgcaggctccccgcagagagcacaggaagaggcaggggcggggtccccagcacttgttacaaacacacgatgcaccttaactcacccaccacgaggcactttacagactgggggagggggtttttctttttattttttttttaattttaaacgactgaagaaaacattaggagaggcaaaaatattgttaaaaactagactctaaacaccccttcctgctgtgaggatagtgggtgtgacaatggaaggtccacagaggtttttgttttttggtttttttttttttttttaagaaaaaaagatga

SEQ ID NO: 2846 - DNA, 1322 bp, Homo sapiens
aactcattctgaagaggctgacgattttactgtctcatttttttcctttctccagaatgggttctgggtgggtcccctgggtggtggctctgctagtgaatctgacccgactggattcctccatgactcaaggcacagactctccagaagattttgtgattcaggcaaaggctgactgttacttcaccaacgggacagaaaaggtgcagtttgtggtcagattcatctttaacttggaggagtatgtacgtttcgacagtgatgtggggatgtttgtggcattgaccaagctggggcagccagatgctgagcagtggaacagccggctggatctcttggagaggagcagacaggccgtggatggggtctgtagacacaactacaggctgggcgcacccttcactgtggggagaaaagtgcaaccagaggtgacagtgtacccagagaggaccccactcctgcaccagcataatctgctgcactgctctgtgacaggcttctatccaggggatatcaagatcaagtggttcctgaatgggcaggaggagagagctggggtcatgtccactggccctatcaggaatggagactggacctttcagactgtggtgatgctagaaatgactcctgaacttggacatgtctacacctgccttgtcgatcactccagcctgctgagccctgtttctgtggagtggagagctcagtctgaatattcttggagaaagatgctgagtggcattgcagccttcctacttgggctaatcttccttctggtgggaatcgtcatccagctaagggctcagaaaggatatgtgaggacgcagatgtctggtaatgaggtctcaagagctgttctgctccctcagtcatgctaaggtcctcactgaagcttctctctctggagcctgaagtagtgatgagtagtctgggccctgggtgaggtaaaggacattcatgaggtcaatgttctgggaataactctcttccctgatccttggaggagcccgaactgattctggagctctgtgttctgagatcatgcatctcccacccatctgcccttctcccttctacgtgtacatcattaatccccattgccaagggcattgtccagaaactcccctgagaccttactccttccagccccaaatcatttacttttctgtggtccagccctactcctataagtcatgatctccaaagctttctgtcttccaactgcagtctccacagtcttcagaagacaaatgctcaggtagtcactgtttccttttcactgtttttaaaaaccttttattgtcaaataaaatggagataca

SEQ ID NO: 2847 - DNA, 2653 bp, Homo sapiens
atgttgtgatggagaagccgcggcggagcccgaaccccgcagcctgagccacctccgtcatctgggcccggggcctcaccgcgcaggagctgccaaggccatgtctgttccatcatcactgagccagtcggccattaatgccaacagccacggaggccccgcactgagcctacccctgcctctgcacgctgcccacaaccagctgctcaacgccaagctgcaggccacagctgtgggacccaaggacctgcgcagcgccatgggggagggtggtgggcctgagccaggccctgccaatgccaagtggctaaaagagggccagaaccagctccggcgggccgccacggcccaccgtgaccagaatcgcaatgtgaccttgaccttggcggaggaggccagccaggagcctgagatggcacccttgggccccaaaggcctgatacacctgtactctgagctggagctctcagctcacaacgcagccaaccgaggcctacgaggacctggcctgatcatcagcactcaagagcaggggccagatgagggagaggagaaggcggccggggaggccgaggaggaggaggaggatgatgatgatgaagaggaggaggaggacttatcttctcccccagggctgcctgagcccctggagagtgtggaggcccctcccaggccccaagcccttacagatggcccccgggaacacagcaagagtgccagcctcctgtttggcatgcggaacagtgcagccagtgatgaggactcaagctgggctaccttatcccagggcagcccctcctatggctccccagaggacacagattccttctggaaccccaacgccttcgagacggattccgacctgccggctggatggatgagggtccaggacacctcagggacctattactggcacatcccaacagggaccacccagtgggaaccccccggccgggcctccccctcacaggggagcagcccccaagaggagtcccagctcacctggacaggttttgctcatggagaaggctttgaggatggagaattttggaaggatgaacccagtgatgaggccccaatggagctgggactgaaggaacctgaggaggggacgttgaccttcccagctcagagcctcagcccagagccgttgccccaagaggaggagaagcttcccccacggaataccaacccagggatcaagtgtttcgccgtgcgctccctaggctgggtagagatgaccgaggaggagctggcccctggacgcagcagtgtggcagtcaacaattgcatccgtcagctctcttaccacaaaaacaacctgcatgaccccatgtctgggggctggggggaaggaaaggatctgctactgcagctggaggatgagacactaaagctagtggagccacagagccaggcactgctgcacgcccaacccatcatcagcatccgcgtgtggggcgtcgggcgggacagtggaagagagagggactttgcctacgtagctcgtgataagctgacccagatgctcaagtgccacgtgtttcgctgtgaggcacctgccaagaacatcgccaccagcctgcatgagatctgctctaagatcatggccgaacggcgtaatgcccgctgcttggtaaatggactctccctggaccactctaaacttgtggatgtccctttccaagtggaattcccagcgcctaagaatgagttggtccagaagttccaagtctattacctggggaatgtacctgttgctaaacctgttggggtagatgtgattaatggggccctcgagtcagtcctgtcctccagcagccgtgaacaatggaccccaagtcatgtcagtgtggcccctgctaccctcaccatcttgcaccagcagacagaggcagtgctgggagagtgtcgggtgcgtttcctctccttcctggccgtgggcagagatgtccacacgtttgcattcatcatggctgccggcccagcctccttctgctgccacatgttctggtgcgagcccaatgctgccagcctctcagaggctgtgcaggctgcgtgcatgcttcgctaccagaagtgtctggatgcccgttcccaggcctccacctcctgcctcccagcaccccctgctgagtctgtggcacggcgtgtagggtggactgtccgcaggggtgttcagtcgctgtggggctccctgaagcccaaacggctgggggcccataccccatgaagaagcccccaccttccctccacctgcttgtgttgggccccagggaactaaagggtgtgggtcagggaggggtctagaggctattcctaggcctcaggcctcccaaatatgcccctccccagtagctacggttccctgcctaggagctggggagggagagatctaatcccttcaaggaagtgataacactggagtggtaacaagaggagcaggaagcaaggccagccctggttctccatccccatgtgtttcaggtggaacaggaggaactggtccaggccaggcctcatcctcctggacccagcaggggcagaaggaggaagggactggtccaggcatgggtcccttccccctgctccatgggcacctctgctgtattgatatcactaataaagtctgtctgcactgcaaaaaaaaaaa

SEQ ID NO: 2848 - DNA, 2634 bp, Homo sapiens
tcgggctccagccccgtccgcgcgtctcccggcgtgggtgcgggaccagggcgctgcggggcgcgcagggagctgccaaggccatgtctgttccatcatcactgagccagtcggccattaatgccaacagccacggaggccccgcactgagcctacccctgcctctgcacgctgcccacaaccagctgctcaacgccaagctgcaggccacagctgtgggacccaaggacctgcgcagcgccatgggggagggtggtgggcctgagccaggccctgccaatgccaagtggctaaaagagggccagaaccagctccggcgggccgccacggcccaccgtgaccagaatcgcaatgtgaccttgaccttggcggaggaggccagccaggagcctgagatggcacccttgggccccaaaggcctgatacacctgtactctgagctggagctctcagctcacaacgcagccaaccgaggcctacgaggacctggcctgatcatcagcactcaagagcaggggccagatgagggagaggagaaggcggccggggaggccgaggaggaggaggaggatgatgatgatgaagaggaggaggaggacttatcttctcccccagggctgcctgagcccctggagagtgtggaggcccctcccaggccccaagcccttacagatggcccccgggaacacagcaagagtgccagcctcctgtttggcatgcggaacagtgcagccagtgatgaggactcaagctgggctaccttatcccagggcagcccctcctatggctccccagaggacacagattccttctggaaccccaacgccttcgagacggattccgacctgccggctggatggatgagggtccaggacacctcagggacctattactggcacatcccaacagggaccacccagtgggaaccccccggccgggcctccccctcacaggggagcagcccccaagaggagtcccagctcacctggacaggttttgctcatggagaaggctttgaggatggagaattttggaaggatgaacccagtgatgaggccccaatggagctgggactgaaggaacctgaggaggggacgttgaccttcccagctcagagcctcagcccagagccgttgccccaagaggaggagaagcttcccccacggaataccaacccagggatcaagtgtttcgccgtgcgctccctaggctgggtagagatgaccgaggaggagctggcccctggacgcagcagtgtggcagtcaacaattgcatccgtcagctctcttaccacaaaaacaacctgcatgaccccatgtctgggggctggggggaaggaaaggatctgctactgcagctggaggatgagacactaaagctagtggagccacagagccaggcactgctgcacgcccaacccatcatcagcatccgcgtgtggggcgtcgggcgggacagtggaagggactttgcctacgtagctcgtgataagctgacccagatgctcaagtgccacgtgtttcgctgtgaggcacctgccaagaacatcgccaccagcctgcatgagatctgctctaagatcatggccgaacggcgtaatgcccgctgcttggtaaatggactctccctggaccactctaaacttgtggatgtccctttccaagtggaattcccagcgcctaagaatgagttggtccagaagttccaagtctattacctggggaatgtacctgttgctaaacctgttggggtagatgtgattaatggggccctcgagtcagtcctgtcctccagcagccgtgaacaatggaccccaagtcatgtcagtgtggcccctgctaccctcaccatcttgcaccagcagacagaggcagtgctgggagagtgtcgggtgcgtttcctctccttcctggccgtgggcagagatgtccacacgtttgcattcatcatggctgccggcccagcctccttctgctgccacatgttctggtgcgagcccaatgctgccagcctctcagaggctgtgcaggctgcgtgcatgcttcgctaccagaagtgtctggatgcccgttcccaggcctccacctcctgcctcccagcaccccctgctgagtctgtggcacggcgtgtagggtggactgtccgcaggggtgttcagtcgctgtggggctccctgaagcccaaacggctgggggcccataccccatgaagaagcccccaccttccctccacctgcttgtgttgggccccagggaactaaagggtgtgggtcagggaggggtctagaggctattcctaggcctcaggcctcccaaatatgcccctccccagtagctacggttccctgcctaggagctggggagggagagatctaatcccttcaaggaagtgataacactggagtggtaacaagaggagcaggaagcaaggccagccctggttctccatccccatgtgtttcaggtggaacaggaggaactggtccaggccaggcctcatcctcctggacccagcaggggcagaaggaggaagggactggtccaggcatgggtcccttccccctgctccatgggcacctctgctgtattgatatcactaataaagtctgtctgcactgcaaaaaaaaaaaaaaa

SEQ ID NO: 2849 - DNA, 1377 bp, Homo sapiens
ccggaaggggctgatgcgaactggggccacggcagccatcgcgctttgcagttcggtctcctggtgtacggccaacgccaagtaggggattgcgttccctccagtcgcagagtttccctcttgtcgcccaggctggagtgaagtggcacgatctcggcttactgcaagctccgcctcccgggttcacgccattctcctgcctcagcctcccgagtagctgggactacagaccctatcagatttggatatgtccttcatatttgattggatttacagtggtttcagcagtgtgctacagtttttaggattatataagaaaactggtaaactggtatttcttggattggataatgcaggaaaaacaacattgctacacatgctaaaagatgacagacttggacaacatgtcccaacattacatcccacttccgaagaactgaccattgctggcatgacgtttacaacttttgatctgggtggacatgttcaagctcgaagagtgtggaaaaactaccttcctgctatcaatggcattgtatttctggtggattgtgcagaccacgaaaggctgttagagtcaaaagaagaacttgattcactaatgacagatgaaaccattgctaatgtgcctatactgattcttgggaataagatcgacagacctgaagccatcagtgaagagaggttgcgagagatgtttggtttatatggtcagacaacaggaaaggggagtatatctctgaaagaactgaatgcccgacccttagaagttttcatgtgtagtgtgctcaaaagacaaggttacggagaaggcttccgctggatggcacagtacattgattaacacaaactcacattggttccaggtctcaacgttcaggcttactcagagatttgattgctcaacatgcataacttgaattcaatagacttttgctggttataaaacagatgttttttagattattaatattaaatcaacttaatttgaatgagaattgaaaactgattcaagtaagtttgagtatcacaatgttagctttctaattccataaaagtacttggtttttacagtttataatctgacatcaccccagcgccatttgtaaagagcaactttccagcagtacatttgaagcactttttaacaacatgaaactataaaccatatttaaaagctcatcatgttaaattttttatgtacttttctggaactagtttttaaattttagattatatgtccacctatcttaagtgtacagttaataattagcttattcaatgattgcatgatgccttacagttttcaataactttttttcttatgcaaacgtcatgcaataaaacaaactctaatgtttggcaaaaaaaaaaaaa

SEQ ID NO: 2850 - DNA, 1258 bp, Homo sapiens
ccggaaggggctgatgcgaactggggccacggcagccatcgcgctttgcagttcggtctcctggtgtacggccaacgccaagtaggggattgcgttccctccagtcgcagaccctatcagatttggatatgtccttcatatttgattggatttacagtggtttcagcagtgtgctacagtttttaggattatataagaaaactggtaaactggtatttcttggattggataatgcaggaaaaacaacattgctacacatgctaaaagatgacagacttggacaacatgtcccaacattacatcccacttccgaagaactgaccattgctggcatgacgtttacaacttttgatctgggtggacatgttcaagctcgaagagtgtggaaaaactaccttcctgctatcaatggcattgtatttctggtggattgtgcagaccacgaaaggctgttagagtcaaaagaagaacttgattcactaatgacagatgaaaccattgctaatgtgcctatactgattcttgggaataagatcgacagacctgaagccatcagtgaagagaggttgcgagagatgtttggtttatatggtcagacaacaggaaaggggagtatatctctgaaagaactgaatgcccgacccttagaagttttcatgtgtagtgtgctcaaaagacaaggttacggagaaggcttccgctggatggcacagtacattgattaacacaaactcacattggttccaggtctcaacgttcaggcttactcagagatttgattgctcaacatgcataacttgaattcaatagacttttgctggttataaaacagatgttttttagattattaatattaaatcaacttaatttgaatgagaattgaaaactgattcaagtaagtttgagtatcacaatgttagctttctaattccataaaagtacttggtttttacagtttataatctgacatcaccccagcgccatttgtaaagagcaactttccagcagtacatttgaagcactttttaacaacatgaaactataaaccatatttaaaagctcatcatgttaaattttttatgtacttttctggaactagtttttaaattttagattatatgtccacctatcttaagtgtacagttaataattagcttattcaatgattgcatgatgccttacagttttcaataactttttttcttatgcaaacgtcatgcaataaaacaaactctaatgtttggcaaaaaaaaaaaaa

SEQ ID NO: 2851 - DNA, 1250 bp, Homo sapiens
acgtgtgcgtaggagcgcaccggaagcgcccggctggaggcgcggcggcagggctgggcggcggcggcggcggcggtcatggaacgccaagaggagtctctgtccgcgcggccggccctggagaccgaggggctgcgcttcctgcacaccacggtgggctccctgctggccacctatggctggtacatcgtcttcagctgcatccttctctacgtggtctttcagaagctttccgcccggctaagagccttgaggcagaggcagctggaccgagctgcggctgctgtggaacctgatgttgttgttaaacgacaagaagctttagcagctgctcgactgaaaatgcaagaagaactaaatgcgcaagttgaaaagcataaggaaaaactgaaacaacttgaagaagaaaaaaggagacagaagattgaaatgtgggacagcatgcaagaaggaaaaagttacaaaggaaatgcaaagaagccccaggaggaagacagtcctgggccttccacttcatctgtcctgaaacggaaatcggacagaaagcctttgcggggaggaggttataacccgttgtctggtgaaggaggcggagcttgctcctggagacctggacgcagaggcccgtcatctggcggatgaggctaagaatcttgttagtgtcacttttgacattagcaagatgaacccttaaccctcgattcaattgccttacgcacgcttttcacagtgactagccaaggggaggtggggttgatttctgttcctaactacacctgcatatgtcagggctccagtcagcaaaaggtatagatgttgcctctaggcatgaggtcattggtcacattctacttggagacagtgattgcattcattgatttcatggttaattgctagttggtaggtaaaggcctctagatgattagcaatcttgataaaagaggcctagtaatgttcttttgaggttagaaatccttgctgctaggacagtctctgtgacaggttgcgttgaatgatgtcttccttatcaatggtgagcccaccagtgaggattactgatgtggacagttgatggggtttgtttctgtatatttatttttatgtacagaactttgtaaaaacgaaactatttaaaaaacaagaataacatttttagcatctttattcaaggagatttatggacttcaatttgtctatcaaacattaaatagctttttattacaacctctaactaaaaaaaaaaaaaaaaa

SEQ ID NO: 2852 - DNA, 1292 bp, Homo sapiens
acgtgtgcgtaggagcgcaccggaagcgcccggctggaggcgcggcggcagggctgggcggcggcggcggcggcggtcatggaacgccaagaggagtctctgtccgcgcggccggccctggagaccgaggggctgcgcttcctgcacaccacggtgggctccctgctggccacctatggctggtacatcgtcttcagctgcatccttctctacgtggtctttcagaagctttccgcccggctaagagccttgaggcagaggcagctggaccgagctgcggctgctgtggaacctgatgttgttgttaaacgacaagaagctttagcagctgctcgactgaaaatgcaagaagaactaaatgcgcaagttgaaaagcataaggaaaaactgaaacaacttgaagaagaaaaaaggagacagaagattgaaatgtgggacagcatgcaagaaggaaaaagttacaaaggaaatgcaaagaagccccaggaggaagacagtcctgggccttccacttcatctgtcctgaaacggaaatcggacagaaagcctttgcggggaggaggttataacccgttgtctggtgaaggaggcggagcttgctcctggagacctggacgcagaggcccgtcatctggcggatgaggctaagaatcttgtagaatattccgtggttgcttcttgaccaagggaaatacagtctggctgtgagagacttaaaatctcttgaggagcgctctggagaatggctgaaggagaggaaacaggagccttgagcagtgtaattacaaacaaataggttggcatagtcttaagtctttgagtctagagagatttgagttttgttttgcctgtggaggcaattgggggtttcaggtcaaagagagggtcagtggaaacaagggtgggccttgtgaggtgtggggaagccctgggaccctcactccccttccagtgtgtaactggattggctcccaccagcccagaagatttacgacgtgggaaatggtatacttggattaaaatatttcatccagatttgtttacatctagagagaaccccttgtaggttataaggaaactttttaacattcttccttgaatatattttctgtagctgaaaatgtttgtgaagtggctgtcaactacacatcgcatgagtagaggggctctgggtcggggtttcatatgcagcagagcagctcccttgctgccgtccatcaagagccctcaacacaagagtttgttataaatagaaataaacgacaaaaagtagaggggtatgtttaagtaca

SEQ ID NO: 2853 - DNA, 3213 bp, Homo sapiens
atgtgcttcagtttcataatgcctcctgctatggcagacatccttgacatctgggcggtggattcacagatagcatctgatggctccatacctgtggatttccttttgcccactgggatttatatccagttggaggtacctcgggaagctaccatttcttatattaagcagatgttatggaagcaagttcacaattacccaatgttcaacctccttatggatattgactcctatatgtttgcatgtgtgaatcagactgctgtatatgaggagcttgaagatgaaacacgaagactctgtgatgtcagaccttttcttccagttctcaaattagtgacaagaagttgtgacccaggggaaaaattagactcaaaaattggagtccttataggaaaaggtctgcatgaatttgattccttgaaggatcctgaagtaaatgaatttcgaagaaaaatgcgcaaattcagcgaggaaaaaatcctgtcacttgtgggattgtcttggatggactggctaaaacaaacatatccaccagagcatgaaccatccatccctgaaaacttagaagataaactttatgggggaaagctcatcgtagctgttcattttgaaaactgccaggacgtgtttagctttcaagtgtctcctaatatgaatcctatcaaagtaaatgaattggcaatccaaaaacgtttgactattcatgggaaggaagatgaagttagcccctatgattatgtgttgcaagtcagcgggagagtagaatatgtttttggtgatcatccactaattcagttccagtatatccggaactgtgtgatgaacagagccctgccccattttatacttgtggaatgctgcaagatcaagaaaatgtatgaacaagaaatgattgccatagaggctgccataaatcgaaattcatctaatcttcctcttccattaccaccaaagaaaacacgaattatttctcatgtttgggaaaataacaaccctttccaaattgtcttggttaagggaaataaacttaacacagaggaaactgtaaaagttcatgtcagggctggtctttttcatggtactgagctcctgtgtaaaaccatcgtaagctcagaggtatcagggaaaaatgatcatatttggaatgaaccactggaatttgatattaatatttgtgacttaccaagaatggctcgattatgttttgctgtttatgcagttttggataaagtaaaaacgaagaaatcaacgaaaactattaatccctctaaatatcagaccatcaggaaagctggaaaagtgcattatcctgtagcgtgggtaaatacgatggtttttgactttaaaggacaattgagaactggagacataatattacacagctggtcttcatttcctgatgaactcgaagaaatgttgaatccaatgggaactgttcaaacaaatccatatactgaaaatgcaacagctttgcatgttaaatttccagagaataaaaaacaaccttattattaccctcccttcgataagattattgaaaaggcagctgagattgcaagcagtgatagtgctaatgtgtcaagtcgaggtggaaaaaagtttcttcctgtattgaaagaaatcttggacagggatcccttgtctcaactgtgtgaaaatgaaatggatcttatttggactttgcgacaagactgccgagagattttcccacaatcactgccaaaattactgctgtcaatcaagtggaataaacttgaggatgttgctcagcttcaggcgctgcttcagatttggcctaaactgcccccccgggaggccctagagcttctggatttcaactatccagaccagtacgttcgagaatatgctgtaggctgcctgcgacagatgagtgatgaagaactttctcaatatcttttacaactggtgcaagtgttaaaatatgagccttttcttgattgtgccctctctagattcctattagaaagagcacttggtaatcggaggatagggcagtttctattttggcatcttaggtcagaagtgcacattcctgctgtctcagtacaatttggtgtcatccttgaagcatactgccggggaagtgtggggcacatgaaagtgctttctaagcaggttgaagcactcaataagttaaaaactttaaatagtttaatcaaactgaatgccgtgaagttaaacagagccaaagggaaggaggccatgcatacctgtttaaaacagagtgcttaccgggaagccctctctgacctgcagtcacccctgaacccatgtgttatcctctcagaactctatgttgaaaagtgcaaatacatggattccaaaatgaagcctttgtggctggtatacaataacaaggtatttggtgaggattcagttggagtgatttttaaaaatggtgatgatttacgacaggatatgttgacactccaaatgttgcgcttgatggatttactctggaaagaagctggtttggatcttcggatgttgccttatggctgtttagcaacaggagatcgctctggcctcattgaagttgtgagcacctctgaaacaattgctgacattcagctgaacagtagcaatgtggctgctgcagcagccttcaacaaagatgcccttctgaactggcttaaagaatacaactctggggatgacctggaccgagccattgaggaatttacactgtcctgtgctggctactgtgtagcttcttatgtccttgggattggtgacagacatagtgacaacatcatggtcaaaaaaactggccagctcttccacattgactttggacatattcttggaaatttcaaatctaagtttggcattaaaagggagcgagtgccttttattcttacctatgatttcatccatgtcattcaacaaggaaaaacaggaaatacagaaaagtttggccggttccgccagtgttgtgaggatgcatatctgattttacgacggcatgggaatctcttcatcactctctttgcgctgatgttgactgcagggcttcctgaactcacatcagtcaaagatatacagtatcttaaggactctcttgcattagggaagagtgaagaagaagcactcaaacagtttaagcaaaaatttgatgaggcgctcagggaaagctggactactaaagtgaactggatggcccacacagttcggaaagactacagatcttaa

SEQ ID NO: 2854 - DNA, 4210 bp, Homo sapiens
atggcggccggcaagagcggcggtagcgcaggggagattacttttctggaagctttggctagatcagagtctaagagagatggaggttttaaaaataattggagctttgatcatgaagaagaaagtgaaggagatacagataaagatgggacaaatctgctcagtgtggatgaagatgaggattctgaaacctcaaaaggaaaaaagttaaatcgtcgatctgaaattgttgctaatagctctggtgaattcatcttgaagacatatgtaagacgaaacaagtctgaaagttttaaaactttgaaaggcaacccaattggacttaacatgttgagcaacaataagaaattgagtgaaaatatgcaaaatacgtcattatgttctggaactgtagttcatggtagacgttttcatcatgctcatgcacagataccagtagtaaaaacagcagcccaaagcagtctggaccgaaaagaaaggaaagaatacccacctcatgtccaaaaagttgaaattaatcctgtaaggttaagtcggctccaaggtgttgaacgtataatgaagaaaacagaagagtccgaatcacaagtggagcctgaaattaagaggaaagtacaacagaaacggcactgtagtacctatcagcctactcctcctctatctcctgcttcaaaaaaatgtttaacccatttagaggatttgcaaagaaattgcagacaagctattactttgaatgagtctactggaccattattaagaacgtcaattcatcagaattctggaggacagaagtcacaaaacacaggattaacaaccaagaagttttatggcaacaatgtggaaaaggttccaattgatattattgtgaattgtgatgacagtaaacacacttatttacagactaatggaaaagtcattttacctggggcaaaaatacccaaaatcacaaacttgaaagaaaggaaaacaagtttgtcagacctaaatgatccaatcattttgtccagtgatgatgatgatgacaacgacagaactaacagaagagaaagcatatctcctcagcctgctgattcagcatgttcttcccctgcaccatccactggaaaagtagaagcagcactaaatgaaaatacttgcagagcagagcgtgaactacgaagcattccagaagactcagagttaaatacagttacattgccaagaaaagcaagaatgaaagaccagtttggcaattctattatcaacacacctctgaaacgtcgtaaagtgttttctcaagaacctccagatgctttagctttaagctgccaaagttcctttgacagtgtcattttaaactgtcgaagtatacgagtaggaacactcttccggctgttaatagagcctgtaattttttgtttagattttatcaagatacagctagacgaaccagaccatgatcctgtagagattatattaaatacctctgatctaactaaatgtgaatggtgtaatgtccgaaaattacctgtagtgtttcttcaagcaattccagcagtttatcaaaagctgagcatccaactgcaaatgaataaggaggataaagtttggaatgattgtaaaggagtaaataaattaacaaatttagaagaacaatatataattttaatttttcaaaatggccttgatcctccggcaaatatggtatttgaaagtatcattaatgaaattggtataaagaataacatctccaatttttttgcgaaaattccctttgaagaagctaatggcagacttgttgcctgtacaagaacctatgaagagagcatcaaaggaagttgtgggcaaaaggaaaacaaaattaaaactgtatcatttgaatctaaaatacaacttagaagcaaacaagaatttcagttttttgatgaagaagaagaaactggagaaaaccacaccatcttcattggcccagtagaaaagttgatagtatatccaccacctccagctaagggaggcatctctgttaccaatgaggacctgcactgtctaaatgaaggagaatttttaaatgatgttattatagacttttatttgaaatacttggtgcttgaaaaactgaagaaggaagacgctgaccgaattcatatattcagttcttttttctataaacgccttaatcagagagagaggagaaatcatgaaacaactaatctgtcaatacagcaaaaacggcatgggagagtaaaaacatggacccggcacgtagatatttttgagaaggattttatttttgtaccccttaatgaagctgcacactggtttttggctgttgtttgtttccccggtttggaaaaaccaaagtatgaacctaatcctcattaccatgaaaatgctgtcatacagaaatgttcaactgtagaggacagttgtatttcttcttcagccagtgaaatggagagttgttcacaaaactcttctgccaagcctgtaattaagaagatgctaaacaaaaaacattgcatagctgtaattgattccaatcctgggcaggaagaaagtgaccctcgttataagagaaacatatgcagtgtaaaatacagtgtgaaaaaaataaatcatactgcgagtgaaaatgaagaattcaataaaggagaatctacatcccagaaagttgctgataggactaaaagtgagaatggcctacagaatgaaagtttaagttccacacatcatacagatggcttaagcaaaatcagactaaactatagcgatgaatcacctgaagctggtaaaatgcttgaagatgaactcgtcgacttctcagaagatcaggataaccaggatgatagcagtgacgatggattcctcgctgatgacaactgcagttcagaaataggacagtggcatttaaagcctactatctgtaaacaaccttgtatcctacttatggactcactccgaggcccttctcggtcaaatgttgtcaaaattttaagagagtatttagaagtggaatgggaagttaaaaaaggaagcaaaagaagtttttccaaagatgttatgaagggctctaatccaaaagtaccacagcaaaacaacttcagtgactgtggtgtatatgtattgcagtatgtagagagcttttttgagaatccaattctcagttttgaactacctatgaatttggcaaactggtttcctccaccaagaatgagaacaaaaagagaagaaatccgaaacataattctgaagctacaggaagatcagagcaaagagaaaagaaagcataaggacacttactcaacagaagcacctttaggcgaaggaacagaacaatgtgtcaatagtatctcagattgaccatttctgttacttgtcatttctactttcagaaactaaatgactttcaaatttgggtatagacaataaagaactgaagtgctcactactcagtgatttggaaattttgatgcttgtataaatgtcagataattaatttccaaaggcgtatgtattaagtaaaagtctgtaaatatgttaatgaggccaatttttccagcatttataattatttttttcacttgttaggaagcttttgttatgtattttctgttaatagtacctaaaattgcaacttctaaacccaaataaaaagaaaatatttataggaggaaatgattaatttgatattctttagtgaacttgtttaattcctcagtgggtgtgacatatttcatgggaatattcaaatatctatggtaatattttgaccctttatatttgttctaaaataagtcaaaatgtgaaaataatattaaatctaagatattttgaactaagcatctttatatgcttgtgtaacaggaacaaagtaacagcctttcaattcatatactgccttgtgttcagtgaacccaagaaatgtaataaatatttgtaattttacacaaatatttaagaggaaagagtattaagagcaattcaaaaaaagtaaccttatactactaaaaaaaaaattcttgcatatattatcatcaaatgcatttttgaagacatcaaagactcaggttaaaactattttggtaagtgcagcttgaatttcaaatatcccgtgttacctttctctattacagcttaaagtatgctacaatctgtgtcatatagttaattgataagcatttttaatctgtgtaaacacaggaatttaaataggaatttactatttttttat

SEQ ID NO: 2855 - DNA, 4539 bp, Homo sapiens
acgtcatcgccgcgcgccggcttgccaggagctggagggggaggtaggcggggcggcgcgtgacctaaggcctctctgccgcgcgcgcaggtacggggcagaagtcgcaggtacccagctgctgcccacatttctggtccagagtcccgaaccccgagcactgggatgcctggctactccgagccaaggcactgatgtttgaactggaaacttcaaaacgtttaataagagtcttcaggatgggtttgaactagacaagctagaaatttctttagaacaccagctctagcatgcatctcccacttttggctttcctggagaggagcttgaagaggtggttctgcagacagccacagtgatacttaggaaaccagaggaatggatttgacttttctgctaggattctctgttatagtttctccctgagttgtaagaggcatggaaatatacatgaaactgaagaacctgcaaggaagggaagtggaactttccatgctgagtgaaaactaaccaagtggcagttgtgactgaaaacactgaaacctaccacgtccagattcactggattgggggatagaggaacggtcacagctagggagaaagaagtgataccggaaaagaaaacctaaatgaagagaatgaggatgactgcacagtagatggccacctctacctccacagaggcaaagtcagcctcgtggtggaattatttttttctttatgatggttccaaggtaaaggaagaaggcgatccaacaagagctggcatttgttacttttatccttcccagaccctgctagaccaacaggagttgctttgtggacagattgctggagttgtccgctgtgtttctgacatttctgactctcctcctactcttgttcgtctgagaaaactgaagtttgccataaaagttgatggagattacctttgggtgctgggctgtgctgtggagctccctgatgtcagctgcaagcggtttctggatcagctagttggattctttaatttttacaatggacctgtttccctagcttatgagaactgttctcaggaagaactgagcacggagtgggacaccttcatcgagcaaattctgaaaaacaccagtgatctgcataagattttcaattccctctggaacttggaccaaactaaagtggagcccctgttgttgctgaaggcagcccgcattctgcagacctgccagcgctcgcctcacattctcgctggctgcatcctctataaaggactgattgtcagcacccaactcccgccctccctcaccgccaaggtcctgcttcaccgaacagcacctcaggagcagagactccctacgggagaggatgccccgcaggaacatggagcggcattgcccccgaatgtccagattatccctgtttttgtgaccaaagaggaagccattagtctccacgagttcccggtggaacagatgacaaggtctctagcatctccagcaggactccaggatggttcagcccagcaccatccaaagggtgggagcacatctgccctgaaagaaaacgccactggccatgtggaatccatggcctggaccaccccagatcccacatcccctgacgaagcttgtccagatggcaggaaggagaacggatgcttgtctggccatgatctggagagcatcaggcccgcaggactgcacaactctgccaggggtgaggttcttggcctcagctcctccctggggaaggaactagtctttctccaagaagaactcgacttgtctgaaatccacattccagaggctcaggaagtggaaatggcctcaggtcattttgccttcctacatgtgcctgttccagatggcagggctccttactgcaaggcatctctcagcgcctccagcagcctggaacccacgcctcctgaggacacagccatcagcagcttgcgccctccctctgctcctgagatgctgacccagcatggagcccaagagcagctcgaagaccatcctggccatagcagccaagcccccattcccagagcagaccctctccccagaaggacccgcaggcccttgttattgcctcgcttagatccaggacagagaggaaacaagcttcccacgggggaacaaggcctggatgaggatgttgatggggtctgtgaaagccacgcagcccctggtctggaatgcagttcaggctcagcaaactgtcagggtgctggcccctctgcagatggaatcagctccaggctgacaccagcagagtcctgcatggggctcgtgaggatgaatctctacactcactgcgtcaaagggctggtgctgtccctgctggctgaggagccgctgctgggagacagcgcagccatagaggaagtgtaccacagcagcctggcttcactgaatgggctggaagtccacctgaaagagacgctgcccagggatgaggcagcctccacgagcagcacctacaacttcacacattacgaccgcattcagagcttgctgatggcaaacctgccgcaggtggccaccccgcaggatcgccgcttcctccaggccgtcagcctgatgcatagcgaatttgcccagctgcccgcgctttatgaaatgactgtcagaaatgcctccacggctgtgtacgcctgttgcaaccccatccaggagacatatttccagcagctggcacctgcagcacggagctccggcttcccaaaccctcaggatggcgccttcagcctctccggcaaagcaaagcagaagctgctgaagcacggggtgaacttgctctgaactgcacccaggaggtgactgggaaggagaaaaccagcaaaggaagctctgccttttataattgaaaaggcccctctattttatttttcttgaaaacattcccttttttaggaaccaaatgatatttgagtttttgttattccttttgcagattgggatgtgttttgggggcaggggttagttcttcaggtcggcagacccagagcacttgataaagaactgtatttaatcggtagtgttggggccgggacgggcttggctccctctctgccatactgagcctgaggtatttcatatctcctgctgttccatcccagcttgaattggtgccacaagcttccaagttggcattttttctagaacctgatcgtccactagcccagagtgtgtgtgttcaacccccacaccaggtggtggtaggcggtgtgactgcacagcgaggtgccggatctgtgagcaggccgactccactcccacgccgcaggtaggtttctccagtgcgctcttgctgggaggtccggatcgttcctgcagggaagcggcagcacacggagaccacttggttgaattctgttggaactctactcaaatctaggggcgtcttctttggacccacaatgggggcaagccttaataatatggaagggagtttgggctttagagatccctttataaaagctctgggggctgagccctgagaattcagtgacaacaggaccaacctgcgctgcctttgactacaagtgggccgtgcagctggttcctctcgagcgagtgtccctaaataggagtttacaagatgtctgggggtaaaagcactgtgcttttcagtggtggctgcgtgaaagggagcgacactcagctgtgtgttcctgggcttgtgtggtacttagaacctcagttctattacgttatagtcagacatttttttgacagtatgagacagactgcaggatgaaaatatttgtcaaaatcttaactgaatgtttactggaagtacttgagattccatttgagagttgtattgttaataatttcatgtcagtgaactgatatctgatgtttatgatatggtgtctttttcttgaaacaagcttccaagggctagaaataaaatagccaaaaaatgctggagttctgagtaattaaatggcagcatttttttgtgacaaaggtaagggttaagacagtgtgtgtgtgtgtgtgtgtgtgtgtgtgtgtgtgtgtgcgcgcgcgcgcgcgcgcgtaacgtgggcgcatccctcttttccttccctgggttcagtgtggctgggtaaggaccgtctgtttgtagggctgccaggctgcagcctgctgctccagggagcaccagctgcagctgatccaatacaccaagcctgtgtctccctcttctatcacctctctccaggatctctgctgtctcttggatcccatctgcctagatggaagaggatcctatccgaagctaggataaatgttgtcttactcctctgctatgttctcccagaaaaaattgattacaagttctctgctgtggttgctgcagctccaggaagtccccgcaatgtctcacgttgtctttgaccagtggtccccagtaccaggccagcgaagacaactttataatgtcatttgtgttgtgaaaattcttccactgacccaaaatggaaccgtacaaagcctatccgtgtatatggaaaagtctcatgcacctggattaactcagaaaaagtaaagtcctgaaacttca

SEQ ID NO: 2856 - DNA, 4069 bp, Homo sapiens
gcagatggtctaacggctggatagaggcatatttttagtttgaatttcctgcgcttacagaatggttttatctaatttgtagctactggggttctttattctctggggccacctgaaggctttcaaacacagtaataagccctcctcgggctgggaaacaggaagctgtgttttaaatgccgtgatcactggattaaaggaaacatggctccactctgttctcttgccaggtggaattatttttttctttatgatggttccaaggtaaaggaagaaggcgatccaacaagagctggcatttgttacttttatccttcccagaccctgctagaccaacaggagttgctttgtggacagattgctggagttgtccgctgtgtttctgacatttctgactctcctcctactcttgttcgtctgagaaaactgaagtttgccataaaagttgatggagattacctttgggtgctgggctgtgctgtggagctccctgatgtcagctgcaagcggtttctggatcagctagttggattctttaatttttacaatggacctgtttccctagcttatgagaactgttctcaggaagaactgagcacggagtgggacaccttcatcgagcaaattctgaaaaacaccagtgatctgcataagattttcaattccctctggaacttggaccaaactaaagtggagcccctgttgttgctgaaggcagcccgcattctgcagacctgccagcgctcgcctcacattctcgctggctgcatcctctataaaggactgattgtcagcacccaactcccgccctccctcaccgccaaggtcctgcttcaccgaacagcacctcaggagcagagactccctacgggagaggatgccccgcaggaacatggagcggcattgcccccgaatgtccagattatccctgtttttgtgaccaaagaggaagccattagtctccacgagttcccggtggaacagatgacaaggtctctagcatctccagcaggactccaggatggttcagcccagcaccatccaaagggtgggagcacatctgccctgaaagaaaacgccactggccatgtggaatccatggcctggaccaccccagatcccacatcccctgacgaagcttgtccagatggcaggaaggagaacggatgcttgtctggccatgatctggagagcatcaggcccgcaggactgcacaactctgccaggggtgaggttcttggcctcagctcctccctggggaaggaactagtctttctccaagaagaactcgacttgtctgaaatccacattccagaggctcaggaagtggaaatggcctcaggtcattttgccttcctacatgtgcctgttccagatggcagggctccttactgcaaggcatctctcagcgcctccagcagcctggaacccacgcctcctgaggacacagccatcagcagcttgcgccctccctctgctcctgagatgctgacccagcatggagcccaagagcagctcgaagaccatcctggccatagcagccaagcccccattcccagagcagaccctctccccagaaggacccgcaggcccttgttattgcctcgcttagatccaggacagagaggaaacaagcttcccacgggggaacaaggcctggatgaggatgttgatggggtctgtgaaagccacgcagcccctggtctggaatgcagttcaggctcagcaaactgtcagggtgctggcccctctgcagatggaatcagctccaggctgacaccagcagagtcctgcatggggctcgtgaggatgaatctctacactcactgcgtcaaagggctggtgctgtccctgctggctgaggagccgctgctgggagacagcgcagccatagaggaagtgtaccacagcagcctggcttcactgaatgggctggaagtccacctgaaagagacgctgcccagggatgaggcagcctccacgagcagcacctacaacttcacacattacgaccgcattcagagcttgctgatggcaaacctgccgcaggtggccaccccgcaggatcgccgcttcctccaggccgtcagcctgatgcatagcgaatttgcccagctgcccgcgctttatgaaatgactgtcagaaatgcctccacggctgtgtacgcctgttgcaaccccatccaggagacatatttccagcagctggcacctgcagcacggagctccggcttcccaaaccctcaggatggcgccttcagcctctccggcaaagcaaagcagaagctgctgaagcacggggtgaacttgctctgaactgcacccaggaggtgactgggaaggagaaaaccagcaaaggaagctctgccttttataattgaaaaggcccctctattttatttttcttgaaaacattcccttttttaggaaccaaatgatatttgagtttttgttattccttttgcagattgggatgtgttttgggggcaggggttagttcttcaggtcggcagacccagagcacttgataaagaactgtatttaatcggtagtgttggggccgggacgggcttggctccctctctgccatactgagcctgaggtatttcatatctcctgctgttccatcccagcttgaattggtgccacaagcttccaagttggcattttttctagaacctgatcgtccactagcccagagtgtgtgtgttcaacccccacaccaggtggtggtaggcggtgtgactgcacagcgaggtgccggatctgtgagcaggccgactccactcccacgccgcaggtaggtttctccagtgcgctcttgctgggaggtccggatcgttcctgcagggaagcggcagcacacggagaccacttggttgaattctgttggaactctactcaaatctaggggcgtcttctttggacccacaatgggggcaagccttaataatatggaagggagtttgggctttagagatccctttataaaagctctgggggctgagccctgagaattcagtgacaacaggaccaacctgcgctgcctttgactacaagtgggccgtgcagctggttcctctcgagcgagtgtccctaaataggagtttacaagatgtctgggggtaaaagcactgtgcttttcagtggtggctgcgtgaaagggagcgacactcagctgtgtgttcctgggcttgtgtggtacttagaacctcagttctattacgttatagtcagacatttttttgacagtatgagacagactgcaggatgaaaatatttgtcaaaatcttaactgaatgtttactggaagtacttgagattccatttgagagttgtattgttaataatttcatgtcagtgaactgatatctgatgtttatgatatggtgtctttttcttgaaacaagcttccaagggctagaaataaaatagccaaaaaatgctggagttctgagtaattaaatggcagcatttttttgtgacaaaggtaagggttaagacagtgtgtgtgtgtgtgtgtgtgtgtgtgtgtgtgtgtgtgcgcgcgcgcgcgcgcgcgtaacgtgggcgcatccctcttttccttccctgggttcagtgtggctgggtaaggaccgtctgtttgtagggctgccaggctgcagcctgctgctccagggagcaccagctgcagctgatccaatacaccaagcctgtgtctccctcttctatcacctctctccaggatctctgctgtctcttggatcccatctgcctagatggaagaggatcctatccgaagctaggataaatgttgtcttactcctctgctatgttctcccagaaaaaattgattacaagttctctgctgtggttgctgcagctccaggaagtccccgcaatgtctcacgttgtctttgaccagtggtccccagtaccaggccagcgaagacaactttataatgtcatttgtgttgtgaaaattcttccactgacccaaaatggaaccgtacaaagcctatccgtgtatatggaaaagtctcatgcacctggattaactcagaaaaagtaaagtcctgaaacttca

SEQ ID NO: 2857 - DNA, 2950 bp, Homo sapiens
acgtcatcgccgcgcgccggcttgccaggagctggagggggaggtaggcggggcggcgcgtgacctaaggcctctctgccgcgcgcgcagagccaaggcactgatgtttgaactggaaacttcaaaacgtttaataagagtcttcaggatgggtttgaactagacaagctagaaatttctttagaacaccagctctagcatgcatctcccacttttggctttcctggagaggagcttgaagaggtggttctgcagacagccacagtgatacttaggaaaccagaggaatggatttgacttttctgctaggattctctgttatagtttctccctgagttgtaagaggcatggaaatatacatgaaactgaagaacctgcaaggaagggaagtggaactttccatgctgagtgaaaactaaccaagtggcagttgtgactgaaaacactgaaacctaccacgtccagattcactggattgggggatagaggaacggtcacagctagggagaaagaagtgataccggaaaagaaaacctaaatgaagagaatgaggatgactgcacagtagatggccacctctacctccacagaggcaaagtcagcctcgtggtggaattatttttttctttatgatggttccaaggtaaaggaagaaggcgatccaacaagagctggcatttgttacttttatccttcccagaccctgctagaccaacaggagttgctttgtggacagattgctggagttgtccgctgtgtttctgacatttctgactctcctcctactcttgttcgtctgagaaaactgaagtttgccataaaagttgatggagattacctttgggtgctgggctgtgctgtggagctccctgatgtcagctgcaagcggtttctggatcagctagttggattctttaatttttacaatggacctgtttccctagcttatgagaactgttctcaggaagaactgagcacggagtgggacaccttcatcgagcaaattctgaaaaacaccagtgatctgcataagattttcaattccctctggaacttggaccaaactaaagtggagcccctgttgttgctgaaggcagcccgcattctgcagacctgccagcgctcgcctcacattctcgctggctgcatcctctataaaggactgattgtcagcacccaactcccgccctccctcaccgccaaggtcctgcttcaccgaacagcacctcaggagcagagactccctacgggagaggatgccccgcaggaacatggaaaatggatgttatggagcttcaagaatcgagttacccaccagaaccctaatggagcggcattgcccccgaatgtccagattatccctgtttttgtgaccaaagaggaagccattagtctccacgagttcccggtggaacagatgacaaggtctctagcatctccagcaggactccaggatggttcagcccagcaccatccaaagggtgggagcacatctgccctgaaagaaaacgccactggccatgtggaatccatggcctggaccaccccagatcccacatcccctgacgaagcttgtccagatggcaggaaggagaacggatgcttgtctggccatgatctggagagcatcaggcccgcaggactgcacaactctgccaggggtgaggttcttggcctcagctcctccctggggaaggaactagtctttctccaagaagaactcgacttgtctgaaatccacattccagaggctcaggaagtggaaatggcctcaggtcattttgccttcctacatgtgcctgttccagatggcagggctccttactgcaaggcatctctcagcgcctccagcagcctggaacccacgcctcctgaggacacagccatcagcagcttgcgccctccctctgctcctgagatgctgacccagcatggagcccaagagcagctcgaagaccatcctggccatagcagccaagcccccattcccagagcagaccctctccccaaaagcactgtgcttttcagtggtggctgcgtgaaagggagcgacactcagctgtgtgttcctgggcttgtgtggtacttagaacctcagttctattacgttatagtcagacatttttttgacagtatgagacagactgcaggatgaaaatatttgtcaaaatcttaactgaatgtttactggaagtacttgagattccatttgagagttgtattgttaataatttcatgtcagtgaactgatatctgatgtttatgatatggtgtctttttcttgaaacaagcttccaagggctagaaataaaatagccaaaaaatgctggagttctgagtaattaaatggcagcatttttttgtgacaaaggtaagggttaagacagtgtgtgtgtgtgtgtgtgtgtgtgtgtgtgtgtgtgtgcgcgcgcgcgcgcgcgcgtaacgtgggcgcatccctcttttccttccctgggttcagtgtggctgggtaaggaccgtctgtttgtagggctgccaggctgcagcctgctgctccagggagcaccagctgcagctgatccaatacaccaagcctgtgtctccctcttctatcacctctctccaggatctctgctgtctcttggatcccatctgcctagatggaagaggatcctatccgaagctaggataaatgttgtcttactcctctgctatgttctcccagaaaaaattgattacaagttctctgctgtggttgctgcagctccaggaagtccccgcaatgtctcacgttgtctttgaccagtggtccccagtaccaggccagcgaagacaactttataatgtcatttgtgttgtgaaaattcttccactgacccaaaatggaaccgtacaaagcctatccgtgtatatggaaaagtctcatgcacctggattaactcagaaaaagtaaagtcctgaaacttca

SEQ ID NO: 2858 - DNA, 4180 bp, Homo sapiens
ccagggtgatgctgaagatgatgaccttcttccaaggcctctagagccatcagcctgtgccaggcaccctcgacttgcctagaggcccccaaaagttgcagtccacatcagaggcagagtcagaggcctccatgtcggaggcctcctctgaggacctggtgccacccctggaggctggggcagccccatatagggaggaggaagaggcggcgaagaagaagaaggagaagaagaagaagtccaaaggcctggccaatgtgttctgcgtcttcaccaaagggaagaagaagaagggtcagcccagctcagcggagcccgaggacgcagccgggtccaggcaggggctggatggcccgccccccacagtggaggagctgaaggcggcgctggagcgcgggcagctggaggcggcgcggccgctgctggcgctggagcgggagctggcggcggcggcggcggcgggcggtgtgagcgaggaggagctggtgcggcgccagagcaaggtggaggcgctgtacgagctgctgcgcgaccaggtgctgggcgtgctgcggcggccgctggaggcgccgcccgagcggctgcgccaggcgctggccgtggtggcggagcaggagcgcgaggaccgccaggcggcggcggcggggccggggacctcggggctggcggccacgcgcccgcggcgctggctgcagctgtggcggcgcggcgtggcggaggcggccgaggagcgcatgggccagcggccggccgcgggcgccgaggtccccgagagcgtctttctgcacttgggccgcaccatgaaggaggacctggaggccgtggtggagcggctgaagccgctgttccccgccgagttcggcgtcgtggcggcctacgccgagagctaccaccagcacttcgcggcccacctggccgccgtggcgcagttcgagctgtgcgagcgcgacacctacatgctgctgctctgggtgcagaacctctaccccaatgacatcatcaacagccccaagctggtgggtgagctgcagggtatggggctcgggagcctcctgccccccaggcagatccgactgctggaggccacattcctgtccagtgaggcggccaatgtgagggagttgatggaccgagctctggagctagaggcacggcgctgggctgaggatgtgcctccccagaggctggacggccactgccacagcgagctggccatcgacatcatccagatcacctcccaggcccaggccaaggccgagagcatcacgctggacttgggctcacagataaagcgggtgctgctggtggagctgcctgcgttcctgaggagctaccagcgcgcctttaatgaatttctggagagaggcaagcagctgacgaattacagggccaatgttattgccaacatcaacaactgcctgtccttccggatgtccatggagcagaattggcaggtaccccaggacaccctgagcctcctgctgggccccctgggtgagctcaagagccacggctttgacaccctgctccagaacctgcatgaggacctgaagccactgttcaagaggttcacgcacacccgctgggcggcccctgtggagaccctggaaaacatcatcgccactgtagacacgaggctgcctgagttctcagagctgcagggctgtttccgggaggagctcatggaggccttgcacctgcacctggtgaaggagtacatcatccaactcagcaaggggcgcctggtcctcaagacggccgagcagcagcagcagctggctgggtacatcctggccaatgctgacaccatccagcacttctgcacccagcacggctccccggcgacctggctgcagcctgctctccctacgctggccgagatcattcgcctgcaggaccccagtgccatcaagattgaggtggccacttatgccacctgctaccctgacttcagcaaaggccacctgagcgctatcctggccatcaaggggaacctatccaacagtgaggtcaagcgcatccggagcatcttggacgtcagcatgggggcgcaggagccctcccggcccctattttcccttataaaggttggttagcttttcctgtggcctgacctgcctgtgagtgcccagcaagccttgggcacaccccgctgggagctgttaagagcagcgctggttctcggttcctcccgggtctcctgtgctctgatgctacttctgcctagccctggcggaggtgcaggccctgtcagctggaactggacagaccttggtttgtttacatgtccgatgggggcaggagctcccatcctgggcagccaaccaggcaacaccaaggactctttgtaaacgatagctgatcgtgtgcacgcaaggaaagaaccaggagggagagtgcagccaggctcagggatccccggacacctctgtccagagcccctccacagtcggcctcatgactgtcctcctcgtgggtggggccgagggccctcttcagctctctggagacaggggccgagcctcacccatctgccctctgcagcccagggccgccgtgagcgggattcagcaatggtggaatggaagacagaactggaagagaaagaaggaaaagatgagctctcgtctggcaggggcttttagggtcctgtggcgagctgtgagcaccgccagcattagacgtcacatccaggtggccccacggcccctacaggctggccctgcaatggggccctgagccctccctcttcatcccccaaggcctcaactagagggtggtcccccgagggcttggtgtctactaccgaagggcccaagacctcctgggtcctctcaggctcccccttccccaaggcagggacaggccctgggggtgccaccgtgggccctgccacccagaagtctggctgaggtctgggcaggggcagggcaagcttgacctctcactgttgaccctttggcctctgtatttgtttcctattgccgtgacaggtttccacaaacttcgtggatcaaaacgaggtcttccagttctgcgggtcagaaggctgacccggggctcaaatctgggtgtcggcagtcctgcactccttctggaggctctaggggagaattcatttctggccttttcatttttagaggctgaccgtaattcttgacttcaggctcctccatcttcagagccagctgtgggtagttgaatctttttcccgtcacctcattgaggcctcccctctcctgcctccctccaccacttttttttttttttttttgagacagggtcttgctgtgttgcccaggctggagtgcagtggcctggtcatggcatcaaggctcactgcagcctggacctcctggttcaagtgatcctcttgtctcagtcccctgagacaatcccccacgcccagctacatattttttgtggatacagggtctcattctgttgcctaggcttgtctggaactcctgggctcaagggatcttgtagccttagcctcctaaagtgctgggattataggcatgagtcactgtacccggcctgctctaccgcttttaaggacgcttatgatcacattgcgcctacccagagaacccaggtcgtctttctattttcaggtcagctgattagccaccttagttccatctgcaactttagttcccactggctgtgtaacctaacatagtcacaggctctggggactgtcacgtggacatctttgggaggccgttattctgcccaccgcaccctccgttcatcccctgccctgccgggcacctcgctctaccccaggaaaatgtgagctcgttttcctgctcggcatgtgctccccctaaggctctgctcctccctgggcctgaaagttccttctcagcctgagagggggcccttcggactcaggcatgactcagcccggctgatgcctctgcagtgctgagtcaggatttggggccggctctcttgggtccgtccccttttcccaggtactgccttacaaagctgtggccaggaagtggccggtataaaggatgcccaaggtctttgtacgtgtgtaggagttagcgtgtttgatattgttaatataataataattattttttagagtactgcttttgtatgtatgttgaacaggatccaggtttttatagcttgatataaaacagaattcaaaagtgaaaaa

SEQ ID NO: 2859 - DNA, 1258 bp, Homo sapiens
ctcgtcaacagctgccgcgcgcaggcttagctcattcctctgacctgccaggaagcagagagacccacagagcaggagggaggcagaaagtggagacggacctgagcccgaggaagaggcaggcagaggctgaggctgattccaccccagcctgcctggacaaccctccttagccgcagccccttccagttccctaggggttctgcccctccccctctctggggcaccagccccccagggtcctgcatcccaccatgtcgatggctgtggaaacctttggcttcttcatggcaactgtggggctgctgatgctgggggtgactctgccaaacagctactggcgagtgtccactgtgcacgggaacgtcatcaccaccaacaccatcttcgagaacctctggtttagctgtgccaccgactccctgggcgtctacaactgctgggagttcccgtccatgctggccctctctgggtatattcaggcctgccgggcactcatgatcaccgccatcctcctgggcttcctcggcctcttgctaggcatagcgggcctgcgctgcaccaacattgggggcctggagctctccaggaaagccaagctggcggccaccgcaggggccctccacattctggccggtatctgcgggatggtggccatctcctggtacgccttcaacatcacccgggacttcttcgaccccttgtaccccggaaccaagtacgagctgggccccgccctctacctggggtggagcgcctcactgatctccatcctgggtggcctctgcctctgctccgcctgctgctgcggctctgacgaggacccagccgccagcgcccggcggccctaccaggctcccgtgtccgtgatgcccgtcgccacctcggaccaagaaggcgacagcagctttggcaaatacggcagaaacgcctacgtgtagcagctctggcccgtgggccccgctgtcttcccactgccccaaggagaggggacctggccggggcccattcccctatagtaacctcaggggccggccacgccccgctcccgtagccccgccccggccacggccccgtgtcttgcactctcatggcccctccaggccaagaactgctcttgggaagtcgcatatctcccctctgaggctggatccctcatcttctgaccctgggttctgggctgtgaaggggacggtgtccccgcacgtttgtattgtgtataaatacattcattaataaatgcatattgtgaccgttc

SEQ ID NO: 2860 - DNA, 1200 bp, Homo sapiens
gaaagtggagacggacctgagcccgaggaagaggcaggcagaggctgaggctgattccaccccagcctgcctggacaaccctccttagccgcagccccttccagttccctaggggttctgcccctccccctctctggggcaccagccccccagggtcctgcatcccaccatgtcgatggctgtggaaacctttggcttcttcatggcaactgtggggctgctgatgctgggggtgactctgccaaacagctactggcgagtgtccactgtgcacgggaacgtcatcaccaccaacaccatcttcgagaacctctggtttagctgtgccaccgactccctgggcgtctacaactgctgggagttcccgtccatgctggccctctctggctccacagactccccagcctcactgtcggggggcactggtctccttgtccggctgatgtctataaagggcccctgtgaagggaggcgtcttgcaagttgcaggttgagcgtccgctgtaaggaggcggtgtgtgtgcagggtatattcaggcctgccgggcactcatgatcaccgccatcctcctgggcttcctcggcctcttgctaggcatagcgggcctgcgctgcaccaacattgggggcctggagctctccaggaaagccaagctggcggccaccgcaggggccctccacattctggccggtaactgggggaaggtgatggggcgggggtccccctcaaccgcagacttcaggctgctttgtcctcatctaatctcctctccaattcccactcctcatgctcacctcccctaccctgctgcatggacacctgctcacccctgcctcatctgtactccccagatctcctggctgcaaatcagcccatcggcagtgtttcttgagctcccagtaggggctggccacggccaggtgtgggagggacttcgaagataagagtgagcggctgcctccgggagcttacatcctagctggggagcagagttagggtgcacgctatggcgcacacacacagtgcacgtccacagtgccataccacggggcatggtggctcatgcctgtaatcccagcactttggtaggctgaggtgggtggattacttgaggtcaggagttcaaaaccagcctggccaacatggtgaaaccctgtctctactaaaaatcccaaaaaaaaaaaaaaaaaaaaaaaaaa

SEQ ID NO: 2861 - DNA, 2473 bp, Homo sapiens
atcagaggaagaggaaggggcggagctgctttgcggccggccgcggagcagtcagccgactacagagaagggtaatcgggtgtccccggcgccgcccggggccctgagggctggctagggtccaggccgggggggacgggacagacgaaccagccccgtgtaggaagcgcgacaatgccccgctacggagcgtcactccgccagagctgccccaggtccggccgggagcagggacaagacgggaccgccggagcccccggactcctttggatgggcctggtgctggcgctggcgctggcgctggcgctggcgctggctctgtctgactctcgggttctctgggctccggcagaggctcaccctctttctccccaaggccatcctgccaggttacatcgcatagtgccccggctccgagatgtctttgggtgggggaacctcacctgcccaatctgcaaaggtctattcaccgccatcaacctcgggctgaagaaggaacccaatgtggctcgcgtgggctccgtggccatcaagctgtgcaatctgctgaagatagcaccacctgccgtgtgccaatccattgtccacctctttgaggatgacatggtggaggtgtggagacgctcagtgctgagcccatctgaggcctgtggcctgctcctgggctccacctgtgggcactgggacattttctcatcttggaacatctctttgcctactgtgccgaagccgccccccaaaccccctagccccccagccccaggtgcccctgtcagccgcatcctcttcctcactgacctgcactgggatcatgactacctggagggcacggaccctgactgtgcagacccactgtgctgccgccggggttctggcctgccgcccgcatcccggccaggtgccggatactggggcgaatacagcaagtgtgacctgcccctgaggaccctggagagcctgttgagtgggctgggcccagccggcccttttgatatggtgtactggacaggagacatccccgcacatgatgtctggcaccagactcgtcaggaccaactgcgggccctgaccaccgtcacagcacttgtgaggaagttcctggggccagtgccagtgtaccctgctgtgggtaaccatgaaagcacacctgtcaatagcttccctccccccttcattgagggcaaccactcctcccgctggctctatgaagcgatggccaaggcttgggagccctggctgcctgccgaagccctgcgcaccctcagaattggggggttctatgctctttccccataccccggtctccgcctcatctctctcaatatgaatttttgttcccgtgagaacttctggctcttgatcaactccacggatcccgcaggacagctccagtggctggtgggggagcttcaggctgctgaggatcgaggagacaaagtgcatataattggccacattcccccagggcactgtctgaagagctggagctggaattattaccgaattgtagccaggtatgagaacaccctggctgctcagttctttggccacactcatgtggatgaatttgaggtcttctatgatgaagagactctgagccggccgctggctgtagccttcctggcacccagtgcaactacctacatcggccttaatcctggttaccgtgtgtaccaaatagatggaaactactccgggagctctcacgtggtcctggaccatgagacctacatcctgaatctgacccaggcaaacataccgggagccataccgcactggcagcttctctacagggctcgagaaacctatgggctgcccaacacactgcctaccgcctggcacaacctggtatatcgcatgcggggcgacatgcaacttttccagaccttctggtttctctaccataagggccacccaccctcggagccctgtggcacgccctgccgtctggctactctttgtgcccagctctctgcccgtgctgacagccctgctctgtgccgccacctgatgccagatgggagcctcccagaggcccagagcctgtggccaaggccactgttttgctagggccccagggcccacatttgggaaagttcttgatgtaggaaagggtgaaaaagcccaaatgctgctgtggttcaaccaggcaagatcatccggtgaaagaaccagtccctgggccccaaggatgccggggaaacaggaccttctcctttcctggagctggtttagctggatatgggagggggtttggctgcctgtgcccaggagctagactgccttgaggctgctgtcctttcacagccatggagtagaggcctaagttgacactgccctgggcagacaagacaggagctgtcgccccaggcctgtgctgcccagccaggaaccctgtactgctgctgcgacctgatgctgccagtctgttaaaataaagataagagacttggactccaaaaaaaaaaaaaaa

SEQ ID NO: 2862 - DNA, 2341 bp, Homo sapiens
atcagaggaagaggaaggggcggagctgctttgcggccggccgcggagcagtcagccgactacagagaagggtaatcgggtgtccccggcgccgcccggggccctgagggctggctagggtccaggccgggggggacgggacagacgaaccagccccgtgtaggaagcgcgacaatgccccgctacggagcgtcactccgccagagctgccccaggtccggccgggagcagggacaagacgggaccgccggagcccccggactcctttggatgggcctggtgctggcgctggcgctggcgctggcgctggcgctggctctgtctgactctcgggttctctgggctccggcagaggctcaccctctttctccccaaggccatcctgccaggttacatcgcatagtgccccggctccgagatgtctttgggtgggggaacctcacctgcccaatctgcaaaggtctattcaccgccatcaacctcgggctgaagaaggaacccaatgtggctcgcgtgggctccgtggccatcaagctgtgcaatctgctgaagatagcaccacctgccgtgtgccaatccattgtccacctctttgaggatgacatggtggaggtgtggagacgctcagtgctgagcccatctgaggcctgtggcctgctcctgggctccacctgtgggcactgggacattttctcatcttggaacatctctttgcctactgtgccgaagccgccccccaaaccccctagccccccagccccaggtgcccctgtcagccgcatcctcttcctcactgacctgcactgggatcatgactacctggagggcacggaccctgactgtgcagacccactgtgctgccgccggggttctggcctgccgcccgcatcccggccaggtgccggatactggggcgaatacagcaagtgtgacctgcccctgaggaccctggagagcctgttgagtgggctgggcccagccggcccttttgatatggtgtactggacaggagacatccccgcacatgatgtctggcaccagactcgtcaggaccaactgcgggccctgaccaccgtcacagcacttgtgaggaagttcctggggccagtgccagtgtaccctgctgtgggtaaccatgaaagcacacctgtcaatagcttccctccccccttcattgagggcaaccactcctcccgctggctctatgaagcgatggccaaggcttgggagccctggctgcctgccgaagccctgcgcaccctcaggtacttatcgtccgtggaaacccaggaagggaaaagaaaggtgcatataattggccacattcccccagggcactgtctgaagagctggagctggaattattaccgaattgtagccaggtatgagaacaccctggctgctcagttctttggccacactcatgtggatgaatttgaggtcttctatgatgaagagactctgagccggccgctggctgtagccttcctggcacccagtgcaactacctacatcggccttaatcctggttaccgtgtgtaccaaatagatggaaactactccgggagctctcacgtggtcctggaccatgagacctacatcctgaatctgacccaggcaaacataccgggagccataccgcactggcagcttctctacagggctcgagaaacctatgggctgcccaacacactgcctaccgcctggcacaacctggtatatcgcatgcggggcgacatgcaacttttccagaccttctggtttctctaccataagggccacccaccctcggagccctgtggcacgccctgccgtctggctactctttgtgcccagctctctgcccgtgctgacagccctgctctgtgccgccacctgatgccagatgggagcctcccagaggcccagagcctgtggccaaggccactgttttgctagggccccagggcccacatttgggaaagttcttgatgtaggaaagggtgaaaaagcccaaatgctgctgtggttcaaccaggcaagatcatccggtgaaagaaccagtccctgggccccaaggatgccggggaaacaggaccttctcctttcctggagctggtttagctggatatgggagggggtttggctgcctgtgcccaggagctagactgccttgaggctgctgtcctttcacagccatggagtagaggcctaagttgacactgccctgggcagacaagacaggagctgtcgccccaggcctgtgctgcccagccaggaaccctgtactgctgctgcgacctgatgctgccagtctgttaaaataaagataagagacttggactccaaaaaaaaaaaaaaa

SEQ ID NO: 2863 - DNA, 1840 bp, Homo sapiens
gtctctggtatctcccgctgagctgctctgttcccggcttagaggaccaggagaagggggagctggaggctggagcctgtaacaccgtggctcgtctcgctctggatggtggtggcaacagagatggcagcgcagctggagtgttaggagggcagcctgagcagtaggattggggctggagcagtaagatggcagccggagcggtttttctggcattgtctgcccagctgctccaagccaggctgatgaaggaggagtcccctgtggtgagctggtggttggagcctgaagacggcacagctctgtgattcatcttctgaggttgtggcagccacggtgatggagacagcagctcaacaggaacaataggagggtacccgtggaggccaagtgcgatgtgcattttgtaagcactttggagccactatcaaatgctgtgaagagaaatgtacccagatgtatcattatccttgtgctgcaggagccggctcctttcaggatttcagtcacatcttcctgctttgtccagaacacattgaccaagctccagaaagatcgaaggaagatgcaaactgtgcagtgtgcgacagcccgggagacctcttagatcagttcttttgtactacttgtggtcagcactatcatggaatgtgcctggatatagcggttactccattaaaacgtgcaggttggcaatgtcctgagtgcaaagtgtgccagaactgcaaacaatcgggagaagatagcaagatgctagtgtgtgatacgtgtgacaaagggtatcatactttttgtcttcaacgaattatgaaatctgtaccaaccaatggctggaaatgcaaatgaataccgaattggaaaaacagatttctaatgaggctgatagtgaagaaatgaaaatgtcttctgaagtgaagcatatttgtggtgaagatcaaattgaagataaaatggaagtgacagaaaacattgaagtcgttacacaccagatcactgtgcagcaagagcaactgcagttgttagaggaacctaaaacagtggtatccaaagaagaatcaaggcctccaaaatttgtcattgaatctgtcactcttccactagaaaccttagtgtccccacatgaggaaagcacttcattatgtcctgaggaacagttggttatagaaaggctacaaggagaaaaggaacagaaataagattctgaactttctactggattgatggactctgaaatgactcctacaattgagggttgtgtgaaagatgtttcataccaaggaggcaaatctataaagttatcatctgagacagagtcatcattttcattatcagcagacataagcaaggcagatgtgtcttcctccccaacaccttcttcagacttgccttcgcatgacatgctgcgtaattacccttcagctcttagttcgtctgctggaaacatcatgccaacaacttacatctcagtcactccaaaaaactggcatgggtaaaccagctattactaagagaaaattttctcctggtagacctcggtccaaacagggccgtgggtctggatttccaggaaagcggagacctcgaggtgcaggactgtcagggcgaggtggccgaggcaagtcaaagctgaaaagtggaatcggagctgttgtattgcctggggtgtctactgcagatatttcatcaaataaggatgatgaagaaaactctatgcacactacggttgtgttgttttctagcagtgacaagttcactttgaatcaggatatgtgtgtagtttgtggcagttttggccaaggagcagaaggaagattacttgcctgttctcagtgtggtcagt

SEQ ID NO: 2864 - DNA, 541 bp, Homo sapiens
gcacttcctgaagctgaaggtcagcatagacaaagggcctcagaatcgcgcaggcgcaattgtgccctggttcgccaagatgtcgttcccaaagtataagccgtcgagcctgcgcactctgcctgagaccctcgacccagccgaatacaacatatctccggaaacccggcgggcgcaagccgagcggttggccataagagcccagctgaaacgagagtacctgcttcagtacaacgatcccaaccgccgagggctcatcgaaaatcctgccttgcttcgttgggcctatgcaagaacaataaatgtctatcctaatttcagacccactcctaaaaactcactcatgggagctctgtgtggatttgggcccctcatcttcatttattatattatcaaaactgagagggataggaaagaaaaacttatccaggaaggaaaattggatcgaacatttcacctctcatattaagtctggcaatgatgactatatgtattcctgcctaaataaatcatctattaatcattaaaaaaaaaaaaaaaa

SEQ ID NO: 2865 - DNA, 1090 bp, Homo sapiens
gttttcagtcatgttgtttctttaagttggtttagccttcctgtatacatgtgataatgatactgttttaaagaacaggtgtgaaagtctaagagtttaatccagactctgcacaagaagttaatctgccaaaccctaggattctccttctgaaagctcagaatatttcttccccttccctatacacacagggctcgaagggttagagaagaaaggcagacaacagcttctgagctttggactaatcacagcctctgttctcagcaggagccccaacactgagaccagaaaagatggtgctatgctttcctcttcttttactgctgctggttctatggggaccagtgtgtccacttcatgcttggcctaagcgtctcaccaaggctcactggtttgaaattcagcatatacagccaagtcctctccaatgcaacagggcaatgagtggcatcaacaattatacccagcactgtaagcatcaaaatacctttctgcatgactctttccagaatgtggctgctgtctgtgatttgctcagcattgtctgcaaaaatcgtcggcacaactgccaccagagctcaaagcctgtcaacatgactgactgcagactcacttcaggaaagtatccccagtgccgctatagtgctgctgcccagtacaaattcttcattgttgcctgtgacccccctcagaagagcgatcccccctacaagttggttcctgtacacttagatagtattctctaaggcatccactgcatttcctttcatttgacatagcttctgttacaattgcatccacgttttcttttcttttgttgattttcttgttcccgtagaagaaagaagaaaggtgtttggagaattcgagtgcctaggatgccagaccagagttgagacaaaaagaaataagattattttctgctttgtagttctgtacttttcgagagaagggaatagggaagacagcaaagaaagattcagatttctaaccctgcaacttttgccaagctttattgccctgtgttcacagcaataaaaccacttcctgctgcattctgaaaaaaaaaaaaaaaaaaaaaaaaaaaaaa

SEQ ID NO: 2866 - DNA, 2880 bp, Homo sapiens
cactgcatgtgtattcgtgagttcgcggttgaacaactgttcctttactctgctccctgtctttgtgctgactgggttacttttttaaacactaggaatggtaatttctactcttctggacttcaaactaagaagttaaagagacttctctgtaaataaacaaatctcttctgctgtccttttgcatttggagacagctttatttcaccatatccaaggagtataactagtgctgtcattatgaatgtgacaagtttattttcctttacaagtccagctgtgaagagacttcttgggtggaaacagggcgatgaagaagaaaaatgggcagagaaagctgttgatgctttggtgaaaaaactgaagaaaaagaaaggtgccatggaggaactggaaaaggccttgagctgcccagggcaaccgagtaactgtgtcaccattccccgctctctggatggcaggctgcaagtctcccaccggaagggactgcctcatgtcatttactgccgtgtgtggcgctggcccgatcttcagagccaccatgaactaaaaccactggaatgctgtgagtttccttttggttccaagcagaaggaggtctgcatcaatccctaccactataagagagtagaaagccctgtacttcctcctgtgctggttccaagacacagcgaatataatcctcagcacagcctcttagctcagttccgtaacttaggacaaaatgagcctcacatgccactcaacgccacttttccagattctttccagcaacccaacagccacccgtttcctcactctcccaatagcagttacccaaactctcctgggagcagcagcagcacctaccctcactctcccaccagctcagacccaggaagccctttccagatgccagctgatacgcccccacctgcttacctgcctcctgaagaccccatgacccaggatggctctcagccgatggacacaaacatgatggcgcctcccctgccctcagaaatcaacagaggagatgttcaggcggttgcttatgaggaaccaaaacactggtgctctattgtctactatgagctcaacaatcgtgtgggtgaagcgttccatgcctcctccacaagtgtgttggtggatggtttcactgatccttccaacaataagaaccgtttctgccttgggctgctctccaatgttaaccggaattccactattgaaaacaccaggcggcatattggaaaaggagttcatctttattatgttggaggggaggtgtatgccgaatgccttagtgacagtagcatctttgtgcaaagtcggaactgcaactaccatcatggatttcatcctactactgtttgcaagatccctagtgggtgtagtctgaaaatttttaacaaccaagaatttgctcagttattggcacagtctgtgaaccatggatttgagacagtctatgagcttacaaaaatgtgtactatacgtatgagctttgtgaagggctggggagcagaataccaccgccaggatgttactagcaccccctgctggattgagatacatctgcacggccccctccagtggctggataaagttcttactcaaatgggttcacctcataatcctatttcatctgtatcttaaatggccccaggcatctgcctctggaaaactattgagccttgcatgtacttgaaggatggatgagtcagacacgattgagaactgacaaaggagccttgataatacttgacctctgtgaccaactgttggattcagaaatttaaacaaaaaaaaaaaaaaacacacacaccttggtaacatactgttgatatcaagaacctgtttagtttacattgtaacattctattgtaaaatcaactaaaattcagacttttagcaggactttgtgtacagttaaaggagagatggccaagccagggacaaattgtctattagaaaacggtcctaagagattctttggtgtttggcactttaaggtcatcgttgggcagaagtttagcattaatagttgttctgaaacgtgttttatcaggtttagagcccatgttgagtcttcttttcatgggttttcataatattttaaaactatttgtttagcgatggttttgttcgtttaagtaaaggttaatcttgatgatatacataataatctttctaaaattgtatgctgaccatacttgctgtcagaataatgctaggcatatgctttttgctaaatatgtatgtacagagtatttggaagttaagaattgattagactagtgaatttaggagtatttgaggtgggtggggggaagagggaaatgacaactgcaaatgtagactatactgtaaaaattcagtttgttgctttaaagaaacaaactgatacctgaattttgctgtgtttccattttttagagatttttatcatttttttctctctcggcattcttttttctcatactcttcaaaaagcagttctgcagctggttaattcatgtaactgtgagagcaaatgaataattcctgctattctgaaattgcctacatgtttcaataccagttatatggagtgcttgaatttaataagcagtttttacggagtttacagtacagaaataggctttaattttcaagtgaattttttgccaaacttagtaactctgttaaatatttggaggatttaaagaacatcccagtttgaattcatttcaaactttttaaatttttttgtactatgtttggttttattttccttctgttaatcttttgtattcacttatgctctcgtacattgagtacttttattccaaaactagtgggttttctctactggaaattttcaataaacctgtcattattgcttactttgattaaaaa

SEQ ID NO: 2867 - DNA, 3056 bp, Homo sapiens
ggcagctgaggagtggaggctgggcagctccgactccctgacgccagcgcgaccagatcaatccaggctccaggagaaagcaggcgggcgggcggagaaaggagaggccgagcggctcaacccgggccgaggctcggggagcggagagtggcgcagcgcccggccgtccggacccgggccgcgagaccccgctcgcccggccactcgtgctcccacacggacgggcgcgccgccaacccggtgctgactgggttacttttttaaacactaggaatggtaatttctactcttctggacttcaaactaagaagttaaagagacttctctgtaaataaacaaatctcttctgctgtccttttgcatttggagacagctttatttcaccatatccaaggagtataactagtgctgtcattatgaatgtgacaagtttattttcctttacaagtccagctgtgaagagacttcttgggtggaaacagggcgatgaagaagaaaaatgggcagagaaagctgttgatgctttggtgaaaaaactgaagaaaaagaaaggtgccatggaggaactggaaaaggccttgagctgcccagggcaaccgagtaactgtgtcaccattccccgctctctggatggcaggctgcaagtctcccaccggaagggactgcctcatgtcatttactgccgtgtgtggcgctggcccgatcttcagagccaccatgaactaaaaccactggaatgctgtgagtttccttttggttccaagcagaaggaggtctgcatcaatccctaccactataagagagtagaaagccctgtacttcctcctgtgctggttccaagacacagcgaatataatcctcagcacagcctcttagctcagttccgtaacttaggacaaaatgagcctcacatgccactcaacgccacttttccagattctttccagcaacccaacagccacccgtttcctcactctcccaatagcagttacccaaactctcctgggagcagcagcagcacctaccctcactctcccaccagctcagacccaggaagccctttccagatgccagctgatacgcccccacctgcttacctgcctcctgaagaccccatgacccaggatggctctcagccgatggacacaaacatgatggcgcctcccctgccctcagaaatcaacagaggagatgttcaggcggttgcttatgaggaaccaaaacactggtgctctattgtctactatgagctcaacaatcgtgtgggtgaagcgttccatgcctcctccacaagtgtgttggtggatggtttcactgatccttccaacaataagaaccgtttctgccttgggctgctctccaatgttaaccggaattccactattgaaaacaccaggcggcatattggaaaaggagttcatctttattatgttggaggggaggtgtatgccgaatgccttagtgacagtagcatctttgtgcaaagtcggaactgcaactaccatcatggatttcatcctactactgtttgcaagatccctagtgggtgtagtctgaaaatttttaacaaccaagaatttgctcagttattggcacagtctgtgaaccatggatttgagacagtctatgagcttacaaaaatgtgtactatacgtatgagctttgtgaagggctggggagcagaataccaccgccaggatgttactagcaccccctgctggattgagatacatctgcacggccccctccagtggctggataaagttcttactcaaatgggttcacctcataatcctatttcatctgtatcttaaatggccccaggcatctgcctctggaaaactattgagccttgcatgtacttgaaggatggatgagtcagacacgattgagaactgacaaaggagccttgataatacttgacctctgtgaccaactgttggattcagaaatttaaacaaaaaaaaaaaaaaacacacacaccttggtaacatactgttgatatcaagaacctgtttagtttacattgtaacattctattgtaaaatcaactaaaattcagacttttagcaggactttgtgtacagttaaaggagagatggccaagccagggacaaattgtctattagaaaacggtcctaagagattctttggtgtttggcactttaaggtcatcgttgggcagaagtttagcattaatagttgttctgaaacgtgttttatcaggtttagagcccatgttgagtcttcttttcatgggttttcataatattttaaaactatttgtttagcgatggttttgttcgtttaagtaaaggttaatcttgatgatatacataataatctttctaaaattgtatgctgaccatacttgctgtcagaataatgctaggcatatgctttttgctaaatatgtatgtacagagtatttggaagttaagaattgattagactagtgaatttaggagtatttgaggtgggtggggggaagagggaaatgacaactgcaaatgtagactatactgtaaaaattcagtttgttgctttaaagaaacaaactgatacctgaattttgctgtgtttccattttttagagatttttatcatttttttctctctcggcattcttttttctcatactcttcaaaaagcagttctgcagctggttaattcatgtaactgtgagagcaaatgaataattcctgctattctgaaattgcctacatgtttcaataccagttatatggagtgcttgaatttaataagcagtttttacggagtttacagtacagaaataggctttaattttcaagtgaattttttgccaaacttagtaactctgttaaatatttggaggatttaaagaacatcccagtttgaattcatttcaaactttttaaatttttttgtactatgtttggttttattttccttctgttaatcttttgtattcacttatgctctcgtacattgagtacttttattccaaaactagtgggttttctctactggaaattttcaataaacctgtcattattgcttactttgattaaaaa

SEQ ID NO: 2868 - DNA, 1760 bp, Homo sapiens
ggcgaatggctcgtctgtagtgcacgccgcgggcccagctgcgaccccggccccgcccccgggaccccggccatggacgaactgttccccctcatcttcccggcagagccagcccaggcctctggcccctatgtggagatcattgagcagcccaagcagcggggcatgcgcttccgctacaagtgcgaggggcgctccgcgggcagcatcccaggcgagaggagcacagataccaccaagacccaccccaccatcaagatcaatggctacacaggaccagggacagtgcgcatctccctggtcaccaaggaccctcctcaccggcctcacccccacgagcttgtaggaaaggactgccgggatggcttctatgaggctgagctctgcccggaccgctgcatccacagtttccagaacctgggaatccagtgtgtgaagaagcgggacctggagcaggctatcagtcagcgcatccagaccaacaacaaccccttccaagttcctatagaagagcagcgtggggactacgacctgaatgctgtgcggctctgcttccaggtgacagtgcgggacccatcaggcaggcccctccgcctgccgcctgtccttcctcatcccatctttgacaatcgtgcccccaacactgccgagctcaagatctgccgagtgaaccgaaactctggcagctgcctcggtggggatgagatcttcctactgtgtgacaaggtgcagaaagaggacattgaggtgtatttcacgggaccaggctgggaggcccgaggctccttttcgcaagctgatgtgcaccgacaagtggccattgtgttccggacccctccctacgcagaccccagcctgcaggctcctgtgcgtgtctccatgcagctgcggcggccttccgaccgggagctcagtgagcccatggaattccagtacctgccagatacagacgatcgtcaccggattgaggagaaacgtaaaaggacatatgagaccttcaagagcatcatgaagaagagtcctttcagcggacccaccgacccccggcctccacctcgacgcattgctgtgccttcccgcagctcagcttctgtccccaagccagcaccccagccctatccctttacgtcatccctgagcaccatcaactatgatgagtttcccaccatggtgtttccttctgggcagatcagccaggcctcggccttggccccggcccctccccaagtcctgccccaggctccagcccctgcccctgctccagccatggtatcagctctggcccaggccccagcccctgtcccagtcctagccccaggccctcctcaggctgtggccccacctgcccccaagcccacccaggctggggaaggaacgctgtcagaggccctgctgcagctgcagtttgatgatgaagacctgggggccttgcttggcaacagcacagacccagctgtgttcacagacctggcatccgtcgacaactccgagtttcagcagctgctgaaccagggcatacctgtggccccccacacaactgagcccatgctgatggagtaccctgaggctataactcgcctagtgacaggggcccagaggccccccgacccagctcctgctccactgggggccccggggctccccaatggcctcctttcaggagatgaagacttctcctccattgcggacatggacttctcagccctgctgagtcagatcagctcctaagggggtgacgcctgccctccccagagcactgg

SEQ ID NO: 2869 - DNA, 2390 bp, Homo sapiens
gtgctggccgcggtaaaagtggtagcagcggaggcgagcggagggtttcccgcggcggagtctcactctgctgcctaggctgagtgcagtggtgtgatcgaggcgcactgcagccttgacctcctgagctcaagcgatcctcacctcggcctaccgagtagctgggactacaggcacgcgccactacactcggatttctgacagtcagacttgtccacaagaactcaactggcaaggctgcttttctgtgctaaaactggggagctagtgggcaccatgaagatcttctgcagtcgggccaatccgaccacggggtctgtggagtggctggaggaggatgaacactatgattaccaccaggagattgcaaggtcatcttatgcagatatgctacatgacaaagacagaaatgtaaaatactaccaaggtatccgggctgccgtgagcagggtgaaggacagaggacagaaggccttggttctcgacattggcactggcacgggactcttgtcaatgatggcggtcacagcaggtgccgacttctgctatgccatcgaggttttcaagcctatggctgatgctgctgtgaagattgtggagaaaaatggctttagtgataagattaaggttatcaacaagcattccaccgaggtgactgtaggtccagagggtgacatgccatgccgtgccaacatcctggtcacagagttgtttgacacagagctgatcggggagggggcgctgccctcctatgagcacgcacacaggcatctcgtggaggaaaattgtgaggccgtgccccacagagccaccgtctatgcacagctggtggagtccgggaggatgtggtcgtggaacaagctatttcccatccacgtgcagaccagcctcggagagcaggtcatcgtccctcccgttgacgtggagagctgccctggcgcaccctctgtctgtgacattcagctgaaccaggtgtcaccagccgactttacagtcctcagcgatgtgctgcccatgttcagcatagacttcagcaagcaagtcagtagctcagcagcctgccatagcaggcggtttgaacctctgacatctggccgagctcaggtggttctctcgtggtgggacattgaaatggaccctgaggggaagatcaagtgcaccatggcccccttctgggcacactcagacccagaggagatgcagtggcgggaccactggatgcagtgtgtgtacttcctgccacaagaggagcctgtggtgcagggctcagcgctctatctggtagcccaccacgatgactactgcgtatggtacagcctgcagaggaccagccctgaaaagaatgagagagtccgccagatgcgccccgtgtgtgactgccaggctcacctgctctggaaccggcctcggtttggagagatcaatgaccaggacagaactgatcggtacgtccaggctctgaggaccgtgctgaagccagacagcgtgtgcctgtgtgtcagcgatggcagcctgctctccgtgctggcccatcacctgggggtggagcaggtgtttacagtcgagagttcagcagcttctcacaaactgttgagaaaaatcttcaaggctaaccacttggaagataaaattaacatcatagagaaacggccggaattattaacaaatgaggacctacagggcagaaaggtctctctcctcctgggcgagccgttcttcactaccagcctgctgccgtggcacaacctctacttctggtacgtgcggaccgctgtggaccagcacctggggccaggtgccatggtgatgccccaggcagcctcgctgcacgctgtggttgtggagttcagggacctgtggcggatccggagcccctgtggtgactgcgaaggcttcgacgtgcacatcatggacgacatgattaagcgtgccctggacttcagggagagcagggaagctgagccccacccgctgtgggagtacccatgccgcagcctctccgagccctggcagatcctgacctttgacttccagcagccggtgcccctgcagcccctgtgtgccgagggcaccgtggagctcagaaggcccgggcagagccacgcagcggtgctatggatggagtaccacctgaccccggagtgcacgctcagcactggcctcctggagcctgcagaccccgaggggggctgctgctggaacccccactgcaagcaggccgtctacttcttcagccctgccccagatcccagagcactgctgggtggcccacggactgtcagctatgcagtggagtttcaccccgacacaggcgacatcatcatggagttcaggcatgcagataccccagactgaccactcttgagcaataaagtggcctgagggctggg

SEQ ID NO: 2870 - DNA, 3737 bp, Homo sapiens
tttccctttatagcaccattgaatcccagtcctaacagaagtactgcgaatcttgtggcctcattctgaacaaaagggattagagaagaaaaatctcttgatataaggcttgaaagcaagggcaggcaatcttggttgtgaatattttctgatttttccagaaatcaagcagaagattgagctgctgatgtcagttaactctgagaagtcgtcctcttcagaaaggccggagcctcaacagaaagctcctttagttcctcctcctccaccgccaccaccaccaccaccgccacctttgccagaccccacacccccggagccagaggaggagatcctgggatcagatgatgaggagcaagaggaccctgcggactactgcaaaggtggatatcatccagtgaaaattggagacctcttcaatggccggtatcatgttattagaaagcttggatgggggcacttctctactgtctggctgtgctgggatatgcaggggaaaagatttgttgcaatgaaagttgtaaaaagtgcccagcattatacggagacagccttggatgaaataaaattgctcaaatgtgttcgagaaagtgatcccagtgacccaaacaaagacatggtggtccagctcattgacgacttcaagatttcaggcatgaatgggatacatgtctgcatggtcttcgaagtacttggccaccatctcctcaagtggatcatcaaatccaactatcaaggcctcccagtacgttgtgtgaagagtatcattcgacaggtccttcaagggttagattacttacacagtaagtgcaagatcattcatactgacataaagccggaaaatatcttgatgtgtgtggatgatgcatatgtgagaagaatggcagctgaggccactgagtggcagaaagcaggtgctcctcctccttcagggtctgcagtgagtacggctccacagcagaaacctataggaaaaatatctaaaaacaaaaagaaaaaactgaaaaagaaacagaagaggcaggctgagttattggagaagcgcctgcaggagatagaagaattggagcgagaagctgaaaggaaaataatagaagaaaacatcacctcagctgcaccttccaatgaccaggatggcgaatactgcccagaggtgaaactaaaaacaacaggattagaggaggcggctgaggcagagactgcaaaggacaatggtgaagctgaggaccaggaagagaaagaagatgctgagaaagaaaacattgaaaaagatgaagatgatgtagatcaggaacttgcgaacatagaccctacgtggatagaatcacctaaaaccaatggccatattgagaatggcccattctcactggagcagcaactggacgatgaagatgatgatgaagaagactgcccaaatcctgaggaatataatcttgatgagccaaatgcagaaagtgattacacatatagcagctcctatgaacaattcaatggtgaattgccaaatggacgacataaaattcccgagtcacagttcccagagttttccacctcgttgttctctggatccttagaacctgtggcctgcggctctgtgctttctgagggatcaccacttactgagcaagaggagagcagtccatcccatgacagaagcagaacggtttcagcctccagtactggggatttgccaaaagcaaaaacccgggcagctgacttgttggtgaatcccctggatccgcggaatgcagataaaattagagtaaaaattgctgacctgggaaatgcttgttgggtgcataaacacttcacggaagacatccagacgcgtcagtaccgctccatagaggttttaataggagcggggtacagcacccctgcggacatctggagcacggcgtgtatggcatttgagctggcaacgggagattatttgtttgaaccacattctggggaagactattccagagacgaagaccacatagcccacatcatagagctgctaggcagtattccaaggcactttgctctatctggaaaatattctcgggaattcttcaatcgcagaggagaactgcgacacatcaccaagctgaagccctggagcctctttgatgtacttgtggaaaagtatggctggccccatgaagatgctgcacagtttacagatttcctgatcccgatgttagaaatggttccagaaaaacgagcctcagctggcgaatgccttcggcatccttggttgaattcttagcaaattctaccaatattgcattctgagctagcaaatgttcccagtacattggacctaaacggtgactctcattctttaacaggattacaagtgagctggcttcatcctcagacctttattttgctttgaggtactgttgtttgacattttgctttttgtgcactgtgatcctggggaagggtagtcttttgtcttcagctaagtagtttactgaccattttcttctggaaacaataacatgtctctaagcattgtttcttgtgttgtgtgacattcaaatgtcatttttttgaatgaaaaatactttcccctttgtgttttggcaggttttgtaactatttatgaagaaatattttagctgagtactatataatttacaatcttaagaaattatcaagttggaaccaagaaatagcaaggaaatgtacaattttatcttctggcaaagggacatcattcctgtattatagtgtatgtaaatgcaccctgtaaatgttactttccattaaatatgggagggggactcaaatttcagaaaagctaccaagtcttgagtgctttgtagcctatgttgcatgtagcggactttaactgctccaaggagttgtgcaaacttttcattccataacagtcttttcacattggattttaaacaaagtggctctgggttataagatgtcattctctatatggcactttaaaggaagaaaagatatgtttctcattctaaaatatgcattataatttagcagtcccatttgtgattttgcatatttttaaaagtacttttaaagaagagcaatttccctttaaaaatgtgatggctcagtaccatgtcatgttgcctcctctgggcgctgtaagttaagctctacatagattaaattggagaaacgtgttaattgtgtggaatgaaaaaatacatatatttttggaaaagcatgatcatgcttgtctagaacacaaggtatggtatatacaatttgcagtgcagtgggcagaatacttctcacagctcaaagataacagtgatcacattcattccataggtagctttacgtgtggctacaacaaattttactagctttttcattgtctttccatgaaacgaagttgagaaaatgattttccctttgcaggttgcacacagttttgtttatgcatttccttaaaattaattgtagactccaggatacaaaccatagtaggcaatacaattttagaatgtaatatatagaggtatatttagcctcttttagaagtcagtggattgaatgtctttttattttaaattttacattcattaaggtgcctcgtttttgactttgtccattaacatttatccatatgcctttgcaataactagattgtgaaaagctaacaagtgttgtaacaataatccattgtttgaggtgcttgcagttgtcttaaaaattaaagtgttttggtttttttttttccaaaaaaaaaaaaaaaaaaaaaa

SEQ ID NO: 2871 - DNA, 3671 bp, Homo sapiens
ggcggagcgagtggaggctgcagcccagctcgtctcggcgcccgcgtcgccgtcgcgaagccccccgccccgcttccgccgcgtcggaatgagctcccggaaagtgctggccattcaggcccgaaagcggaggccgaaaagagagaaacatccgaaaaagccggagcctcaacagaaagctcctttagttcctcctcctccaccgccaccaccaccaccaccgccacctttgccagaccccacacccccggagccagaggaggagatcctgggatcagatgatgaggagcaagaggaccctgcggactactgcaaaggtggatatcatccagtgaaaattggagacctcttcaatggccggtatcatgttattagaaagcttggatgggggcacttctctactgtctggctgtgctgggatatgcaggggaaaagatttgttgcaatgaaagttgtaaaaagtgcccagcattatacggagacagccttggatgaaataaaattgctcaaatgtgttcgagaaagtgatcccagtgacccaaacaaagacatggtggtccagctcattgacgacttcaagatttcaggcatgaatgggatacatgtctgcatggtcttcgaagtacttggccaccatctcctcaagtggatcatcaaatccaactatcaaggcctcccagtacgttgtgtgaagagtatcattcgacaggtccttcaagggttagattacttacacagtaagtgcaagatcattcatactgacataaagccggaaaatatcttgatgtgtgtggatgatgcatatgtgagaagaatggcagctgaggccactgagtggcagaaagcaggtgctcctcctccttcagggtctgcagtgagtacggctccacagcagaaacctataggaaaaatatctaaaaacaaaaagaaaaaactgaaaaagaaacagaagaggcaggctgagttattggagaagcgcctgcaggagatagaagaattggagcgagaagctgaaaggaaaataatagaagaaaacatcacctcagctgcaccttccaatgaccaggatggcgaatactgcccagaggtgaaactaaaaacaacaggattagaggaggcggctgaggcagagactgcaaaggacaatggtgaagctgaggaccaggaagagaaagaagatgctgagaaagaaaacattgaaaaagatgaagatgatgtagatcaggaacttgcgaacatagaccctacgtggatagaatcacctaaaaccaatggccatattgagaatggcccattctcactggagcagcaactggacgatgaagatgatgatgaagaagactgcccaaatcctgaggaatataatcttgatgagccaaatgcagaaagtgattacacatatagcagctcctatgaacaattcaatggtgaattgccaaatggacgacataaaattcccgagtcacagttcccagagttttccacctcgttgttctctggatccttagaacctgtggcctgcggctctgtgctttctgagggatcaccacttactgagcaagaggagagcagtccatcccatgacagaagcagaacggtttcagcctccagtactggggatttgccaaaagcaaaaacccgggcagctgacttgttggtgaatcccctggatccgcggaatgcagataaaattagagtaaaaattgctgacctgggaaatgcttgttgggtgcataaacacttcacggaagacatccagacgcgtcagtaccgctccatagaggttttaataggagcggggtacagcacccctgcggacatctggagcacggcgtgtatggcatttgagctggcaacgggagattatttgtttgaaccacattctggggaagactattccagagacgaagaccacatagcccacatcatagagctgctaggcagtattccaaggcactttgctctatctggaaaatattctcgggaattcttcaatcgcagaggagaactgcgacacatcaccaagctgaagccctggagcctctttgatgtacttgtggaaaagtatggctggccccatgaagatgctgcacagtttacagatttcctgatcccgatgttagaaatggttccagaaaaacgagcctcagctggcgaatgccttcggcatccttggttgaattcttagcaaattctaccaatattgcattctgagctagcaaatgttcccagtacattggacctaaacggtgactctcattctttaacaggattacaagtgagctggcttcatcctcagacctttattttgctttgaggtactgttgtttgacattttgctttttgtgcactgtgatcctggggaagggtagtcttttgtcttcagctaagtagtttactgaccattttcttctggaaacaataacatgtctctaagcattgtttcttgtgttgtgtgacattcaaatgtcatttttttgaatgaaaaatactttcccctttgtgttttggcaggttttgtaactatttatgaagaaatattttagctgagtactatataatttacaatcttaagaaattatcaagttggaaccaagaaatagcaaggaaatgtacaattttatcttctggcaaagggacatcattcctgtattatagtgtatgtaaatgcaccctgtaaatgttactttccattaaatatgggagggggactcaaatttcagaaaagctaccaagtcttgagtgctttgtagcctatgttgcatgtagcggactttaactgctccaaggagttgtgcaaacttttcattccataacagtcttttcacattggattttaaacaaagtggctctgggttataagatgtcattctctatatggcactttaaaggaagaaaagatatgtttctcattctaaaatatgcattataatttagcagtcccatttgtgattttgcatatttttaaaagtacttttaaagaagagcaatttccctttaaaaatgtgatggctcagtaccatgtcatgttgcctcctctgggcgctgtaagttaagctctacatagattaaattggagaaacgtgttaattgtgtggaatgaaaaaatacatatatttttggaaaagcatgatcatgcttgtctagaacacaaggtatggtatatacaatttgcagtgcagtgggcagaatacttctcacagctcaaagataacagtgatcacattcattccataggtagctttacgtgtggctacaacaaattttactagctttttcattgtctttccatgaaacgaagttgagaaaatgattttccctttgcaggttgcacacagttttgtttatgcatttccttaaaattaattgtagactccaggatacaaaccatagtaggcaatacaattttagaatgtaatatatagaggtatatttagcctcttttagaagtcagtggattgaatgtctttttattttaaattttacattcattaaggtgcctcgtttttgactttgtccattaacatttatccatatgcctttgcaataactagattgtgaaaagctaacaagtgttgtaacaataatccattgtttgaggtgcttgcagttgtcttaaaaattaaagtgttttggtttttttttttccaaaaaaaaaaaaaaaaaaaaaa

SEQ ID NO: 2872 - DNA, 3402 bp, Homo sapiens
acgggcggccggatttgcccggaggccgcacccgcctccggcggggctctcagtgaaaaatgtactctgacctgaatcctgaattttccttgatggtcaaaagattaagaaatcatgagtggaggatctcaagtccacattttttggggtgctccaattgctccactgaaaatcacagtatcagaagacacagcttctttaatgtctgttgctgacccctggaaaaaaattcagcttttatacagtcaacattctttatatctgaaggatgaaaaacagcacaaaaatcttgaaaactataaagtcccagaatctattggttctccagatcttagtggtcatttcttagcaaactgtatgaatagacatgttcatgtgaaagatgactttgtacgttctgtttctgaaacacagaatatagaatcccagaagattcactcctctagactgagtgatataactagctctaatatgcaaatatgtggatttaaaagcacagttccgcatttcaccgaagaagaaaagtatcaaaagcttctcagtgaaaataaaattagagatgaacagcctaaacatcagccagatatatgtggtaagaactttaacacaaatttgtttcagttgggccataaatgtgcagctgtgttggatttggtttgtagtactgaaaaaattaatatagggcctgaagtggtacaaagagagtgtgtgccaacagaatatcatgaaatacaaaaccagtgtttgggattattttcctcgaacgcagtagataagtcaaggtctgaagcagcagttaggaaggtctcagaccttaaaatatcaactgatacagaatttctcagtataattacctccagccaggttgcttttttagctcaaaagaaagataaaaggcggagtcctgtaaataaagggaatgtaaacatggagactgaaccaaaggcaagttacggggagataagaatacctgaagagaattcgattcagcttgatggttttacagaagcatatgaaagtggacaaaaccaagcatattcccttgaactttttagtcctgtttgtcctaaaacagaaaatagccgcattcacataaactctgataaaggtcttgaagaacatacaggatctcaagaacttttcagttctgaagatgaactgccaccaaatgagatacgtattgagttgtgtagctcaggaatactgtgttcccaactaaataccttccacaaaagtgctattaaaagaagctgtacctctgaagataaagtgggccagtctgaagctctatctagagtccttcaagtagctaagaaaatgaagttgatttctaatggaggagattctgctgtagaaatggatcggagaaatgtgtctgaatttaagagtattaaaaaaacatcattaataaaaaactgtgattctaaaagccagaagtataattgtttagtcatggtgctatctccatgccatgtgaaggaaataaacataaaattcggaccaaattctggctctaaagtgcctttagcaacagttacagtaattgatcaatcagaaactaagaagaaggtttttctgtggaggactgcagcattttgggcatttacagtgtttcttggagatataattttactcacagatgttgttattcatgaggaccaatggattggcgagacagtactacaatcaacatttagcagtcagttattaaatcttgggagttattcatctattcagcctgaagaatattccagtgtagttagtgaagttgtacttcaagacttactggcatatgtgtcctcaaaacattcctacctcagagatcttcctccgaggcagcctcagagggtgaacagtatagactttgtagaattggagcaccttcaacctgatgtattagtccacgcagtactaagagttgttgatttcactatactgacagaggcagtatacagttatagaggacagaagcagaaaaaagttatgttaacagtggaacaggcccaagatcaacattatgcgcttgtattatggggtcctggagcagcctggtaccctcaacttcaaaggaaaaaaggagtggttctgattaaagcccagatttcagagctggcatttcctattacagcatctcagaagatagcgctaaatgctcacagttctctgaagagtattttttcttctcttcccaacatcgtatatactggctgtgcaaaatgtggattggaactagaaacagatgagaacaggatctacaaacaatgttttagctgcttgccacttactatgaagaaaatatattataggccagcgttaatgactgccattgatggaagacatgatgtttgtatccgtgtagaatcaaagctgatagagaagattcttctcaacatttctgcagactgcctcaacagagtgatagttccttcctcagagatcacctatgggatggtcgtggcagacctgttccactccttgttggcagtcagcgcagaaccttgtgtattaaagattcagagcctttttgtgttagatgaaaacagctatccattacaacaagatttctccctcctggatttttatcctgacattgtaaagcatggagccaatgcccgtctctgaggccagaggaagaaattgcaggcatttcaaggaagaagtactgaaatgatttgtcttttgaaataaatgaatgacagggcttttgctttggattttttatgaaatatattttataaagagaattgcactagatatataaattaaaacttttttctaagaaaatcctgtgaggtttaaaaagattgtttttgtcttttggtttcttcctttctcctggagaaatgatctaccagtcaaggcaatatgtagcagatccctgggaattaaaggtttgcccatttgttcactgtatttagtccctgctacattccaggcattgtactaagtatggggaaccacagagaagacattccctcagaaactgctgcagtgctttcgcttatccctacctaaaaaaccgtcaatgtgaaatcatttccttgattataactataatgataatggattagtttatataaacctatgtttagacaagttcaagacaagcgtgtctttctataaaaagtattgaaaatgaaggaaatgagatcatgtttcaatttattaaagcagggaagagcgttctgtggttagttcgtgtctaggatttgagtgccttactgaatgcatttaccagcaaacatgtagcaatctgttctctcattgtgattgtggaagaagctcatgtaaaatgatagtcattaatgaggaagtatggcgtggtacttattctgtaagttcagagtatgctgagtgttaatagattatcatattgcctgaaaataaattcatgatgacatg

SEQ ID NO: 2873 - DNA, 2628 bp, Homo sapiens
gcacccggacgtgcggctcccctcggcctcctcgccatggacgcggacgactcccgggcccccaagggctccttgcggaagttcctggagcacctctccggggccggcaaggccatcggcgtgctgaccagcggcggggatgctcaaggtatgaacgctgccgtccgtgccgtggtgcgcatgggtatctacgtgggggccaaggtgtacttcatctacgagggctaccagggcatggtggacggaggctcaaacatcgcagaggccgactgggagagtgtctccagcatcctgcaagtgggcgggacgatcattggcagtgcgcggtgccaggccttccgcacgcgggaaggccgcctgaaggctgcttgcaacctgctgcagcgcggcatcaccaacctgtgtgtgatcggcggggacgggagcctcaccggggccaacctcttccggaaggagtggagtgggctgctggaggagctggccaggaacggccagatcgataaggaggccgtgcagaagtacgcctacctcaacgtggtgggcatggtgggctccatcgacaatgatttctgcggcaccgacatgaccatcggcacggactccgccctgcacaggatcatcgaggtcgtcgacgccatcatgaccacggcccagagccaccagaggaccttcgttctggaggtgatgggacgacactgtgggtacctggccctggtgagtgccttggcctgcggtgcggactgggtgttccttccagaatctccaccagaggaaggctgggaggagcagatgtgtgtcaaactctcggagaaccgtgcccggaaaaaaaggctgaatattattattgtggctgaaggagcaattgatacccaaaataaacccatcacctctgagaaaatcaaagagcttgtcgtcacgcagctgggctatgacacacgtgtgaccatcctcgggcacgtgcagagaggagggaccccttcggcattcgacaggatcttggccagccgcatgggagtggaggcagtcatcgccttgctagaggccaccccggacaccccagcttgcgtcgtgtcactgaacgggaaccacgccgtgcgcctgccgctgatggagtgcgtgcagatgactcaggatgtgcagaaggcgatggacgagaggagatttcaagatgcggttcgactccgagggaggagctttgcgggcaacctgaacacctacaagcgacttgccatcaagctgccggatgatcagatcccaaagaccaattgcaacgtagctgtcatcaacgtgggggcacccgcggctgggatgaacgcagccgtacgctcagctgtgcgcgtgggcattgccgacggccacaggatgctcgccatctatgatggctttgacggcttcgccaagggccagatcaaagaaatcggctggacagatgtcgggggctggaccggccaaggaggctccattcttgggacaaaacgcgttctcccggggaagtacttggaagagatcgccacacagatgcgcacgcacagcatcaacgcgctgctgatcatcggtggattcgaggcctacctgggactcctggagctgtcagccgcccgggagaagcacgaggagttctgtgtccccatggtcatggttcccgctactgtgtccaacaatgtgccgggttccgatttcagcatcggggcagacaccgccctgaacactatcaccgacacctgcgaccgcatcaagcagtccgccagcggaaccaagcggcgcgtgttcatcatcgagaccatgggcggctactgtggctacctggccaacatgggggggctcgcggccggagctgatgccgcatacattttcgaagagcccttcgacatcagggatctgcagtccaacgtggagcacctgacggagaaaatgaagaccaccatccagagaggccttgtgctcagaaatgagagctgcagtgaaaactacaccaccgacttcatttaccagctgtattcagaagagggcaaaggcgtgtttgactgcaggaagaacgtgctgggtcacatgcagcagggtggggcaccctctccatttgatagaaactttggaaccaaaatctctgccagagctatggagtggatcactgcaaaactcaaggaggcccggggcagaggaaaaaaatttaccaccgatgattccatttgtgtgctgggaataagcaaaagaaacgttatttttcaacctgtggcagagctgaagaagcaaacggattttgagcacaggattcccaaagaacagtggtggctcaagctacggcccctcatgaaaatcctggccaagtacaaggccagctatgacgtgtcggactcaggccagctggaacatgtgcagccctggagtgtctgacccagtcccgcctgcatgtgcctgcagccaccgtggactgtctgtttttgtaacacttaagttattttatcagcactttatgcacgtattattgacattaatacctaatcggcgagtgcccatctgccccacctgctccagtgcgtgctgtctgtggagtgtgtctcatgctttcagatgtgcatatgagcagaattaattaaacatttgcctatgactccaacaaaaaaaaaaaaa

SEQ ID NO: 2874 - DNA, 5032 bp, Homo sapiens
acaggtcagagttgactccctgaaaagtgcagccggtttgaaatgcaagatggcggcggcgtggcgctgagaggcgcggcggcccctgcaggtagtggcgcgagccggctccgcgaccagcgggcccggagactctgggctgcgggtgggaactggagcgcagagtccgcggccggcacgggaaaggagaagacagactgctgctttggacctgttggtaatgatggcctgagctaaacatctaactagaagggatacccttccatttcaaagaacagaatgctaaggaagctgtggcaagtgattggagttgtgcttcaaaaatttcagaaattcagcagtattttatctgccaacaataagctctttacttgattgcaccatgagaaagctgctaatgagacttgttgagcacaaaaatggacttgaagaaccaaaagccattgttttcaaatgaagaacactgaacagttttaagcctcgatgctttttaatcaccactgagcttttcctcataacatcagaatggcaagcaggcgaaaatcaacaacaccttgcatggtccttgccagtgaacaagatccagaccttgagttgatatcagatttggatgaaggtcctcctgtgcttacacctgtagaaaacaccagagcagagagtatctcaagtgatgaagaggttcatgaatctgtggattcagacaatcagcaaaataaaaaagttgaaggtggatatgaatgtaaatattgtacttttcaaactccagatctaaatatgtttacttttcatgtggattcggaacatcccaatgtagtgctaaattcatcctatgtttgtgtcgaatgcaattttcttaccaaaaggtatgatgcactttctgagcataatctgaaatatcacccaggagaagagaattttaagttgactatggtgaaacgtaataaccagacaatctttgaacaaacaataaatgatctgacttttgatggtagttttgttaaagaggagaatgcagagcaagcagaatctacagaagtttcttcttcgggaatatctatcagtaaaactcctatcatgaaaatgatgaaaaataaagtggaaaataaacggattgcagttcatcataactcagttgaggacgttcctgaagagaaagagaatgaaatcaaaccagaccgtgaagaaattgtagaaaatccaagttcttcagcttctgaatctaatacaagtacttccattgtaaacagaatacatccaagtactgccagcacggtagtgacaccagcagcagttcttcctggattggcacaggtgataactgctgtatctgctcagcagaattctaatttgattcccaaagtcttaatccctgttaatagcattcccacctacaatgctgcattggataacaatccccttttacttaacacctacaacaagttcccttacccaacaatgtcagaaattacagttctttctgctcaagcaaaatatacagaggaacagatcaagatatggttttcagcccaacgtttaaaacatggtgttagttggactcccgaggaagtagaggaggcaagaaggaaacaattcaatggaacagtgcatactgtacctcagaccataactgttattcctacacacatttccacagggagtaatggtttaccatctattttacagacatgccaaatagttggtcagcctggtctggtccttactcaagtggctggaacaaacaccttgccagttacagcacctatagccttgacagtggcaggcgttccaagtcaaaataatatacagaaaagtcaggtacctgctgctcagcctactgcagaaacaaagccagcaacagcagcagttccaacttctcaaagtgtcaaacatgaaactgcattggtaaaccctgattcatttggcattcgggcaaaaaagacaaaagagcaactggcagaattaaaagttagctaccttaaaaatcagtttccccatgattcagaaattatcagacttatgaaaataacaggcctgacgaaaggagagattaaaaaatggtttagtgacacaaggtacaaccagagaaattcaaagagtaatcagtgcttacatctcaacaatgattcctctaccaccattattatagactccagtgatgaaaccacggaatccccaactgttggtactgcacagcctaagcaatcctggaatccttttcctgactttactccccaaaagtttaaagagaaaactgcagagcagcttcgtgtccttcaggcaagttttctcaacagctctgtacttacagatgaagaattaaataggttaagggcacaaaccaaacttaccagaagagaaatcgatgcttggtttacagagaagaagaaatcaaaagctttaaaggaagagaaaatggaaatagatgaaagtaatgcaggtagttccaaagaagaagctggagaaacttctcctgcagatgaatctggtgcacctaagtcagggagtacaggcaagatatgtaaaaaaacacctgagcagctgcacatgcttaagagtgcatttgtccggacacagtggccatcaccagaagagtatgacaagttggccaaagaaagcgggcttgctagaacagacatagttagttggtttggggacacccgttatgcttggaagaatggaaacttgaaatggtactactactatcagagcgccaattcaagtagtatgaatggtctgtcttcccttaggaaaagagggagagggagacccaaaggacggggaagaggaagaccgcgtgggcggcctagaggaagcaaaagaattaacaactgggacaggggaccatcactcataaaatttaaaactggaactgcaatacttaaggattattacctgaagcacaagtttcttaatgagcaagaccttgatgaacttgttaacaaatcacatatgggctatgagcaggtcagagagtggtttgcagaaagacagagaagatcagaattaggtatagaattatttgaggaaaatgaggaggaagatgaagttattgatgaccaggaagaggatgaagaagaaacagatgatagtgacacttgggaacctccacgacatgtgaaacggaagctgtctaaatcagatgactgaaatctgcctaaaacgttgaaggagaatcaattcttcaactcaagatgtctgatttactgtgaatttgcccaatctttgatgacattgaaaacgttttggggcatacacactcaaaaagcaggatccaatacccaaaagaaatggaacttaatgttgtgccaaagttaaactactgcagttggtggaagttctgcaatgtaaatagaacactaattaaaaaacaacttgtaaaaatgcaatttaaattttaatacagtacatttttcttctaatatgatggagacattctgaatcttagactttctgagggggtttaatgaccactagagcttgtcctcatattcagtccagtttaatactgtatgtctagtaagatgggctatatattgcctctattctttgagatgtgattaagcttagaactttgaccaaaaattttacagtaaaaattgttagaaatgggtaaaaaaaaaaaaaaaaaaaaaaccctgatttattactatgtcttatttatcagaccctgcactaagattaaaagttgtgcatgggcttatacaatttcaaatgtaaaaacagcctatttatatatgttgaaacaataagattttatggtttcactggcccttaataattggatccttcattaaacacatccatgaataccactgtttctactgttacttgttccattagaagctgatttgctttttattaaactgcaggaaattaattctgaagaaggaaaagaaactgacatggtaatttggatagggtgaagctttgaaataaatactgcaccaaaaatgtgaaaaagaatcacgtagtaaatgtatacttagtgttttcttacaatcgtggaaatcagaaatgtttatacaggtgtcagatcagaatttttaagagttatctttcagtgaaattttataacagtttcagtgaatagagaaaaaattctgaactgatcataatgagttaaaagttagcttttcacttatgaatcatgggagtgttaactgttaactcttgccgtatcaggagactgaaagttcatactaatttacaaactttgtaaagactggtgctgttcattcatattgggaagaaccctttcttttgtgaccataggaccatttttcaaaatgcgctttcttcgtagaagaaatgttcagtttaattagctttggattttaacatgtttttctgaatgaccagatgtaggcttagccagtttattttctctaatttaatggataataaatattaagctcttggttaaatgtttttcagccattgaaaatgttatgaaaaagccttgaatatgcatgctgctttcatttttataaactttttattttttaactatagctttattagtaattccaaaatgctgcaatgtagctgatttcctcactcagacagctggctttgtgggtggcttttttcatactactgttaacttttttaaaaaagaagcaatgtaaagaccgtaatgcactaagctttttttttttcttttacacgtttaaaaacttcttaaagcactctgtaatataatgattaaattgctcccttttataaacattgctaatgtggtctgagttttgtttgacaataattttaatgttctcaaaatttgaaatgtcaagtattagaaatgaagcctttgaatatagttgtttcccttgcaatatgttaactctgtgtagctgtatataactattaatttccctcatctcttttataggcctgataaaactcttctctgacgtttgctagcttttaaatatatttatttgacagagcaaaagaaccctcttctggttgattgtgaccttgaatacaaaataaaagtagtgattagtagtttaaaaaaaaaaaaaaaaaa

SEQ ID NO: 2875 - DNA, 4937 bp, Homo sapiens
acaggtcagagttgactccctgaaaagtgcagccggtttgaaatgcaagatggcggcggcgtggcgctgagaggcgcggcggcccctgcaggagaagacagactgctgctttggacctgttggtaatgatggcctgagctaaacatctaactagaagggatacccttccatttcaaagaacagaatgctaaggaagctgtggcaagtgattggagttgtgcttcaaaaatttcagaaattcagcagtattttatctgccaacaataagctctttacttgattgcaccatgagaaagctgctaatgagacttgttgagcacaaaaatggacttgaagaaccaaaagccattgttttcaaatgaagaacactgaacagttttaagcctcgatgctttttaatcaccactgagcttttcctcataacatcagaatggcaagcaggcgaaaatcaacaacaccttgcatggtccttgccagtgaacaagatccagaccttgagttgatatcagatttggatgaaggtcctcctgtgcttacacctgtagaaaacaccagagcagagagtatctcaagtgatgaagaggttcatgaatctgtggattcagacaatcagcaaaataaaaaagttgaaggtggatatgaatgtaaatattgtacttttcaaactccagatctaaatatgtttacttttcatgtggattcggaacatcccaatgtagtgctaaattcatcctatgtttgtgtcgaatgcaattttcttaccaaaaggtatgatgcactttctgagcataatctgaaatatcacccaggagaagagaattttaagttgactatggtgaaacgtaataaccagacaatctttgaacaaacaataaatgatctgacttttgatggtagttttgttaaagaggagaatgcagagcaagcagaatctacagaagtttcttcttcgggaatatctatcagtaaaactcctatcatgaaaatgatgaaaaataaagtggaaaataaacggattgcagttcatcataactcagttgaggacgttcctgaagagaaagagaatgaaatcaaaccagaccgtgaagaaattgtagaaaatccaagttcttcagcttctgaatctaatacaagtacttccattgtaaacagaatacatccaagtactgccagcacggtagtgacaccagcagcagttcttcctggattggcacaggtgataactgctgtatctgctcagcagaattctaatttgattcccaaagtcttaatccctgttaatagcattcccacctacaatgctgcattggataacaatccccttttacttaacacctacaacaagttcccttacccaacaatgtcagaaattacagttctttctgctcaagcaaaatatacagaggaacagatcaagatatggttttcagcccaacgtttaaaacatggtgttagttggactcccgaggaagtagaggaggcaagaaggaaacaattcaatggaacagtgcatactgtacctcagaccataactgttattcctacacacatttccacagggagtaatggtttaccatctattttacagacatgccaaatagttggtcagcctggtctggtccttactcaagtggctggaacaaacaccttgccagttacagcacctatagccttgacagtggcaggcgttccaagtcaaaataatatacagaaaagtcaggtacctgctgctcagcctactgcagaaacaaagccagcaacagcagcagttccaacttctcaaagtgtcaaacatgaaactgcattggtaaaccctgattcatttggcattcgggcaaaaaagacaaaagagcaactggcagaattaaaagttagctaccttaaaaatcagtttccccatgattcagaaattatcagacttatgaaaataacaggcctgacgaaaggagagattaaaaaatggtttagtgacacaaggtacaaccagagaaattcaaagagtaatcagtgcttacatctcaacaatgattcctctaccaccattattatagactccagtgatgaaaccacggaatccccaactgttggtactgcacagcctaagcaatcctggaatccttttcctgactttactccccaaaagtttaaagagaaaactgcagagcagcttcgtgtccttcaggcaagttttctcaacagctctgtacttacagatgaagaattaaataggttaagggcacaaaccaaacttaccagaagagaaatcgatgcttggtttacagagaagaagaaatcaaaagctttaaaggaagagaaaatggaaatagatgaaagtaatgcaggtagttccaaagaagaagctggagaaacttctcctgcagatgaatctggtgcacctaagtcagggagtacaggcaagatatgtaaaaaaacacctgagcagctgcacatgcttaagagtgcatttgtccggacacagtggccatcaccagaagagtatgacaagttggccaaagaaagcgggcttgctagaacagacatagttagttggtttggggacacccgttatgcttggaagaatggaaacttgaaatggtactactactatcagagcgccaattcaagtagtatgaatggtctgtcttcccttaggaaaagagggagagggagacccaaaggacggggaagaggaagaccgcgtgggcggcctagaggaagcaaaagaattaacaactgggacaggggaccatcactcataaaatttaaaactggaactgcaatacttaaggattattacctgaagcacaagtttcttaatgagcaagaccttgatgaacttgttaacaaatcacatatgggctatgagcaggtcagagagtggtttgcagaaagacagagaagatcagaattaggtatagaattatttgaggaaaatgaggaggaagatgaagttattgatgaccaggaagaggatgaagaagaaacagatgatagtgacacttgggaacctccacgacatgtgaaacggaagctgtctaaatcagatgactgaaatctgcctaaaacgttgaaggagaatcaattcttcaactcaagatgtctgatttactgtgaatttgcccaatctttgatgacattgaaaacgttttggggcatacacactcaaaaagcaggatccaatacccaaaagaaatggaacttaatgttgtgccaaagttaaactactgcagttggtggaagttctgcaatgtaaatagaacactaattaaaaaacaacttgtaaaaatgcaatttaaattttaatacagtacatttttcttctaatatgatggagacattctgaatcttagactttctgagggggtttaatgaccactagagcttgtcctcatattcagtccagtttaatactgtatgtctagtaagatgggctatatattgcctctattctttgagatgtgattaagcttagaactttgaccaaaaattttacagtaaaaattgttagaaatgggtaaaaaaaaaaaaaaaaaaaaaaccctgatttattactatgtcttatttatcagaccctgcactaagattaaaagttgtgcatgggcttatacaatttcaaatgtaaaaacagcctatttatatatgttgaaacaataagattttatggtttcactggcccttaataattggatccttcattaaacacatccatgaataccactgtttctactgttacttgttccattagaagctgatttgctttttattaaactgcaggaaattaattctgaagaaggaaaagaaactgacatggtaatttggatagggtgaagctttgaaataaatactgcaccaaaaatgtgaaaaagaatcacgtagtaaatgtatacttagtgttttcttacaatcgtggaaatcagaaatgtttatacaggtgtcagatcagaatttttaagagttatctttcagtgaaattttataacagtttcagtgaatagagaaaaaattctgaactgatcataatgagttaaaagttagcttttcacttatgaatcatgggagtgttaactgttaactcttgccgtatcaggagactgaaagttcatactaatttacaaactttgtaaagactggtgctgttcattcatattgggaagaaccctttcttttgtgaccataggaccatttttcaaaatgcgctttcttcgtagaagaaatgttcagtttaattagctttggattttaacatgtttttctgaatgaccagatgtaggcttagccagtttattttctctaatttaatggataataaatattaagctcttggttaaatgtttttcagccattgaaaatgttatgaaaaagccttgaatatgcatgctgctttcatttttataaactttttattttttaactatagctttattagtaattccaaaatgctgcaatgtagctgatttcctcactcagacagctggctttgtgggtggcttttttcatactactgttaacttttttaaaaaagaagcaatgtaaagaccgtaatgcactaagctttttttttttcttttacacgtttaaaaacttcttaaagcactctgtaatataatgattaaattgctcccttttataaacattgctaatgtggtctgagttttgtttgacaataattttaatgttctcaaaatttgaaatgtcaagtattagaaatgaagcctttgaatatagttgtttcccttgcaatatgttaactctgtgtagctgtatataactattaatttccctcatctcttttataggcctgataaaactcttctctgacgtttgctagcttttaaatatatttatttgacagagcaaaagaaccctcttctggttgattgtgaccttgaatacaaaataaaagtagtgattagtagtttaaaaaaaaaaaaaaaaaa

SEQ ID NO: 2876 - DNA, 5595 bp, Homo sapiens
gtcgccagcaaccgagcggggcccggcccgagcggggcctgggggtgcgacgccgagggcgggggagagcgcgccgctgctcccggaccgggccgcgcacgccgcctcaggaaccatcactgttgctggaggcacctgacaaatcctagcgaatttttggagcatctccacccaggaacctcgccatccagaagtgtgcttcccgcacagctgcagccatggggtctgaggaccacggcgcccagaaccccagctgtaaaatcatgacgtttcgcccaaccatggaagaatttaaagacttcaacaaatacgtggcctacatagagtcgcagggagcccaccgggcgggcctggccaagatcatccccccgaaggagtggaagccgcggcagacgtatgatgacatcgacgacgtggtgatcccggcgcccatccagcaggtggtgacgggccagtcgggcctcttcacgcagtacaatatccagaagaaggccatgacagtgggcgagtaccgccgcctggccaacagcgagaagtactgtaccccgcggcaccaggactttgacgaccttgaacgcaaatactggaagaacctcacctttgtctccccgatctacggggctgacatcagcggctctttgtatgatgacgacgtggcccagtggaacatcgggagcctccggaccatcctggacatggtggagcgcgagtgcggcaccatcatcgagggcgtgaacacgccctacctgtacttcggcatgtggaagaccaccttcgcctggcacaccgaggacatggacctgtacagcatcaactacctgcactttggggagcctaagtcctggtacgccatcccaccagagcacggcaagcgcctggagcggctggccatcggcttcttccccgggagctcgcagggctgcgacgccttcctgcggcataagatgaccctcatctcgcccatcatcctgaagaagtacgggatccccttcagccggatcacgcaggaggccggggaattcatgatcacatttccctacggctaccacgccggcttcaatcacgggttcaactgcgcagaatctaccaacttcgccaccctgcggtggattgactacggcaaagtggccactcagtgcacgtgccggaaggacatggtcaagatctccatggacgtgttcgtgcgcatcctgcagcccgagcgctacgagctgtggaagcagggcaaggacctcacggtgctggaccacacgcggcccacggcgctcaccagccccgagctgagctcctggagtgcgtcccgggcctcgctgaaggccaagctcctccgcaggtctcaccggaaacggagccagcccaagaagccgaagcccgaagaccccaagttccctggggagggtacggctggggcagcgctcctagaggaggctgggggcagcgtgaaggaggaggctgggccggaggttgaccccgaggaggaggaggaggagccgcagccactgccacacggccgggaggccgagggcgcagaagaggacgggaggggcaagctgcggccaaccaaggccaagagcgagcggaagaagaagagcttcggcctgctgcccccacagctgccgcccccgcctgctcacttcccctcagaggaggcgctgtggctgccatccccactggagcccccggtgctgggcccaggccctgcagccatggaggagagccccctgccggcaccccttaatgtcgtgccccctgaggtgcccagtgaggagctagaggccaagcctcggcccatcatccccatgctgtacgtggtgccgcggccgggcaaggcagccttcaaccaggagcacgtgtcctgccagcaggcctttgagcactttgcccagaagggtccgacctggaaggaaccagtttcccccatggagctgacggggccagaggacggtgcagccagcagtggggcaggtcgcatggagaccaaagcccgggccggagaggggcaggcaccgtccacattttccaaattgaagatggagatcaagaagagccggcgccatcccctgggccggccgcccacccggtccccactgtcggtggtgaagcaggaggcctcaagtgacgaggaggcatcccctttctccggggaggaagatgtgagtgacccggacgccttgaggccgctgctgtctctgcagtggaagaacagggcggccagcttccaggccgagaggaagttcaacgcagcggctgcgcgcacggagccctactgcgccatctgcacgctcttctacccctactgccaggccctacagactgagaaggaggcacccatagcctccctcggagagggctgcccggccacattaccctccaaaagccgtcagaagacccgaccgctcatccctgagatgtgcttcacctctggcggtgagaacacggagccgctgcctgccaactcctacatcggcgacgacgggaccagccccctgatcgcctgcggcaagtgctgcctgcaggtccatgccagttgctatggcatccgtcccgagctggtcaatgaaggctggacgtgttcccggtgcgcggcccacgcctggactgcggagtgctgcctgtgcaacctgcgaggaggtgcgctgcagatgaccaccgataggaggtggatccacgtgatctgtgccatcgcagtccccgaggcgcgcttcctgaacgtgattgagcgccaccctgtggacatcagcgccatccccgagcagcggtggaagctgaaatgcgtgtactgccggaagcggatgaagaaggtgtcaggtgcctgtatccagtgctcctacgagcactgctccacgtccttccacgtgacctgcgcccacgccgcaggcgtgctcatggagccggacgactggccctatgtggtctccatcacctgcctcaagcacaagtcggggggtcacgctgtccaactcctgagggccgtgtccctaggccaggtggtcatcaccaagaaccgcaacgggctgtactaccgctgtcgcgtcatcggtgccgcctcgcagacctgctacgaagtgaacttcgacgatggctcctacagcgacaacctgtaccctgagagcatcacgagtagggactgtgtccagctgggacccccttccgagggggagctggtggagctccggtggactgacggcaacctctacaaggccaagttcatctcctccgtcaccagccacatctaccaggtggagtttgaggacgggtcccagctgacggtgaagcgtggggacatcttcaccctggaggaggagctgcccaagagggtccgctctcggctgtcactgagcacgggggcaccgcaggagcccgccttctcgggggaggaggccaaggccgccaagcgcccgcgtgtgggcaccccgcttgccacggaggactccgggcggagccaggactacgtggccttcgtggagagcctcctgcaggtgcagggccggcccggagcccccttctaggacagctggccgctcaggcgaccctcagcccggcggggaggccatggcatgccccgggcgttcgcttgctgtgaattcctgtcctcgtgtccccgacccccgagaggccacctccaagccgcgggtgccccctagggcgacaggagccagcgggacgccgcacgcggccccagactcagggagcagggccaggcgggctcgggggccggccaggggagcaccccactcaactactcagaattttaaaccatgtaagctctcttcttctcgaaaaggtgctactgcaatgccctactgagcaacctttgagattgtcacttctgtacataaaccacctttgtgaggctctttctataaatacatattgtttaaaaaaaagcaagaaaaaaaggaaaacaaaggaaaatatccccaaagttgttttctagatttgtggctttaagaaaaaacaaaacaaaacaaacacattgtttttctcagaaccaggattctctgagaggtcagagcatctcgctgtttttttgttgttgttttaaaatattatgatttggctacagaccaggcagggaaagagacccggtaattggagggtgagcctcggggggggggcaggacgccccggtttcggcacagcccggtcactcacggcctcgctctcgcctcaccccggctcctgggctttgatggtctggtgccagtgcctgtgcccactctgtgcctgctgggaggaggcccaggctctctggtggccgcccctgtgcacctggccaggggaagcccgggggtctggggcctccctccgtctgcgcccacctttgcagaataaactctctcctggggtttgtctatctttgtttctctcacccgagagaaacgcaggtgttccagaggcttccttgcagacaaagcacccctgcacctcccatggctcaggatgagggaggcccccaggcccttctggttggtagtgagtgtggacagcttcccagctcttcgggtacaaccctgagcaggtcgggggacacagggccgaggcaggccttcggggcccctttcgcctgcttccgggcagggacgaggcctggtgtcctcgctccacccacccacgctgctgtcacctgaggggaatctgcttcttaggagtgggttgagctgatagagaaaaaacggccttcagcccaggctgggaagcgccttctccaggtgcctctccctcaccagctctgcacccctctggggagccttccccaccttagctgtctcctgccccagggagggatggaggagataatttgcttatattaaaaacaaaaaatggctgaggcaggagtttgggaccagcctgggctatatagcaagaccccatcactacaaattttttacaaattagctaggtgtggtggtgcgcacctgtggtcccagctactcgggaggctgtggtgggaggattgcttgagtccaggaggttgaggctgcagtcagctcagattgcaccactgcactccagcctgggcaacagagcgagaccctgtctccaaaaaaaaaaaaaaagcaatgtttatattataaaagagtgtcctaacagtccccgggctagagaggactaaggaaaacagagagagtgttacgcaggagcaagcctttcatttccttggtgggggaggggggcggttgccctggagagggccggggtcggggaggttggggggtgtcagccaaaacgtggaggtgtccctctgcacgcagccctcgcccggcgtggcgctgacactgtattcttatgttgtttgaaaatgctatttatattgtaaagaagcgggcgggtgcccctgctgcccttgtcccttgggggtcacacccatcccctggtgggctcctgggcggcctgcgcagatgggccacagaagggcaggccggagctgcacactctccccacgaaggtatctctgtgtcttactctgtgcaaagacgcggcaaaacccagtgccctggtttttccccacccgagatgaaggatacgctgtattttttgcctaatgtccctgcctctaggttcataatgaattaaaggttcatgaacgctgcg

SEQ ID NO: 2877 - DNA, 9326 bp, Homo sapiens
agaggccgccctgagacggtgcgcgatggaccgagggccccagccggggaggcgccgccgccgagcccgcggccagacgccccatcagtagcgtccgcaccgggagccgcggctctcgcccgagccgtgggcgcgcccgaggggcgggctcgcctcccgccgtccctcgcagctctgccgggcccgagcccgcgccgccgccgccgccgccttgccgctcgggccgcgcggcccgggaaacgcggccgcgggctgcatgggcagcgcccgcgccccgccgctgagccgtcgcggagccgcgcagccctcggagcacgaatatatacagccctgctctgggacacacctccattggatttaaaagacagtcctcgtcagcactgactttcagctatggaatcgcagacggttgatgatgaagcgccggccgtgtaaatgaagatcgggtgaggagcaggacgatgcccaagggtgggtgccctaaagcaccacagcaggaagagcttcccctcagcagcgacatggtggagaagcagactgggaaaaaggataaagataaagtttctctaaccaagaccccaaaactggagcgtggcgatggcgggaaggaggtgagggagcgagccagcaagcggaagctgcccttcaccgcgggcgccaatggggagcagaaggactcggacacagagaagcagggccctgagcggaagaggattaagaaggagcctgtcacccggaaggccgggctgctgtttggcatggggctgtctggaatccgagccggctaccccctctccgagcgccagcaggtggcccttctcatgcagatgacggccgaggagtctgccaacagcccagtggacacaacaccaaagcacccctcccagtctacagtgtgtcagaagggaacgcccaactctgcctcaaaaaccaaagataaagtgaacaagagaaacgagcgtggagagacccgcctgcaccgagccgccatccgcggggacgcccggcgcatcaaagagctcatcagcgagggggcagacgtcaacgtcaaggacttcgcaggctggacggcgctgcacgaggcctgtaaccggggctactacgacgtcgcgaagcagctgctggctgcaggtgcggaggtgaacaccaagggcctagatgacgacacgcctttgcacgacgctgccaacaacgggcactacaaggtggtgaagctgctgctgcggtacggagggaacccgcagcagagcaacaggaaaggcgagacgccgctgaaagtggccaactcccccacgatggtgaacctcctgttaggcaaaggcacttacacttccagcgaggagagctcgacggagagctcagaagaggaagacgcaccatccttcgcaccttccagttcagtcgacggcaacaacacggactccgagttcgaaaaaggcctcaagcacaaggccaagaacccagagccacagaaggccacggcccccgtcaaggacgagtatgagtttgatgaggacgacgagcaggacagggttcctccggtggacgacaagcacctattgaaaaaggactacagaaaagaaacgaaatccaatagttttatctctatacccaaaatggaggttaaaagttacactaaaaataacacgattgcaccaaagaaagcgtcccatcgtatcctgtcagacacgtcggacgaggaggacgcgagtgtcaccgtggggacaggagagaagctgagactctcggcacatacgatattgcctggtagtaagacacgagagccttctaatgccaagcagcagaaggaaaaaaataaagtgaaaaagaagcgaaagaaagaaacaaaaggcagagaggttcgcttcggaaagcggagcgacaagttctgctcctcggagtcggagagcgagtcctcagagagtggggaggatgacagggactctctggggagctctggctgcctcaaggggtccccgctggtgctgaaggacccctccctgttcagctccctctctgcctcctccacctcgtctcacgggagctctgccgcccagaagcagaaccccagccacacagaccagcacaccaagcactggcggacagacaattggaaaaccatttcttccccggcttggtcagaggtcagttctttatcagactccacaaggacgagactgacaagcgagtctgactactcctctgagggctccagtgtggaatcgctgaagccagtgaggaagaggcaggagcacaggaagcgagcctccctgtcggagaagaagagccccttcctgtccagcgcggagggcgctgtccccaaactggacaaggaggggaaagttgtcaaaaaacataaaacaaaacacaaacacaaaaacaaggagaagggacagtgttccatcagccaagagctgaagttgaaaagttttacttacgaatatgaggactccaagcagaagtcagataaggctatactgttagagaatgatctttccactgaaaacaagctaaaagtgttaaagcacgatcgcgaccactttaaaaaagaagagaaacttagcaaaatgaaattagaagaaaaagaatggctctttaaagatgaaaaatcactgaagagaatcaaagacacaaacaaagacatcagcaggtctttccgagaagagaaagaccgttcgaataaagcagaaaaggagagatcgctgaaggaaaagtctccgaaagaagaaaaactgagactgtacaaagaggagagaaagaagaaatcaaaagaccggccctcaaaattagagaagaagaatgatttaaaagaggacaaaatttcaaaagagaaggagaagatttttaaagaagataaagaaaaactcaaaaaagaaaaggtttatagggaagattctgcttttgacgaatattgtaacaaaaatcagtttctggagaatgaagacaccaaatttagcctttctgacgatcagcgagatcggtggttttctgacttgtccgattcatcctttgatttcaaaggggaggacagctgggactcgccagtgacagactacagggacatgaagagcgactctgtggccaagctcatcttggagacggtgaaggaggacagcaaggagaggaggcgggacagccgggcccgggagaagcgagactacagagagcccttcttccgaaagaaggacagggactatttggataaaaactctgagaagaggaaagagcagactgaaaagcataaaagtgtccctggctacctttcggaaaaggacaagaagaggagagagtccgcagaggccgggcgggacagaaaggacgccctggagagctgcaaggagcgcagggacggcagggccaagcccgaggaggcgcaccgggaggagctgaaggagtgtggctgcgagagtggcttcaaggacaagtccgacggcgactttgggaagggcctggagccgtgggaacggcaccacccagcacgagagaaggagaagaaggatggccccgataaggaaaggaaggagaagacaaaaccagaaagatacaaagagaaatccagtgacaaggacaaaagtgagaaatcaatcctggaaaaatgtcagaaggacaaagaatttgataaatgttttaaagagaaaaaagataccaaggaaaaacataaagacacacatggcaaagacaaagaaaggaaagcgtctctcgaccaagggaaagagaagaaggagaaggctttccctgggatcatctcagaagacttctctgaaaaaaaagatgacaagaaaggcaaagagaaaagctggtacatcgcagacatcttcacagatgagagtgaggacgacagagacagctgcatggggagcgggttcaagatgggagaggccagcgacttgccgaggacggacggcctccaggagaaggaggaaggacgggaggcctatgcctccgacagacacaggaagtcttctgacaagcagcaccctgagaggcagaaggacaaggagcccagagacaggagaaaggaccgaggggctgccgacgcggggagagacaaaaaagagaaagtctttgaaaagcacaaggagaagaaggataaagagtccacagaaaagtacaaggacaggaaggacagagcctcagtggactccacgcaagataagaaaaataaacagaagctccccgagaaggctgaaaagaagcacgctgccgaagacaaggctaaaagcaaacacaaagagaagtcggacaaagaacattccaaggagaggaagtcctcgagaagtgccgacgcggaaaaaagcctgcttgaaaagttggaagaagaggctctccatgagtacagagaagactccaacgataaaatcagcgaggtctcctctgacagcttcacggaccgagggcaggagccggggctgactgccttcctggaggtctctttcacggagccacctggagacgacaagccgagggagagcgcctgcctccctgagaagctgaaagagaaggagaggcacagacactcctcatcttcatccaagaagagccacgaccgagagcgagccaagaaagagaaggccgagaagaaagagaagggcgaagattacaaggagggcggtagcaggaaggactccggccagtacgaaaaggacttcctggaggcggatgcttacggagtttcttacaacatgaaagctgacatagaagatgagctagataaaaccattgaattgttttctaccgaaaagaaagataaaaatgattccgagagagaaccttccaagaaaatagaaaaggaactaaagccttatggatctagtgccatcaacatcctaaaagagaagaagaagagagagaaacacagggagaaatggagagacgagaaggagaggcaccgggacaggcatgcggatgggctgctgcggcatcacagggacgagctcctgcggcatcacagggacgagcagaagcccgccaccagggacaaggacagcccgccccgcgtgctcaaagacaagtccagggacgagggcccgaggctcggcgatgccaaactgaaggagaaattcaaggacggtgcagagaaagaaaagggcgacccagtgaagatgagcaacgggaatgataaggtagcgccatccaaagacccaggcaagaaagacgccaggcccagggagaagctcctgggggacggcgacctgatgatgaccagcttcgagaggatgctgtcccagaaggacctggagatcgaggagcgccacaagcggcacaaggagaggatgaagcaaatggagaagctgaggcaccggtccggagaccccaagctcaaggagaaggcgaagccggcagacgacgggcggaagaagggtctggacattcctgctaagaaaccgccggggctggaccctccatttaaagacaaaaagctcaaagagtcgactcctattccacctgccgcggaaaataagctacacccagcatcaggtgcagactccaaagactggctggcaggccctcacatgaaagaggtcctgcctgcgtcccccaggcctgaccagagccggcccactggcgtgcccacccctacgtcggtgctatcctgccccagctacgaggaggtgatgcacacgcccaggaccccgtcctgcagcgccgatgactacgcggacctcgtgttcgactgcgccgactcgcagcactccacgcccgtgcccaccgctcccaccagcgcctgctccccctcctttttcgacaggttctccgtggcttcaagtgggctttcggaaaacgccagccaggctcctgccaggcctctctccacaaacctttaccgctcggtctctgtcgacattaggaggacccccgaggaagaattcagcgtcggagacaagctcttcaggcagcagagcgttcctgctgcctccagctacgactctcccatgccaccctcgatggaagacagggcgcccctgcccccggttcccgcggagaagtttgcctgcttgtcgccagggtactactccccagactatggcctcccgtcgcccaaagtcgacgctttgcactgcccaccggctgccgttgtcactgtcaccccgtctccagagggcgtcttctcaagtttacaagcaaaaccttccccttcccccagagccgagctgctggttccttccctcgaaggggcccttcccccggacctggacacctccgaggaccagcaggcgacggccgccatcatccccccggagcccagctacctggagccgctggacgagggtcccttcagcgccgtcatcaccgaggagcccgttgagtgggcccacccctccgagcaggcgcttgcctctagcctgatcgggggcacctctgaaaaccctgtgagctggcctgtgggctcggacctcctgctgaagtctccacagagattccccgagtccccaaagcgtttctgccccgcggaccccctccactctgccgccccagggcccttcagcgcctcggaggcgccgtaccccgcccctcccgcctctcctgccccgtacgctctgcccgtcgctgagccggggctggaggacgtcaaggacggagtggacgccgtccccgccgccatctccacctcagaggcggctccctacgcccctccctccgggctggagtccttcttcagcaactgcaagtcacttccggaagccccgctggacgtggcccccgagcccgcctgtgtagccgctgtggctcaggtggaggctctggggcccctggaaaatagcttcctggacggcagccgcggcctgtctcacctcggccaggtggagccggtgccctgggcggacgccttcgccggccccgaggacgacctggacctggggcccttctccctgccggagcttcccctgcagactaaagatgccgcagatggtgaagcggaacccgtggaagaaagtcttgctcctccagaagagatgcctccaggggcccccggggtcataaacggtggggatgtttccaccgtagtggctgaggagccgccggcactgcctcctgaccaggcctccacccggctccctgcagagctcgagcctgagccctcaggggagccaaagctggacgtggctctagaagctgcggtggaggcggagacggtgccggaagagagggcccgtggggatccggactccagcgtggagcccgcgcccgttcccccagaacagcgcccactggggagcggagaccagggggctgaggctgaaggcccccccgccgcgtccctctgtgcccctgacggccccgccccgaacactgtggcacaagctcaggccgcagacggtgccggccccgaggacgacactgaggcctcccgtgccgccgccccagccgaaggccctcctggcggcatccagccggaagccgcagaaccaaaacccacggccgaagccccgaaggccccccgagtggaggagatccctcagcgcatgaccaggaaccgggcgcagatgctcgcgaaccagagcaagcagggcccgcccccctccgagaaggagtgcgcccccacccctgccccggtcaccagggccaaggcccgcggctccgaggacgacgacgcccaggcccagcatccgcgcaaacgccgctttcagcgctccacccagcagctgcagcagcagctgaacacgtccacgcagcagacgcgggaggtgatccagcagacgctggccgccatcgtggacgccatcaagctggatgccatcgagccctaccacagcgacagggccaacccctacttcgaatacctgcagatcaggaagaagatcgaggagaagcgcaagatcctgtgctgtatcacgccgcaggcgccccagtgctacgccgagtacgtcacctacacgggctcctacctcctggacggcaagccgctcagcaagctccacatccccgtgatcgcaccccctccctccctggcggagcccctgaaggagctgttcaggcagcaggaggccgtccggggaaagctgcgtctacagcacagcatcgagcgggagaagctgatcgtatcctgtgagcaggagattctgcgggttcactgccgggcggccaggaccatcgccaaccaggcagtgccattcagcgcctgcacgatgctgctggactccgaggtctacaacatgcccctggagagccagggtgacgagaacaagtcagtgcgcgaccgtttcaacgcccgccagttcatctcctggctccaggacgtggatgacaagtatgaccgcatgaagacttgcctcctcatgcggcagcagcacgaggccgcggccctgaacgccgtgcagaggatggagtggcagctgaaggtgcaggaactggaccccgccgggcacaagtccctgtgcgtgaacgaggtgccctccttctacgtgcccatggtcgacgtcaacgacgactttgtattgttgccggcatgacaccgcgggacggccgcaggacgcaggcgagggccgcacggctgcccaggactgctgctgagccccaggggcggaggagggagcgccctgtccacccgggcggggagagaccccgagagagactgcacttggccacagcgcctccatcccttccagactggtccagacgtcggggaggtgaaacacgtctcttctctaccagctgccgcggcgggggcaaagcccccagagcctcactggccccggcgggatgaggagaccatgccgggcgcgcacacacggcagcttctgtttgaaaacggcgaccttcgggcccttttctccagcaactgcagaggcatttcaggagttggagaacggagtacatttttaaaattttttgttccattctgatcaactaaagaaaattaaggtgtccacctctcacaaacagtgacctgcaggtcggaggggcaggagccccatcccagccgtggttctgttgccgccgagctgcgacggcctcagactgggcttcagacctggtgcggagccaggcggagggacacagagccaggactcccagccgtattgaaatggagtcaaatccgcgtggtttgtatcttctttcctttaatcttgggcattttgtttctctttctgagaacgtaacttgaaacactacagagccaataatcatataaaaagtgtatccgtaaacgctgtacagttttatataccttcacaatgtacttttgctgccttctagataatttattttgcaacacattactgcacagttgtaaataacttatgtactgtaacatcactttcagttatgtgtaaagaaataaataaattaattaaaatgcaaaaaaaaaaaaaaaaaaaaaa

SEQ ID NO: 2878 - DNA, 2580 bp, Homo sapiens
cccggagctaaggcgccgaacccgcggcgcgtggggacgatgtggttctttgcccgggacccggtccgggactttccgttcgagctcatcccggagcccccagaggcggcctgcccgggccctgggccctgcaccgcggccgcaagaagggccacaggcagccccgtgtccatcttcgtctatgatgtgaagcctggcgcggaagagcagacccaggtggccaaagctgccttcaagcgcttcaaaactctacggcaccccaacatcctggcttacatcgatggactggagacagaaaaatgcctccacgtcgtgacagaggctgtgaccccgttgggaatatacctcaaggcgagagtggaggctggtggcctgaaggagctggagatctcctgggggctacaccagatcgtgaaagccctcagcttcctggtcaacgactgcagcctcatccacaacaatgtctgcatggccgccgtgttcgtggaccgagctggcgagtggaagcttgggggcctggactacatgtattcggcccaggcaaccggtgggggacctccccgcaaggggatccccgagcttgagcagtatgaccccccggagttggctgacagcagtggcagagtggtcagagagaagtggtcagcagacatgtggcgcttgggctgcctcatttgggaagtcttcaatgggcccctacctcgggcagcagccctacgcaaccctgggaagatccccaaaacgctggtgccccattactgtgagctggtgggagcaaaccccaaggtgcgtcccaacccagcccgcttcctgcagaactgccgggcacctggtggcttcatgagcaaccgctttgtagaaaccaacctcttcctggaggagattcagatcaaagagccagccgagaagcaaaaattcttccaggagctgagcaagagcctggacgcattccctgaggatttctgtcggcacaaggtgctgccccagctgctgaccgccttcgagttcggcaatgctggggccgttgtcctcacgcccctcttcaaggtgggcaagttcctgagcgctgaggagtatcagcagaagatcatccctgtggtggtcaagatgttctcatccactgaccgggccatgcgcatccgccttctgcagcagatggagcagttcatccagtaccttgacgagccaacagtcaacacccagatcttcccccacgtcgtacatggcttcctggacaccaaccctgccatccgggagcagacggtcaagtccatgctgctcctggccccaaagctgaacgaggccaacctcaatgtggagctgatgaagcactttgcacggctacaggccaaggatgaacagggccccatccgctgcaacaccacagtctgcctgggcaaaatcggctcctacctcagtgctagcaccagacacagggtccttacctctgccttcagccgagccactagggacccgtttgcaccgtcccgggttgcgggtgtcctgggctttgctgccacccacaacctctactcaatgaacgactgtgcccagaagatcctgcctgtgctctgcggtctcactgtagatcctgagaaatccgtgcgagaccaggccttcaaggccattcggagcttcctgtccaaattggagtctgtgtcggaggacccgacccagctggaggaagtggagaaggatgtccatgcagcctccagccctggcatgggaggagccgcagctagctgggcaggctgggccgtgaccggggtctctcactcacctcaagctgatccgttcgcacccaaccactgcccaacagaaaccaacattccccaaagacccacgctgaaggagttcctgccccagccccccacccctgttcctgccacccctacaacctcaggccactgggagacgcaggaggaggacaaggacacagcagaggacagcagcactgctgacagatgggacgacgaagactggggcagcctggagcaggaggccgagtctgtgctggcccagcaggacgactggagcaccgggggccaagtgagccgtgctagtcagagtccgactggagcagctgggaagctgagggctcctgggaacagggctggcaggagccaagctcccaggagccacctcctgacggtacacggctggccagcgagtataactggggtggcccagagtccagcgacaagggcgaccccttcgctaccctgtctgcacgtcccagcacccagccgaggccagactcttggggtgaggacaactgggagggcctcgagactgacagtcgacaggtcaaggctgagctggcccggaagaagcgcgaggagcggcggcgggagatggaggccaaacgcgccgagaggaaggtggccaagggccccatgaagctgggagcccggaagctggactgaaccgtggcggtggcccttcccggctgcggagagcccgccccacagatgtatttattgtacaaaccatgtgagcccggccggcccagccaggccatctcacgtgtacataatcagagccacaataaattctatttcacaaaaaaaaaaaaaaaaa

SEQ ID NO: 2879 - DNA, 3003 bp, Homo sapiens
aaggtgaggggaacagctgatccgtctgttgggaggacagatatctcaaggccaggatggaagaatcaccactaagccgggcaccatcccgtggtggagtcaactttctcaatgtagcccggacctacatccccaacaccaaggtggaatgtcactacacccttcccccaggcaccatgcccagtgccagtgactggattggcatcttcaaggtggaggctgcctgtgttcgggattaccacacatttgtgtggtcttccgtgcctgaaagtacaactgatggttcccccattcacaccagtgtccagttccaagccagctacctgcccaaaccaggagctcagctctaccagttccgatatgtgaaccgccagggccaggtgtgtgggcagagcccccctttccagttccgagagccaaggcccatggatgaactggtgaccctggaggaggctgatgggggctctgacatcctgctggttgtccccaaggcaactgtgttacagaaccagctcgatgagagccagcaagaacggaatgacctgatgcagctgaagctacagctggagggacaggtgacagagctgaggagccgagtgcaggagctcgagagggctctggcaactgccaggcaggagcacacggagctgatggaacagtacaaggggatttcccggtcccatggggagatcacagaagagagggacatcctgagccggcaacagggagaccatgtggcacgcatcctggagctagaggatgacatccagaccatcagtgagaaagtgctgacgaaggaagtggagctggacaggcttagagacacagtgaaggccctgactcgggaacaagagaagctccttgggcaactgaaagaagtacaagcagacaaggagcaaagtgaggctgagctccaagtggcacaacaggagaaccatcacttaaatttggacctgaaggaggcgaagagctggcaagaggagcagagtgctcaggctcagcgactgaaagacaaggtggcccagatgaaggacaccctaggccaggcccagcagcgggtggccgagctggagcccttgaaggagcagcttcgaggggcccaggagcttgcagcctcaagccagcagaaagccacccttcttggggaggagttggccagcgcagcagcagccagggaccgcaccatagccgaactacaccgcagccgcctggaagtggctgaagttaacggcaggctggctgagctcggtttgcacttgaaggaagaaaaatgccaatggagcaaggagcgggcagggctgctgcagagtgtggaggcagagaaggacaagatcctgaagctgagtgcagagatacttcgattggagaaggcagttcaggaggagaggacccaaaaccaagtgttcaagactgagctggcccgggagaaggattctagcctggtacagttgtcagaaagtaagcgggagctgacagagctgcggtcagccctgcgtgtgctccagaaggaaaaggagcagttacaggaggagaaacaggaattgctagagtacatgagaaagctagaggcccgcctggagaaggtggcagatgagaagtggaatgaggatgccaccacagaggatgaggaggccgctgtggggctgagctgcccggcagctctgacagactcagaggacgagtccccagaagacatgaggctcccaccctatggcctttgtgagcgtggagacccaggctcctctcctgctgggcctcgagaggcttctccccttgttgtcatcagccagccggctcccatttctcctcacctctctgggccagctgaggacagtagctctgactcggaggctgaagatgagaagtcagtcctgatggcagctgtgcagagtgggggtgaggaggccaacttactgcttcctgaactgggcagtgccttctatgacatggccagtggctttacagtgggtaccctgtcagaaaccagcactgggggccctgccacccccacatggaaggagtgtcctatctgtaaggagcgctttcctgctgagagtgacaaggatgccctggaggaccacatggatggacacttctttttcagcacccaggaccccttcacctttgagtgatcttactccctcgtacatgcacaaatacacactcatgcacacacacactcacacacatgcatacacttaggtttcatgcccattttctatcacactgggctccatgatattctgttccctaagaactgcttctgtgtgccctgttttcatcccaagatttctcacttcatcctctcctacctggctcttttgtcccagggaggggtcctgttcggaagcagtggctgaatttatcccctgaaagtggttttggaggaaccgggatggaggaggccttcccctgtgggaatagaatcgtccactcctagccctggttgcttctgatacacagccactgcacacacacactcacactcacactcccttgtctgatgccccaaagccaattcctggggcaccctaccctctcttatttggagtttccgttggtttacctgagttttctctggggtctgcacagaggcagcagcatggacatcatggcctctcaggtcccttttggttctcagtttcattggttcctctttctgttcccccattgacttctgtgccccaccctagccttttccataaccttaggtattcagtttggaggggttttttgtatttttgaggattcctgtattctgtatcctctcctcgcatctcctcacatggaaagaaataatgtatttgtgccttctgtgaggaatggggggaacaagtggtcccaggtatccccatttccaaggcccccctccctctccaggtccccccacagcaataaaagcttccccctgatatccatccctttgtagtttgaacaaatatatttatatgatatgtaaaaaaaaaaaaaaaaaaaaaaaaaaaaaaaaaaaaaaaaaaaaaa

SEQ ID NO: 2880 - DNA, 4236 bp, Homo sapiens
ggtgggcggggggaggaggcggccctagcgccattttgtgggagcgaagcggtggctgggctgcgcttgggtccgtcgctgcttcggtgtccctgtcgggcttcccagcagcggcctagcgggaaaagtaaaagatgtctgaatatattcgggtaaccgaagatgagaacgatgagcccattgaaataccatcggaagacgatgggacggtgctgctctccacggttacagcccagtttccaggggcgtgtgggcttcgctacaggaatccagtgtctcagtgtatgagaggtgtccggctggtagaaggaattctgcatgccccagatgctggctggggaaatctggtgtatgttgtcaactatccaaaagataacaaaagaaaaatggatgagacagatgcttcatcagcagtgaaagtgaaaagagcagtccagaaaacatccgatttaatagtgttgggtctcccatggaaaacaaccgaacaggacctgaaagagtattttagtacctttggagaagttcttatggtgcaggtcaagaaagatcttaagactggtcattcaaaggggtttggctttgttcgttttacggaatatgaaacacaagtgaaagtaatgtcacagcgacatatgatagatggacgatggtgtgactgcaaacttcctaattctaagcaaagccaagatgagcctttgagaagcagaaaagtgtttgtggggcgctgtacagaggacatgactgaggatgagctgcgggagttcttctctcagtacggggatgtgatggatgtcttcatccccaagccattcagggcctttgcctttgttacatttgcagatgatcagattgcgcagtctctttgtggagaggacttgatcattaaaggaatcagcgttcatatatccaatgccgaacctaagcacaatagcaatagacagttagaaagaagtggaagatttggtggtaatccaggtggctttgggaatcagggtggatttggtaatagcagagggggtggagctggtttgggaaacaatcaaggtagtaatatgggtggtgggatgaactttggtgcgttcagcattaatccagccatgatggctgccgcccaggcagcactacagagcagttggggtatgatgggcatgttagccagccagcagaaccagtcaggcccatcgggtaataaccaaaaccaaggcaacatgcagagggagccaaaccaggccttcggttctggaaataactcttatagtggctctaattctggtgcagcaattggttggggatcagcatccaatgcagggtcgggcagtggttttaatggaggctttggctcaagcatggattctaagtcttctggctggggaatgtagacagtggggttgtggttggttggtatagaatggtgggaattcaaatttttctaaactcatggtaagtatattgtaaaatacatatgtactaagaattttcaaaattggtttgttcagtgtggagtatattcagcagtatttttgacatttttctttagaaaaaggaagagctaaaggaattttataagttttgttacatgaaaggttgaaatattgagtggttgaaagtgaactgctgtttgcctgattggtaaaccaacacactacaattgatatcaaaaggtttctcctgtaatattttatccctggacttgtcaagtgaattctttgcatgttcaaaacggaaaccattgattagaactacattctttaccccttgttttaatttgaaccccaccatatggatttttttccttaagaaaatctccttttaggagatcatggtgtcacagtgtttggttcttttgttttgttttttaacacttgtctcccctcatacacaaaagtacaatatgaagccttcatttaatctctgcagttcatctcatttcaaatgtttatggaagaagcacttcattgaaagtagtgctgtaaatattctgccataggaatactgtctacatgctttctcattcaagaattcgtcatcacgcatcacaggccgcgtctttgacggtgggtgtcccatttttatccgctactctttatttcatggagtcgtatcaacgctatgaacgcaaggctgtgatatggaaccagaaggctgtctgaacttttgaaaccttgtgtgggattgatggtggtgccgaggcatgaaaggctagtatgagcgagaaaaggagagagcgcgtgcagagacttggtggtgcataatggatattttttaacttggcgagatgtgtctctcaatcctgtggctttggtgagagagtgtgcagagagcaatgatagcaaataatgtacgaatgttttttgcattcaaaggacatccacatctgttggaagacttttaagtgagtttttgttcttagataacccacattagatgaatgtgttaagtgaaatgatacttgtactccccctacccctttgtcaactgctgtgaatgctgtatggtgtgtgttctcttctgttactgatatgtaagtgtggcaatgtgaactgaagctgatgggctgagaacatggactgagcttgtggtgtgctttgcaggaggacttgaagcagagttcaccagtgagctcaggtgtctcaaagaagggtggaagttctaatgtctgttagctacccataagaatgctgtttgctgcagttctgtgtcctgtgcttggatgctttttataagagttgtcattgttggaaattcttaaataaaactgatttaaataatatgtgtctttgttttgcagccctgaatgcaaagaattcatagcagttaattccccttttttgacccttttgagatggaactttcataaagtttcttggcagtagtttattttgcttcaaataaacttatttgaaaagttgtctcaagtcaaatggattcatcacctgtcatgcattgacacctgatacccagacttaattggtatttgttcttgcattggccaaagtgaaaatttttttttttcttttgaaatctagttttgaataagtctgggtgaccgcacctaaaatggtaagcagtaccctccggctttttcttagtgcctctgtgcatttgggtgatgttctatttacatggcctgtgtaaatctccattgggaagtcatgccttctaaaaagattcttatttgggggagtgggcaaaatgttgattattttctaatgctttgtagcaaagcatatcaattgaaaagggaatatcagcaccttcctagtttgggatttgaaaagtggaattaattgcagtagggataaagtagaagaaaccacaaattatcttgtgcctgaaatccattaagaggcctgatagctttaagaattagggtgggttgtctgtctggaagtgttaagtggaatgggctttgtcctccaggaggtgggggaatgtggtaacattgaatacagttgaataaaatcgcttacaaaactcacactctcacaatgcattgttaagtatgtaaaagcaataacattgattctctgttgtacttttttgtaactaattctgtgagagttgagctcattttctagttggaagaatgtgatatttgttgtgttggtagtttacctaatgcccttacctaattagattatgataaataggtttgtcattttgcaagttacataaacatttatcaatgaagtcatcctttagacttgtaatcgccacattgtttcattattcagtttcctctgtaaagggatcttgagttgttttaattttttttttctgcatctgaatctgcatgatttccaaaccctgtaccatctgaattttgcattttagcacttgcactattactcagcagcagtaacatggtaacacttaaaatggtactcggggacctccaaagactaaactgacaagccttcaaggagcccaggggtaagttaacttgtcaacggcatggtttaatcccttctttacacttgtgtaaatttcagttactggtcatagaaggctttcaatgttgagtggccttttattaacatgtttatggtactgcatagatacgggtatttattttaccctaagaagattttgaagtttaaaagtacttaaactatttggcaaagatttgtttttaaaaatctatttggtcaatctaaatgcattcattctaaaaaattttttgaaccagataaataaaatttttttttgacaccacaaaaaaaaaaaaaaaaaaaa

SEQ ID NO: 2881 - DNA, 997 bp, Homo sapiens
atgttgtgggaggtccctgaggccgctgaggtcgttcgtgtctgttgaacggctgtgggcgtcttgctgccttgggtagggggttaaaatcgttcttgagaggaacgtctctgtgcgaagagataatgagtttagctctgagaagtgagcttgtagtggacaaaacaaagaggaaaaaaagaagagaactgtctgaggaacagaaacaagaaattaaagatgcttttgaactatttgatacagacaaagatgaagcaatagattatcatgaattaaaggtggcaatgagagccttggggtttgatgtaaaaaaagctgatgtactgaagattcttaaagattatgacagagaagccacagggaaaatcacctttgaagattttaatgaagttgtgacagactggatattggaaagagatccccatgaagaaatactcaaggcatttaaactatttgatgatgatgattcaggtaaaataagcttgaggaatttgcgacgtgttgctagagaattgggtgaaaacatgagtgatgaagaacttcgagctatgatagaagaatttgacaaagatggtgatggagaaataaaccaagaggagttcattgctattatgactggtgacatttaaagaattacaaggataaacactaagaatgttgcagttaccatcttatattctatttttgtgcctggagccatgtgaaaaaaaccaacttagttcttttatcctaaaggaccaaaaataagcatcttatatatctgtattttactactgttaagtttctttgtatgaactgtgttgttagtactcagatagtttagctttgtatttataatagagcttttatataaagttttaaaaattgaatgtgtgatatgtgttctttgaaggttttttaatttaacatttatagtcactttttagtgcacacattttccagactttcgttaataaaatatttattttattagaattttaaaaaaaaaaaaaaaaaa

SEQ ID NO: 2882 - DNA, 2159 bp, Homo sapiens
ataacctttattctgcttcagctggctctttaccagcagtgaagatcccaaagaaaagagggcggaaacccgggtacaagaaacctaaggcaacaacaaagacaaatgccctgccagagaacagcttggataggttgcgacaggcagagaacccccccattccactggagagagatcaagtctcgggttctcatgactcccttagccctctcacctccgcggagtaccccagagcccgacctcagctccatccctcaggacgcagccacggtccccagcttggcggccccacaggctctcacagtctgcctctacatcaacaagcaggccaatgcggggccctatctggagaggaagaaggtgcagcagctcccggagcattttgggcccgagcggccatcggcggtgctgcagcaggccgtccaagcctgcatcgactgcgcccaccagcagaagctggtcttctccctggtcaagcagggctatggtggtgagatggtgtcagtctcggcttcctttgatggcaaacagcacctgcggagcctgcctgtggtgaacagcatcggctatgtcctccgcttcctcgccaagctgtgccgaagcctcctgtgcgatgacctcttcagccaccagcccttccccaggggctgcagtgcctctgagaaagtccaggagaaagaggaagggaggatggaatcagtcaagacagtcaccaccgaagagtacctggtgaaccctgtgggcatgaaccgctacagcgtggacacctccgcctccacctttaaccacaggggctccttgcacccctcctcctcgctgtactgcaagaggcagaactctggagacagccaccttgggggtggtcctgctgccaccgctggtggtccccgcactagccccatgtcttctggtggcccctcggcacctgggctgaggcctccagcctccagccccaagagaaacacgacctctcttgaaggaaacagatgtggtaatgtaatgcatgcatcagcttcccactgacttaacatcccttgcccttgcgcggggagcacagcatctggggaagggggagtgtggctgtttaaacgtgggactgctgggagatcagaaatttccacaagtcctttcatggatcttgaggttctcaaaaacagccaaactcaacctttgataagcaaagaaaatcgtgtattagggcaggctaggccacaggatacgtagactccaaaatgtacacaggctcaaataccatagaaatttttgttcgagagccaaaggtgaatgttcctgattcatggatgcatctcaatatagggacataggctccatctattttgtggctctgccaccctctacagccttcatgccccatgcattagggaatagaaagggaaagaaggtgtggagaagacacaggtgcttccctgcaatctgaaagtgatgctcatcacttccactcacatctcattggcaaaagctggtcattttgccacacttaaccataagggactctggaagctgtaggttagctctgcccaggagaaaggagaaccagaccttggtaaagaattgtctcttgcataggaagtgtcaccttcaggatacaaatacatgagcagaggcagagttaggcaaaattcccccaatgctggttgtaatgccacttctgtctcatccactaaagaaagcttgttggaatgcagtctacaaaagcgctataagggctaaaggattatagtaatagcttgaaggcccttctgattgatgttttaaaaaatcattttcaagcttcagtattttgatagtgcctaaaggccatagagtatagtggataatcactgggactagagccagacagcctgggctgagatgctggatctgctgcttcctgcctaccttttgcaagtcttaacttacctgtgcttcagtttcctcacctataaaattgtgataataataatggcagccttgatttcataggtttgtccccagtgttagcttaatatctggcatgtggtaggtgttcaataaacatgcatcatgtctgtgcccaaaaaaaaaaaaaaaaaaaaaaaaaaaaaaaaaaaaaaaaaaaaaaaaaaaaaaaaaaaaaaaaaaaaaaaaaaaaaaaaaaaaaaaaaaaaaaaaaaaaaaaa

SEQ ID NO: 2883 - DNA, 2701 bp, Homo sapiens
ccgccgtagcgcgtcttgggtctcccggctgccgctgctgccgccgccgcctcgggtcgtggagccaggagcgacgtcaccgccatggcaggcatcaaagctttgattagtttgtcctttggaggagcaatcggactgatgtttttgatgcttggatgtgcccttccaatatacaacaaatactggcccctctttgttctatttttttacatcctttcacctattccatactgcatagcaagaagattagtggatgatacagatgctatgagtaacgcttgtaaggaacttgccatctttcttacaacgggcattgtcgtgtcagcttttggactccctattgtatttgccagagcacatctgattgagtggggagcttgtgcacttgttctcacaggaaacacagtcatctttgcaactatactaggctttttcttggtctttggaagcaaggacgacttcagctggcagcagtggtgaaaagaaattactgaactattgtcaaatggacttcctgtcatttgttggccattcacgcacacaggagatggggcagttaatgctgaatggtatagcaagcctcttgggggtattttaggtgctcccttctcacttttattgtaagcatactattttcacagagacttgctgaaggattaaaaggattttctcttttggaaaagcttgactgatttcacacttatctatagtatgctttttgtggtgtcctgctgaatttaaatatttatgtgtttttcctgttaggttgattttttttggaatcaatatgcaatgttaaacacttttttaatgtaatcatttgcattggttaggaattcagaattccgccggctctattactggtcaagtacatcttttctcttaaaattatttagcctccattattacaaaaaattataaaaataagttttcagtcagtcaggatgacatcactcccaatgttatgcagacatacagacggttggcatacgttatagactgtatactcagtgcaaatatagctgcatttatacctcagaggggccaagtgttaatgcccatgccctccgttaagggttgttggttttactggtagacagatgttttgtggattgaaaattattttatggaattgctacagaggagtgcttttcttctcaattgttagaagaatttatgttaaactttaaggtaagggtgtaaaaacatttttgagataaggtttttatttatgtttattattgttagagtgagttgcaatgtgggaagaaatgacattgaaattccagtttttgaatcctgtttctatttataagtgaaatttgtgatctcctatcaacctttcatgttttaccctgttaaaatggacatacatggaaccactactgatgagggacagttgtatgtttgcatcatatatgccagaaaaccttcctctgcttcctccttttgacttatttggtatgttgtatatattacataaaataacttttcaaatatagtttaataacacttagaagtgtttacttacctggaaaataattgctatgccgtacattcagagtgccccctcccctgcaaggccttgccatgattaacaagtaacttgttagtcttacagataattcatgcattaacagtttaagatttagaccatggtaatagtagttcttattctctaaggttatatcatatgtaatttaaaagtatttttaagccaagtttcctgtatacctctgaactgttttgattttgagttcatcatgatagatctgctgtttccttataaaaggcatttgttgtgtgagttaatgcaaagtagccaagtccagctatatagcagcttcagaaacatacctgaccaaaaaattcccagtaaccaggcatgatcaatttatagtggtcgtttacatctaataattatcaggacttttttcaggagtgggttataaaaacattcaagttggtctgacagtattttgttaaggatatttgtttgtatgtttattcagtatacttacataaaaattatttcgccatcagccaaaactcagtaatcatgacagctgtctgttgttttatgaagtttatttctcaagaaaatgggaataaatttgggatttgttcagcttttttactaaagatgcctaaagccacaggttttattgcctaacttaagccatgacttttagatatgagatgacgggaagcaggacgaaatatcggcgtgtggctggagccttcccactggaggctgaaagtggcttgtggtattataatgttcagatttcaagaggaaggtgcaggtacacatgagttagagagctggtgagacagttgggaactctttgtgcttgtgatctactggactttttttttgcaggaagtgcattctctggtccttccctattttctgttctggatgtcagtgcagtgcactgctactgttttatccacttggccacagactttttctaacagctgcgtattatttctatatactaattgcattggcagcattgtgtctttgaccttgtatactagcttgacatagtgctgtctctgatttctaggctagttacttgagatatgaattttccatagaatatgcactgatacaacattaccattcttctatggaaagaaaacttttgatgatgaaacaataaagattttaaatatcaaaaaaaaaaaaaaaaaa

SEQ ID NO: 2884 - DNA, 4456 bp, Homo sapiens
cgccgccgcgcgagggagcgaccagggcagcgcgacgcgggcagagcgagcgccgcggaccccggaggcgagcggccgagggagcccagtcccaacttcgggccccggccccgcgcgccccggcccggccccgcgaggtctcggcgcggaagatggccggcggcgtggacggccccatcgggatcccgttccccgaccacagcagcgacatcctgagtgggctgaacgagcagcggacgcagggcctgctgtgcgacgtggtgatcctggtggagggccgcgagttccccacgcaccgctcggtgctggccgcctgcagccagtacttcaagaagctgttcacgtcgggcgccgtggtggaccagcagaacgtgtacgagatcgacttcgtcagcgccgaggcgctcaccgcgctcatggacttcgcctacacggccacgctcaccgtcagcacagccaacgtgggtgacatcctcagcgccgcccgcctgctggagatccccgccgtgagccacgtgtgcgccgacctcctggaccggcagatcctggcggccgacgcgggcgccgacgccgggcagctggaccttgtagatcaaattgatcagcgcaacctcctccgcgccaaggagtacctcgagttcttccagagcaaccccatgaacagcctgccccccgcggccgccgccgccgctgccagcttcccgtggtccgcctttggggcgtccgatgatgacctggatgccaccaaggaggccgtggccgccgctgtggccgccgtggccgcgggcgactgcaacggcttagacttctatgggccgggccccccggccgagcggcccccgacgggggacggggacgagggcgacagcaacccgggtctgtggccagagcgggatgaggacgcccccaccgggggtctctttccgccgccggtggccccgccggccgccacgcagaacggccactacggccgcggcggagaggaggaggccgcctcgctgtcggaggcggcccccgagccgggcgactctccgggcttcctgtcgggagcggccgagggcgaggacggggacgggcccgacgtggacgggctggcggccagcacgctgctgcagcagatgatgtcatcggtgggccgggcgggggccgcggcgggggacagcgacgaggagtcgcgggccgacgacaagggcgtcatggactactacctgaagtacttcagcggcgcccacgacggcgacgtctacccggcctggtcgcagaaggtggagaagaagatccgagccaaggccttccagaagtgccccatctgcgagaaggtcatccagggcgccggcaagctgccgcgacacatccgcacccacacgggcgagaagccctacgagtgcaacatctgcaaggtccgcttcaccaggcaggacaagctgaaggtgcacatgcggaagcacacgggcgagaagccgtacctgtgccagcagtgcggcgccgcctttgcccacaactacgacctgaagaaccacatgcgcgtgcacacgggcctgcgcccctaccagtgcgacagctgctgcaagaccttcgtccgctccgaccacctgcacagacacctcaagaaagacggctgcaacggcgtcccctcgcgccgcggccgcaagccccgcgtccggggcggggcgcccgaccccagcccgggggccaccgcgacccccggcgcccccgcccagcccagctcccccgacgcccggcgcaacggccaggagaagcactttaaggacgaggacgaggacgaggacgtggccagccccgacggcttgggccggttgaatgtagcgggcgccggtggaggaggtgacagcggaggtggccccggggccgccaccgacggtaacttcacagccggactcgcctaaaaaccaaaaagagaaaacagaaacccgagaaagagagagacagagagagagaaaaaaaatcacccaccacccccccaaaaacacaaaaaaagaaaatctatctatatacagatatctatatctatatatatatatacagatatatatatatgacgcgtcacagaatctagggtagcgctttctcagatttccctcctttctgacgtttttctccctccgcaggggccccggccctccctggctccccttccccccaccaccccatcgctgggtttcggggcttggtttggggttttttgtaggacacaaggaatccgagaccccgcacagccccctgggcacccggcatggggcctggggcccgatccgaggccctgggctggggggagggtagacgtgggggcgctggggggggactggggtgggcttttaatttcctcccctcgctggtttctatgagtctttcagacaagaccttaaatgatttctgtctgctctgagcggacgttaaaatgggcccccgtcccccgacccgcaccctccttcctcagggcacttactaagggaggggtctccctctccatctccccagtggcctccccgcctccaaccctgcctgcggcctccccccgtcgcccaccccacgtctcctggccactgagacacaaacctatttatttctaggcctggagaaaggagatcggactggggttcccggtggggcgccaggatggctcctgggggtgctcctgccgccttccttcacggcacttacaaccggcgggacccccagggaccacccctcagggcgcccccccacccccgcccggtccacctagacccccacgtttggagattcaaaacttctgtcttcgtcctctcccccgagccccctctcccaaatttttaaagcactttttagatttttttttctctttcctccttaaaaacaaaatttatatatagatatatatatatatataaataatatacttttcctcagaggagcaggcaacagtgtgggataaacagagtcacgatcagaggaaccccagggtctggtgatggcagggatggggggagagagagaaaatccacaaattccaatgtcacaaaagcaataaaacaaactagaaaaaaaaaaggttttacaaaatgaaaggaaggaaaaaaaaaaaggcaaccaaccacattagaagtcttggcactttgtaacggaacgggtactacactttatcttaattcttaatttaaaaacatgtttacaagttacaaccaacttctatgaaaagttgaaaagacaaaaaaaaaaaaaaaaagcgagcgagagagagagcgagagagagagcgagagcagaagaaattcctaaaagtcgatttatttttgtacaaaataataaaaaaaaaaacccaccacaaacgtagaatccacttctgttccccaaaaagcgagaaggggggttcaggaggaagccatcgcaggggacctgggagacgccccgaggtgtttgtgcttcacccccagacgtcagcctcgaaggcaggactgtggggtgttcgtgctgtgttccccccgctccccctttctgtccccttttttggttctgacgtgaagaggtcttagcgcccgcttctgtccacggggtctctccttcctcctccctagctcagggatgggccttccagccggagcaccccgatccccatccggcaccccccaatcccccaacacgcctgtccctcccgcatggccaccaaggagctggaccttggatgcgcctaccctgctgaggtgggtgacaggggccccccacctccagggccttagaaccaccgcccctctccccaccccaggcacccctctttttactcaaaggcactgactgtaatccagggggactgggacctgcctccccccaacctctggctcccacaaggcccggtgttgaccgagccacaggccacggacaggggccggggttggggagactatgtcgccagatgccaggacgccctcaccccgtttgcatatgcaatgctagcatgggaccccgaaaatagacgctctgctgcactgagacttcttgtcaatgcccaaccggcgggggggtgtctccctgcccccgacccccccatacccccttctctgtgacacacacatcttctcgtctctttttctttcattgttaaagggaagctttttaagaaggcaattttcatattgtttctacgggatggttttggttcccttcccttcccacccccccttaagcctgtcagccccctccaaatgtctcaggatcccccctctcccctggggctgggtgacagcaccccggctgcgttcacaccccagtgtcacagggcgagctgttctggagagaaaaccatctgtcgtggctgagcggggagcttgaacacccaggccagggacacccctccccagctcccagagaggccccctgaggggtgagccctctttccaccttcccctatccatgcaccccctcgcaataaaaccaactctaaaatcaaaaaaaaaaaaaaaa

SEQ ID NO: 2885 - DNA, 4991 bp, Homo sapiens
ggcggcgcgcaagggacgtgcggagtgagtggcgctgcgggtggggccgtcggcggcgctggtgagctttgcggagctgggcggtgccgaggaggaggaggtggcggcctgggtctgacgcggccctgttcgagggggcctctcttgtttatttatttattttccgtgggtgcctccgagtgtgcgcgcgctctcgctacccggcggggagggggtggggggagggcccgggaaaagggggagttggagccggggtcgaaacgccgcgtgacttgtaggtgagagaacgccgagccgtcgccgcagcctccgccgccgagaagcccttgttcccgctgctgggaaggagagtctgtgccgacaagatggcggacggggagctgaacgtggacagcctcatcacccggctgctggaggtacgaggatgtcgtccaggaaagattgtgcagatgactgaagcagaagttcgaggcttatgtatcaagtctcgggagatctttctcagccagcctattcttttggaattggaagcaccgctgaaaatttgtggagatattcatggacaatatacagatttactgagattatttgaatatggaggtttcccaccagaagccaactatcttttcttaggagattatgtggacagaggaaagcagtctttggaaaccatttgtttgctattggcttataaaatcaaatatccagagaacttctttctcttaagaggaaaccatgagtgtgctagcatcaatcgcatttatggattctatgatgaatgcaaacgaagatttaatattaaattgtggaagaccttcactgattgttttaactgtctgcctatagcagccattgtggatgagaagatcttctgttgtcatggaggattgtcaccagacctgcaatctatggagcagattcggagaattatgagacctactgatgtccctgatacaggtttgctctgtgatttgctatggtctgatccagataaggatgtgcaaggctggggagaaaatgatcgtggtgtttcctttacttttggagctgatgtagtcagtaaatttctgaatcgtcatgatttagatttgatttgtcgagctcatcaggtggtggaagatggatatgaattttttgctaaacgacagttggtaaccttattttcagccccaaattactgtggcgagtttgataatgctggtggaatgatgagtgtggatgaaactttgatgtgttcatttcagatattgaaaccatctgaaaagaaagctaaataccagtatggtggactgaattctggacgtcctgtcactccacctcgaacagctaatccgccgaagaaaaggtgaagaaaggaattctgtaaagaaaccatcagatttgttaaggacatacttcataatatataagtgtgcactgtaaaaccatccagccatttgacaccctttatgatgtcacacctttaacttaaggagacgggtaaaggatcttaaatttttttctaatagaaagatgtgctacactgtattgtaataagtatactctgttatagtcaacaaagttaaatccaaattcaaaattatccattaaagttacatcttcatgtatcacaatttttaaagttgaaaagcatcccagttaaactagatgtgatagttaaaccagatgaaagcatgatgatccatctgtgtaatgtggttttagtgttgcttggttgtttaattattttgagcttgttttgtttttgtttgttttcactagaataatggcaaatacttctaatttttttccctaaacatttttaaaagtgaaatatgggaagagctttacagacattcaccaactattattttcccttgtttatctacttagatatctgtttaatcttactaagaaaactttcgcctcattacattaaaaaggaattttagagattgattgttttaaaaaaaaatacgcacattgtccaatccagtgattttaatcatacagtttgactgggcaaactttacagctgatagtgaatattttgctttatacaggaattgacactgatttggatttgtgcactctaatttttaacttattgatgctctattgtgcagtagcatttcatttaagataaggctcatatagtattacccaactagttggtaatgtgattatgtggtaccttggctttaggttttcattcgcacggaacaccttttggcatgcttaacttcctggtaacaccttcacctgcattggttttctttttcttttttctttctttttttttttttttttttttttgagttgttgtttgtttttagatccacagtacatgagaatccttttttgacaagccttggaaagctgacactgtctctttttcctccctctatacgaaggatgtatttaaatgaatgctggtcagtgggacattttgtcaactatgggtattgggtgcttaactgtctaatattgccatgtgaatgttgtatacgattgtaaggcttatgtcactaaagatttttattctgattttttcataatcaaaggtcatatgatactgtatagacaagctttgtagtgaagtatagtagcaataatttctgtacctgatcaagtttattgcagcctttcttttcctatttcttttttttaagggttagtattaacaaatggcaatgagtagaaaagttaacatgaagattttagaaggagagaacttacaggacacagatttgtgattctttgactgtgacactattggatgtgattctaaaagcttttattgagcattgtcaaatttgtaagcttcatagggatggacatcatatctataatgcccttctatatgtgctaccatagatgtgacatttttgaccttaatatcgtctttgaaaatgttaaattgagaaacctgttaacttacattttatgaattggcacattgtattacttactgcaagagatatttcattttcagcacagtgcaaaagttctttaaaatgcatatgtctttttttctaattccgttttgttttaaagcacattttaaatgtagttttctcatttagtaaaagttgtctaattgatatgaagcctgactgattttttttttccttacagtgagacatttaagcacacattttattcacatagatactatgtccttgacatattgaaatgattcttttctgaaagtattcatgatctgcatatgatgtattaggttaggtcacaaaggttttatctgaggtgatttaaataacttcctgattggagtgtgtaagctgagcgatttctaataaaattttagttgtacacttttagtagtcatagtgaagcaggtctagaaaataagcctttggcagggaaaaagggcaatgttgattaatctcagtattaaaccacattaatctgtatcccattgtctggcttttgtaaattcatccaggtcaagactaagtatgttggttaataggaatccttttttttttttttaaagactaaatgtgaaaaaataatcactacttaagctaattaatattggtcattaaatttaaaggatggaaatttatcatgtttaaaaattattcaagcactcttaaaaccacttaaacagcctccagtcataaaaatgtgttctttacaaatatttgcttggcaacacgacttgaaataaataaaactttgtttcttaggagaaaatgattctgtaattccagtgtcactaatttatattgttctttcctctgatttttttcaggttagtgatttttttgtatacaatttaatccaaatgttatgacattcagaaatcatgaaacacagtagatatctgttataatgtggtgtatcacatggattataaagcaaagttatggtcgatttctattcttgaaagaatcaactacagtgaatcctttgcatttgaagccttaacatgcattgctttaattttgcccagggacaaattttaataatcagcaagactggtttgtgcaaagcgttgagtcatcaggtatttagagcctagccagctacccagtatccatgctgccatatcccttcattgtaaaaagtacctaaacattcgtgaaatgattttttttagctgaaaaatgctggcaagaagaattttaaagcttaaaataggtggtaaatttgaagtatgagtgtgttcacgagaaacataggcttttcaaaaaaatttttattcaaggcaaagcaaggaacatcttgagatatgtctcaagaatataaagatgtattattttaagccaaggagctgaaatatatctcagtttataaattcaggtatattctttttgtctccatggcaaccataacttttgaaccaaaaaaaattgtttttacatctttatgctgaaaatgtgtttagattaggaatatggtcgggctgaatttgctgttgctccctaaccaaatccacctcttgttttccttgtgagtccatggctaaatcaaagctgcccctgagaagagacttaatccaagcctgattgtactagtggcatcacttagaagtaggctttccctcttcctagtagatctcaatgttttataattccttaaaacagctgaaaattgggacaacatactttacgcaatgaacagtagttaaataggaaataaactagttccatataagtatacacctagagttttaattacctttataatgtttcttaaaagtgaaacttagatacaattgtgattggatacttagatactaagtgaaacttagtgtaacaattttgatctgttaaattggattttacatgtacatttgaatgccagaatttctaaataaatcccctggttaggaaattttaaaagtcaaagcttgttttcttcaaccactaccttctacattggttgacttagaccgtaagctttttaagtttctcattgtaatttaccttctcatgcagattgctgatgttttattaaaccttatttttacaaaaatgaaaaaa

SEQ ID NO: 2886 - DNA, 4786 bp, Homo sapiens
gctgcgtgacgcggcggcgcgcaagggacgtgcggagtgagtggcgctgcgggtggggccgtcggcggcgctggtgagagaacgccgagccgtcgccgcagcctccgccgccgagaagcccttgttcccgctgctgggaaggagagtctgtgccgacaagatggcggacggggagctgaacgtggacagcctcatcacccggctgctggaggtacgaggatgtcgtccaggaaagattgtgcagatgactgaagcagaagttcgaggcttatgtatcaagtctcgggagatctttctcagccagcctattcttttggaattggaagcaccgctgaaaatttgtggagatattcatggacaatatacagatttactgagattatttgaatatggaggtttcccaccagaagccaactatcttttcttaggagattatgtggacagaggaaagcagtctttggaaaccatttgtttgctattggcttataaaatcaaatatccagagaacttctttctcttaagaggaaaccatgagtgtgctagcatcaatcgcatttatggattctatgatgaatgcaaacgaagatttaatattaaattgtggaagaccttcactgattgttttaactgtctgcctatagcagccattgtggatgagaagatcttctgttgtcatggaggattgtcaccagacctgcaatctatggagcagattcggagaattatgagacctactgatgtccctgatacaggtttgctctgtgatttgctatggtctgatccagataaggatgtgcaaggctggggagaaaatgatcgtggtgtttcctttacttttggagctgatgtagtcagtaaatttctgaatcgtcatgatttagatttgatttgtcgagctcatcaggtggtggaagatggatatgaattttttgctaaacgacagttggtaaccttattttcagccccaaattactgtggcgagtttgataatgctggtggaatgatgagtgtggatgaaactttgatgtgttcatttcagatattgaaaccatctgaaaagaaagctaaataccagtatggtggactgaattctggacgtcctgtcactccacctcgaacagctaatccgccgaagaaaaggtgaagaaaggaattctgtaaagaaaccatcagatttgttaaggacatacttcataatatataagtgtgcactgtaaaaccatccagccatttgacaccctttatgatgtcacacctttaacttaaggagacgggtaaaggatcttaaatttttttctaatagaaagatgtgctacactgtattgtaataagtatactctgttatagtcaacaaagttaaatccaaattcaaaattatccattaaagttacatcttcatgtatcacaatttttaaagttgaaaagcatcccagttaaactagatgtgatagttaaaccagatgaaagcatgatgatccatctgtgtaatgtggttttagtgttgcttggttgtttaattattttgagcttgttttgtttttgtttgttttcactagaataatggcaaatacttctaatttttttccctaaacatttttaaaagtgaaatatgggaagagctttacagacattcaccaactattattttcccttgtttatctacttagatatctgtttaatcttactaagaaaactttcgcctcattacattaaaaaggaattttagagattgattgttttaaaaaaaaatacgcacattgtccaatccagtgattttaatcatacagtttgactgggcaaactttacagctgatagtgaatattttgctttatacaggaattgacactgatttggatttgtgcactctaatttttaacttattgatgctctattgtgcagtagcatttcatttaagataaggctcatatagtattacccaactagttggtaatgtgattatgtggtaccttggctttaggttttcattcgcacggaacaccttttggcatgcttaacttcctggtaacaccttcacctgcattggttttctttttcttttttctttctttttttttttttttttttttttgagttgttgtttgtttttagatccacagtacatgagaatccttttttgacaagccttggaaagctgacactgtctctttttcctccctctatacgaaggatgtatttaaatgaatgctggtcagtgggacattttgtcaactatgggtattgggtgcttaactgtctaatattgccatgtgaatgttgtatacgattgtaaggcttatgtcactaaagatttttattctgattttttcataatcaaaggtcatatgatactgtatagacaagctttgtagtgaagtatagtagcaataatttctgtacctgatcaagtttattgcagcctttcttttcctatttcttttttttaagggttagtattaacaaatggcaatgagtagaaaagttaacatgaagattttagaaggagagaacttacaggacacagatttgtgattctttgactgtgacactattggatgtgattctaaaagcttttattgagcattgtcaaatttgtaagcttcatagggatggacatcatatctataatgcccttctatatgtgctaccatagatgtgacatttttgaccttaatatcgtctttgaaaatgttaaattgagaaacctgttaacttacattttatgaattggcacattgtattacttactgcaagagatatttcattttcagcacagtgcaaaagttctttaaaatgcatatgtctttttttctaattccgttttgttttaaagcacattttaaatgtagttttctcatttagtaaaagttgtctaattgatatgaagcctgactgattttttttttccttacagtgagacatttaagcacacattttattcacatagatactatgtccttgacatattgaaatgattcttttctgaaagtattcatgatctgcatatgatgtattaggttaggtcacaaaggttttatctgaggtgatttaaataacttcctgattggagtgtgtaagctgagcgatttctaataaaattttagttgtacacttttagtagtcatagtgaagcaggtctagaaaataagcctttggcagggaaaaagggcaatgttgattaatctcagtattaaaccacattaatctgtatcccattgtctggcttttgtaaattcatccaggtcaagactaagtatgttggttaataggaatccttttttttttttttaaagactaaatgtgaaaaaataatcactacttaagctaattaatattggtcattaaatttaaaggatggaaatttatcatgtttaaaaattattcaagcactcttaaaaccacttaaacagcctccagtcataaaaatgtgttctttacaaatatttgcttggcaacacgacttgaaataaataaaactttgtttcttaggagaaaatgattctgtaattccagtgtcactaatttatattgttctttcctctgatttttttcaggttagtgatttttttgtatacaatttaatccaaatgttatgacattcagaaatcatgaaacacagtagatatctgttataatgtggtgtatcacatggattataaagcaaagttatggtcgatttctattcttgaaagaatcaactacagtgaatcctttgcatttgaagccttaacatgcattgctttaattttgcccagggacaaattttaataatcagcaagactggtttgtgcaaagcgttgagtcatcaggtatttagagcctagccagctacccagtatccatgctgccatatcccttcattgtaaaaagtacctaaacattcgtgaaatgattttttttagctgaaaaatgctggcaagaagaattttaaagcttaaaataggtggtaaatttgaagtatgagtgtgttcacgagaaacataggcttttcaaaaaaatttttattcaaggcaaagcaaggaacatcttgagatatgtctcaagaatataaagatgtattattttaagccaaggagctgaaatatatctcagtttataaattcaggtatattctttttgtctccatggcaaccataacttttgaaccaaaaaaaattgtttttacatctttatgctgaaaatgtgtttagattaggaatatggtcgggctgaatttgctgttgctccctaaccaaatccacctcttgttttccttgtgagtccatggctaaatcaaagctgcccctgagaagagacttaatccaagcctgattgtactagtggcatcacttagaagtaggctttccctcttcctagtagatctcaatgttttataattccttaaaacagctgaaaattgggacaacatactttacgcaatgaacagtagttaaataggaaataaactagttccatataagtatacacctagagttttaattacctttataatgtttcttaaaagtgaaacttagatacaattgtgattggatacttagatactaagtgaaacttagtgtaacaattttgatctgttaaattggattttacatgtacatttgaatgccagaatttctaaataaatcccctggttaggaaattttaaaagtcaaagcttgttttcttcaaccactaccttctacattggttgacttagaccgtaagctttttaagtttctcattgtaatttaccttctcatgcagattgctgatgttttattaaaccttatttttacaaaaatgaaaaaa

SEQ ID NO: 2887 - DNA, 4288 bp, Homo sapiens
gctgcgtgacgcggcggcgcgcaagggacgtgcggagtgagtggcgctgcgggtggggccgtcggcggcgctggtgagctttgcggagctgggcggtgccgaggaggaggaggtggcggcctgggtctgacgcggccctgttcgagggggcctctcttgtttatttatttattttccgtgggtgcctccgagtgtgcgcgcgctctcgctacccggcggggagggggtggggggagggcccgggaaaagggggagttggagccggggtcgaaacgccgcgtgacttgtaggtgagagaacgccgagccgtcgccgcagcctccgccgccgagaagcccttgttcccgctgctgggaaggagagtctgtgccgacaagatggcggacggggagctgaacgtggacagcctcatcacccggctgctggagcagccattgtggatgagaagatcttctgttgtcatggaggattgtcaccagacctgcaatctatggagcagattcggagaattatgagacctactgatgtccctgatacagatattgaaaccatctgaaaagaaagctaaataccagtatggtggactgaattctggacgtcctgtcactccacctcgaacagctaatccgccgaagaaaaggtgaagaaaggaattctgtaaagaaaccatcagatttgttaaggacatacttcataatatataagtgtgcactgtaaaaccatccagccatttgacaccctttatgatgtcacacctttaacttaaggagacgggtaaaggatcttaaatttttttctaatagaaagatgtgctacactgtattgtaataagtatactctgttatagtcaacaaagttaaatccaaattcaaaattatccattaaagttacatcttcatgtatcacaatttttaaagttgaaaagcatcccagttaaactagatgtgatagttaaaccagatgaaagcatgatgatccatctgtgtaatgtggttttagtgttgcttggttgtttaattattttgagcttgttttgtttttgtttgttttcactagaataatggcaaatacttctaatttttttccctaaacatttttaaaagtgaaatatgggaagagctttacagacattcaccaactattattttcccttgtttatctacttagatatctgtttaatcttactaagaaaactttcgcctcattacattaaaaaggaattttagagattgattgttttaaaaaaaaatacgcacattgtccaatccagtgattttaatcatacagtttgactgggcaaactttacagctgatagtgaatattttgctttatacaggaattgacactgatttggatttgtgcactctaatttttaacttattgatgctctattgtgcagtagcatttcatttaagataaggctcatatagtattacccaactagttggtaatgtgattatgtggtaccttggctttaggttttcattcgcacggaacaccttttggcatgcttaacttcctggtaacaccttcacctgcattggttttctttttcttttttctttctttttttttttttttttttttttgagttgttgtttgtttttagatccacagtacatgagaatccttttttgacaagccttggaaagctgacactgtctctttttcctccctctatacgaaggatgtatttaaatgaatgctggtcagtgggacattttgtcaactatgggtattgggtgcttaactgtctaatattgccatgtgaatgttgtatacgattgtaaggcttatgtcactaaagatttttattctgattttttcataatcaaaggtcatatgatactgtatagacaagctttgtagtgaagtatagtagcaataatttctgtacctgatcaagtttattgcagcctttcttttcctatttcttttttttaagggttagtattaacaaatggcaatgagtagaaaagttaacatgaagattttagaaggagagaacttacaggacacagatttgtgattctttgactgtgacactattggatgtgattctaaaagcttttattgagcattgtcaaatttgtaagcttcatagggatggacatcatatctataatgcccttctatatgtgctaccatagatgtgacatttttgaccttaatatcgtctttgaaaatgttaaattgagaaacctgttaacttacattttatgaattggcacattgtattacttactgcaagagatatttcattttcagcacagtgcaaaagttctttaaaatgcatatgtctttttttctaattccgttttgttttaaagcacattttaaatgtagttttctcatttagtaaaagttgtctaattgatatgaagcctgactgattttttttttccttacagtgagacatttaagcacacattttattcacatagatactatgtccttgacatattgaaatgattcttttctgaaagtattcatgatctgcatatgatgtattaggttaggtcacaaaggttttatctgaggtgatttaaataacttcctgattggagtgtgtaagctgagcgatttctaataaaattttagttgtacacttttagtagtcatagtgaagcaggtctagaaaataagcctttggcagggaaaaagggcaatgttgattaatctcagtattaaaccacattaatctgtatcccattgtctggcttttgtaaattcatccaggtcaagactaagtatgttggttaataggaatccttttttttttttttaaagactaaatgtgaaaaaataatcactacttaagctaattaatattggtcattaaatttaaaggatggaaatttatcatgtttaaaaattattcaagcactcttaaaaccacttaaacagcctccagtcataaaaatgtgttctttacaaatatttgcttggcaacacgacttgaaataaataaaactttgtttcttaggagaaaatgattctgtaattccagtgtcactaatttatattgttctttcctctgatttttttcaggttagtgatttttttgtatacaatttaatccaaatgttatgacattcagaaatcatgaaacacagtagatatctgttataatgtggtgtatcacatggattataaagcaaagttatggtcgatttctattcttgaaagaatcaactacagtgaatcctttgcatttgaagccttaacatgcattgctttaattttgcccagggacaaattttaataatcagcaagactggtttgtgcaaagcgttgagtcatcaggtatttagagcctagccagctacccagtatccatgctgccatatcccttcattgtaaaaagtacctaaacattcgtgaaatgattttttttagctgaaaaatgctggcaagaagaattttaaagcttaaaataggtggtaaatttgaagtatgagtgtgttcacgagaaacataggcttttcaaaaaaatttttattcaaggcaaagcaaggaacatcttgagatatgtctcaagaatataaagatgtattattttaagccaaggagctgaaatatatctcagtttataaattcaggtatattctttttgtctccatggcaaccataacttttgaaccaaaaaaaattgtttttacatctttatgctgaaaatgtgtttagattaggaatatggtcgggctgaatttgctgttgctccctaaccaaatccacctcttgttttccttgtgagtccatggctaaatcaaagctgcccctgagaagagacttaatccaagcctgattgtactagtggcatcacttagaagtaggctttccctcttcctagtagatctcaatgttttataattccttaaaacagctgaaaattgggacaacatactttacgcaatgaacagtagttaaataggaaataaactagttccatataagtatacacctagagttttaattacctttataatgtttcttaaaagtgaaacttagatacaattgtgattggatacttagatactaagtgaaacttagtgtaacaattttgatctgttaaattggattttacatgtacatttgaatgccagaatttctaaataaatcccctggttaggaaattttaaaagtcaaagcttgttttcttcaaccactaccttctacattggttgacttagaccgtaagctttttaagtttctcattgtaatttaccttctcatgcagattgctgatgttttattaaaccttatttttacaaaaatgaaaaaaaa

SEQ ID NO: 2888 - DNA, 3056 bp, Homo sapiens
ctcggccactcggggcatcgcggcggcctttctagccgctgtcccaagggttggtctcgcgctttcggctgcgagctctctgtggtgctggcagcgacatgtggcgcctcccgggactcctgggccgagctcttccccgtacactgggacctagcctctggagggtgactcctaagtccaccagcccagatgggcctcagactacctcctccactttgctggttcctgtgcctaacctcgacaggtcaggtccccatggcccaggcacgagcgggggtccaaggtcccatggatggaaggatgccttccaatggatgtcttcccgtgtctccccgaacaccctatgggatgccatatcttggggcactctggccgtgctggccctgcagctggcaaggcagatccacttccaggcatccctgccagcaggacctcagcgggtagaacactgctcctggcacagtcccctggaccgtttcttctcatctcccttgtggcacccatgctcctcactgcgacaacacatcctccccagccccgatggcccagctcccaggcacactggcctcagggaacccaggcttggccaggaagaagcctcagctcagccccggaacttctcacacaactctttgagaggagctcgtcctcaggacccctctgaggaaggtcccggtgattttggcttcctgcatgccagtagtagcatcgagtccgaggcaaaaccagcccagcctcagcccactggtgaaaaggaacaagataaatcaaaaactctttcccttgaggaggctgtgacttccattcagcagctcttccagctcagtgtttccatcactttcaacttcctgggaacagagaacatgaagagtggcgaccacacggcagccttttcttacttccagaaagctgcagcccgcggctacagcaaagcgcagtacaatgcgggcttgtgtcatgagcatggcagaggcacccccagggacattagcaaggcggtcctttattatcagttggctgccagccagggccacagcctggctcagtaccgctatgccaggtgcctactacgagacccagcctcttcgtggaaccctgagcggcagagggcagtgtccttgctgaagcaggctgcagactcaggcttgagagaggcccaagctttcctcggggtgcttttcaccaaggagccctacctggatgagcagagagctgtgaaatatctttggcttgcagccaacaatggggactcacagagcaggtaccaccttggaatttgctatgagaaaggccttggtgtgcagaggaatctgggagaggccttgagatgttaccagcagtcagccgctctgggaaatgaggccgcccaggagaggctgcgagccctcttttccatgggggctgcagccccggggcccagcgacctgacagttacaggactgaagtctttctccagcccctccctctgcagcttgaacaccctgctagcaggaacctcacgcctaccacatgcctcgagcacaggcaaccttggcctcctctgcagaagtgggcatctcggagccagcctggaagcctccagcagggctattcccccacacccctacccactggaaaggagtgttgtaagactaggttttggctaaggtgagataaaacatagtccctggtgcctcttaggggccagagcgggcaggaggttggataacaaaaatagagcatcagcaaccctttccaggtagaaattccagcgggagttcaggttcccaagcaatttcacgtacatggctggtaagtgactgatctttccccccgcttggtagcctcacagatgagtcttggatgcattcacagtcatttctggtctgtgcaccaaaggatgcattcagtgacctatgaaaaaccctactgaagggtccagagaccctggtgctcaccttagcctttgtctttgagcaaataacttaccttcttccttcttatgcctgggttttctcacacttaaatctgtactactgtttgccaatgtctgatgtgtgtatccctggttcacaagaagattttagatggtattcaaattaatattttctatttagttatatatttaatgtataatataaaaatatgattagcatattgacctgtagtttgatagatgttctgtctaggataaagctaactgtaaaaaaaaatagtgaatcagtttaaagaaaaacataacgtaaaagtgggcacagatccagagaggtagcaaaaatcacaggggtggttccatgaatggctgacacttaggaaactctgaattaggccatcctcgagactagcccaccattcacctctgttcatcccccgtgggctcataatcgttttcatttcacctttgatttggaaggaagaagtttcttgcccaaatgcctggatgtgtctgcttgactttcagaacttctcacctcagccctaaagagggagcctgtgggttctcagagagatatcacaatttgagtcccaaagaagaggccagatacccacccaccttcccccaaatcttaagcacctgcgccagtacagtcaagaagaggaaagtgtgtgaagacccaggtctggctctgccacttgcctggccatgtcaccttgaagctgtgacctgactccctatattgtttcctcagttgtagaccaaaggcaatggtgtctgccctcctaccttagaagacaaatgcaagggcatttcaccacagagaggacctttgtgctcactttggcccaggaggcagtgatgctcatggttgcatgactttatgagtcgctgggccagggtgaggacctgggcctcctgactcctggcccagagttcttgtccatcagttcatactgcaattttatgtgaaagcattatgactgtcctacccatgggagagtaaatgtagattgaatgctaggagtcttaaagctggagagtatagattttgaggtccccatttgggaaacatgtgccagaaatgtctaggtgtttaataaaacagatattggattatctcaaaaaaaaaaaaaaaaaa

SEQ ID NO: 2889 - DNA, 921 bp, Homo sapiens
gacaggtcgcctgactgggctcctccccgggcccgccccgacaggtttgtcttgtgaccgcgggcggccgctgcttctttcccgagcttggaacttcgttatccgcgatgcgtttcctggcagctacattcctgctcctggcgctcagcaccgctgcccaggccgaaccggtgcagttcaaggactgcggttctgtggatggagttataaaggaagtgaatgtgagcccatgccccacccaaccctgccagctgagcaaaggacagtcttacagcgtcaatgtcaccttcaccagcaatattcagtctaaaagcagcaaggccgtggtgcatggcatcctgatgggcgtcccagttccctttcccattcctgagcctgatggttgtaagagtggaattaactgccctatccaaaaagacaagacctatagctacctgaataaactaccagtgaaaagcgaatatccctctataaaactggtggtggagtggcaacttcaggatgacaaaaaccaaagtctcttctgctgggaaatcccagtacagatcgtttctcatctctaagtgcctcattgagttcggtgcatctggccaatgagtctgctgagactcttgacagcacctccagctctgctgcttcaacaacagtgacttgctctccaatggtatccagtgattcgttgaagaggaggtgctctgtagcagaaactgagctccgggtggctggttctcagtggttgtctcatgtctctttttctgtcttaggtggtttcattaaatgcagcacttggttagcagatgtttaattttttttttaacaacattaacttgtggcctctttctacacctggaaatttactcttgaataaataaaaactcgtttgtcttgtcttctgcaaaaaaaaaaaaaaaaaaaaaaaaa

SEQ ID NO: 2890 - DNA, 1298 bp, Homo sapiens
gagccagttccaaaatggcggcaggggtggccgggtggggggttgaggcagaggagttcgaagatgctcctgatgtggagccgctggagcctacacttagcaacatcatcgagcagcgcagcctgaagtggatcttcgtcgggggcaagggtggtgtgggcaagaccacctgcagctgcagcctggcagtccagctctccaaggggcgtgagagtgttctgatcatctccacagacccagcacacaacatctcagatgcttttgaccagaagttctcaaaggtgcctaccaaggtcaaaggctatgacaacctctttgctatggagattgaccccagcctgggcgtggcggagctgcctgacgagttcttcgaggaggacaacatgctgagcatgggcaagaagatgatgcaggaggccatgagcgcatttcccggcatcgatgaggccatgagctatgccgaggtcatgaggctggtgaagggcatgaacttctcggtggtggtatttgacacggcacccacgggccacaccctgaggctgctcaacttccccaccatcgtggagcggggcctgggccggcttatgcagatcaagaaccagatcagccctttcatctcacagatgtgcaacatgctgggcctgggggacatgaacgcagaccagctggcctccaagctggaggagacgctgcccgtcatccgctcagtcagcgaacagttcaaggaccctgagcagacaactttcatctgcgtatgcattgctgagttcctgtccctgtatgagacagagaggctgatccaggagctggccaagtgcaagattgacacacacaatataattgtcaaccagctcgtcttccccgaccccgagaagccctgcaagatgtgtgaggcccgtcacaagatccaggccaagtatctggaccagatggaggacctgtatgaagacttccacatcgtgaagctgccgctgttaccccatgaggtgcggggggcagacaaggtcaacaccttctcggccctcctcctggagccctacaagccccccagtgcccagtagcacagctgccagccccaaccgctgccatttcacactcaccctccaccctccccaccccctcggggcagagtttgcacaaagtcccccccataatacagggggagccacttgggcaggaggcagggaggggtccattccccctggtggggctggtggggagctgtagttgccccctacctctcccacctcttgctcttcaataaaatgatcttaaactgcaaaaaaaaaaaaaaaaaa

SEQ ID NO: 2891 - DNA, 1882 bp, Homo sapiens
gttggctggaggggctgctgctgggaacacctggagtctccgcgggcagatctcatattttggattctggatatattataatgagtgacactttgacagcggatgtcattggtcgaagagttgaagttaatggagaacatgcaacagtacgttttgctggtgttgtccctcccgtggcaggaccctggttaggagtagaatgggacaatcccgagagaggaaagcatgatgggagccacgaagggactgtgtattttaaatgcaggcacccgacaggaggatcctttattcgtccgaacaaggtaaattttggaacagactttcttactgcaattaagaaccgctatgtgttagaagatggaccagaggaagatagaaaagagcaaattgttacaattggaaataaacctgtggagactatcggttttgactctattatgaaacagcaaagtcagctgagcaagttgcaagaagtttctctgaggaactgtgcagtaagttgtgctggtgaaaaaggaggagttgctgaagcatgtcctaatatcagaaaggtagatttgtcaaaaaacctgttgtcatcatgggatgaagtgatacacattgctgatcagctcagacacctggaagtccttaatgtcagtgaaaataaactaaaatttccctccggttcagtattaactggaacgctttctgtactgaaggttttagtcctcaatcaaacaggaataacgtgggctgaggtgctgcggtgtgtcgcggggtgcccaggcctggaggaactctaccttgagtctaacaacattttcatttccgaaaggccaacagatgttctccagacagtcaagttattagatctttcctctaatcaattaattgatgaaaatcagctgtatctgatagcccacctgcccaggttagaacaattaatcctctctgacactggaatttcttctctacattttccggatgctggaattgggtgcaaaacgtccatgttcccatccttgaagtacctggtagtaaacgacaatcagatatcacaatggtcgtttttcaatgagctagagaagttaccaagtctacgggctttgtcctgcctaagaaaccccctgaccaaagaggacaaagaagcagagacggcgcgactactcattatcgccagcattggccagctgaagacgctgaacaaatgtgagattctccccgaggagaggcggagagctgagcttgactaccgaaaagcttttggaaatgagtggaaacaggctggtggacataaggatccggaaaaaaacagactcagcgaagaattcctcacagcccatcccagataccagttcctctgcctgaaatatggtgcacctgaagattgggaactcaaaacacagcaaccacttatgctgaaaaaccagctactaacactgaagataaaataccctcatcaacttgatcagaaagtcctggagaaacaactgccgggctccatgacaattcaaaaggtgaagggattgctgtcacgtcttctcaaagttcctgtgtcagaccttctgttgtcctatgaaagtcccaaaaagccgggcagagaaatcgagctggaaaatgacctaaagtcattacagttttattctgtggaaaatggagattgtctattagtgcgatggtgacaaccaactaataaaatttaaagaccacactgcttatcgtgtctggggttcaccggaaataaatgattcactggaacaattctactgtcaaaacaaagggggtttacaacttgtcctaagtataacaagggatgtatttttagttgggaagtgaccatttctaggcttatacataatagcaataataaaggctttgaacctacagaaaaaaaaaaaaa

SEQ ID NO: 2892 - DNA, 1308 bp, Homo sapiens
gctggcggccggcagggggcggagttcgagcctggatttttttcctcggggcctcccccgggaggccgtcccggcgtgggggaggggaggacggggcgggaggacgcggttcggtcggctgcagcgctacttttggtccggggtcggcagggaggccgcggctaccgcatcacagctgacgtgaggactacgtggggccgctgccggctccgggttgctgggcggcggcgccgctgctgagcggcggtcgggctcgccgtctccacctcctcgcgtccgtaatcagtgacgaggtccgctacgtaaatccctttgcggcggacaaatgaccatggaaacagttgaatcccagcatgatggaagtataacagcttctttgacagagagcaagtctgctcatgtgcagactcagactggccaaaattcaatccctgctttagctcaggtagcagcaattgcagagacagatgaatctgcagaatcagaaggtgtaattgattctcataaacgtagagaaatcctttcacgaagaccctcttataggaaaatactgaatgaactgtcctctgatgtgcctggtgttcccaagattgaagaagagagatcagaggaagaaggaacaccacctagtattgctaccatggcagtaccaactagcatatatcagactagcacggggcaatacagtatgtatgctgcaattcgatatgatacagtgctagctttaagtcttctctagttatattgaagcaactcaggttttggcattaaattgttccattttaaaatgcatcattaatacctaaactgtatcatagaatgaaagtatatgttaaaaagtgagatctttgtattgacagctgtcatataattttgaaaagtaaaaattttgactgccgaatatagaagaaaattttggggtaaaaaggagaatttttcctatttacatgtttatattaatctctagtaaaacattgtttttgttgtctttatgatgcatgcgaacataaatgtctgtatttcattcttgttggcttttgttacccacaattacatactattcttactaatctgagagttttctaaagtatgttttcaatgtttcactactctctactctgttaatttgtgctacagtttttcctaaaagagaatggaaaaatgatttaattttttaaactgtagcaattggatagataattttatttgaaattttacacactgaaagctctaaataaacagatacattcacattcaaaaaaaaaaaaaaaaaaaaaaaaaaaaaaaaaaaaaaaaaaaaaaaaaaaa

SEQ ID NO: 2893 - DNA, 2225 bp, Homo sapiens
gacccgcctgcctcctcgcgaacttgggacgagttggaaaatcctccctgagagagccgtgcggctcaggggagcggtttaactcggaaaaggaaaaggaatccagaagataaataaagaaaacaggaaaggaggaaagcattgattacaaatatcttaacaatgagcaaatgtgcaaggaaaaaatatattaagacaaatccaagacaaatgaccatggaaacagttgaatcccagcatgatggaagtataacagcttctttgacagagagcaagtctgctcatgtgcagactcagactggccaaaattcaatccctgctttagctcaggtagcagcaattgcagagacagatgaatctgcagaatcagaaggtgtaattgattctcataaacgtagagaaatcctttcacgaagaccctcttataggaaaatactgaatgaactgtcctctgatgtgcctggtgttcccaagattgaagaagagagatcagaggaagaaggaacaccacctagtattgctaccatggcagtaccaactagcatatatcagactagcacggggcaatacattgctatagcccaaggtggaacaatccagatttctaacccaggatctgatggtgttcagggactgcaggcattaacaatgacaaattcaggagctcctccaccaggtgctacaattgtacagtacgcagcacaatcagctgatggcacacagcagttctttgtcccaggcagccaggttgttgttcaagctgccactggtgacatgccaacttaccagatccgagctcctactgctgctttgccacagggagtggtgatggctgcatcgcccggaagtttgcacagtccccagcagctggcagaagaagcaacacgcaaacgagagctgaggctaatgaaaaacagggaagctgccaaagaatgtcgacgtcgaaagaaagaatatgtaaaatgtctggagagccgagttgcagtgctggaagtccagaacaagaagcttatagaggaacttgaaaccttgaaagacatttgttctcccaaaacagattactagaaatatttaactatgaactgaaggcagcatgtatagttgcttttgaaggaatacaatatatagctggcaagaatggtggcttcttttctttgtatcattcatcttcttctttaatcacttaacattcctaaaatgcttcactgtacgtagttaagtcgtagctataacttcaaattttttaaaagagacaaactgtaaaaaatgtgtgtattcttaaaatgcaatatttgtaaggcttgttccaatgccacatacttgcagctcccattctatgtgtcatcaatagtgtcctatgcaataaaattatttgcaggtctttaaatcattttaggaaaggatgatcaaaaataatgcatccagcagtacaataaaagtaaaccacaaaaaaatacctcaggaaagaatagaaagaaagtctatctaatgacatgcctatatgagaagaatagcctagatatgaatatatggcatttgcagatttttatattagttgctttgttaaaaaaaaaaagattgtattgctgtccttgaatgccatagtcaaagagagtttttaatagaaccatgttggttgcactttgtagtgtttggtgctcatttaaatatctgaacatttactacagtttttaactctactgtgtaatataaaagatcttgcagaagttcttagtgttggtttaatattacctaatgaaagtgatgacatattttttatatctggaatgagcctgttgggatcgcattgcataccttcggggtacaagtcagtttctacactgggtgctgatccttgcacgcgccctttctaccatctcacggtggggatggccgcagggctgtgcacccagaagaagatggctgttagcgtttcggccttcataatggcctgagactttctttctgtaggtggtctggagctgtccggctggtggccccctattttgccatttagcgaacaaccacaggaattttaaaaacaaaaacatcccaagattttttcatttcaaaatgcttcaaagtccacattagatcagatactccgctgtcggcacattcagctgaggttcattacaatcgagactgcaatgtgatctatgtttcatcttgtttttataataaaaagcttcagggaacaagcccaaagccctcaccacaaaaaa

SEQ ID NO: 2894 - DNA, 1991 bp, Homo sapiens
tggaacactttatgttgaactgtggtagaggaaacaagacagttctgtctgcagaagcccattatggctgtaactggagatgacacagatgaggaaactgaacttgccccaagtcacatggctgctgccactggtgacatgccaacttaccagatccgagctcctactgctgctttgccacagggagtggtgatggctgcatcgcccggaagtttgcacagtccccagcagctggcagaagaagcaacacgcaaacgagagctgaggctaatgaaaaacagggaagctgcccgggagtgtcgcaggaagaagaaagaatatgtcaaatgtcttgaaaatcgtgtggctgtgcttgaaaaccaaaacaagactctcattgaggaactcaaggccctcaaagatctttattgccataaagtagagtaactgtctttgacttggaccttgtttactctaatcaaggcaggagatgcagcagtcctacttattgccatgtggacttgtgggaaggacacgtgtgacccttaagaatccagtttggattagtgtttgaaattgaattgggaatgttgttccaggatgtggaatgcagccgtgatcacacttaccgagcttactttgatctgtttgtcaatagcatgcaaaaaatgctttgtttgccctttgcttctgctttttttcagggaagctgccaaagaatgtcgacgtcgaaagaaagaatatgtaaaatgtctggagagccgagttgcagtgctggaagtccagaacaagaagcttatagaggaacttgaaaccttgaaagacatttgttctcccaaaacagattactagaaatatttaactatgaactgaaggcagcatgtatagttgcttttgaaggaatacaatatatagctggcaagaatggtggcttcttttctttgtatcattcatcttcttctttaatcacttaacattcctaaaatgcttcactgtacgtagttaagtcgtagctataacttcaaattttttaaaagagacaaactgtaaaaaatgtgtgtattcttaaaatgcaatatttgtaaggcttgttccaatgccacatacttgcagctcccattctatgtgtcatcaatagtgtcctatgcaataaaattatttgcaggtctttaaatcattttaggaaaggatgatcaaaaataatgcatccagcagtacaataaaagtaaaccacaaaaaaatacctcaggaaagaatagaaagaaagtctatctaatgacatgcctatatgagaagaatagcctagatatgaatatatggcatttgcagatttttatattagttgctttgttaaaaaaaaaaagattgtattgctgtccttgaatgccatagtcaaagagagtttttaatagaaccatgttggttgcactttgtagtgtttggtgctcatttaaatatctgaacatttactacagtttttaactctactgtgtaatataaaagatcttgcagaagttcttagtgttggtttaatattacctaatgaaagtgatgacatattttttatatctggaatgagcctgttgggatcgcattgcataccttcggggtacaagtcagtttctacactgggtgctgatccttgcacgcgccctttctaccatctcacggtggggatggccgcagggctgtgcacccagaagaagatggctgttagcgtttcggccttcataatggcctgagactttctttctgtaggtggtctggagctgtccggctggtggccccctattttgccatttagcgaacaaccacaggaattttaaaaacaaaaacatcccaagattttttcatttcaaaatgcttcaaagtccacattagatcagatactccgctgtcggcacattcagctgaggttcattacaatcgagactgcaatgtgatctatgtttcatcttgtttttataataaaaagcttcagggaacaagcccaaagccctcaccacaaaaaa

SEQ ID NO: 2895 - DNA, 1553 bp, Homo sapiens
tggaacactttatgttgaactgtggtagaggaaacaagacagttctgtctgcagaagcccattatggctgtaactggagatgacacagctgccactggtgacatgccaacttaccagatccgagctcctactgctgctttgccacagggagtggtgatggctgcatcgcccggaagtttgcacagtccccagcagctggcagaagaagcaacacgcaaacgagagctgaggctaatgaaaaacagggaagctgccaaagaatgtcgacgtcgaaagaaagaatatgtaaaatgtctggagagccgagttgcagtgctggaagtccagaacaagaagcttatagaggaacttgaaaccttgaaagacatttgttctcccaaaacagattactagaaatatttaactatgaactgaaggcagcatgtatagttgcttttgaaggaatacaatatatagctggcaagaatggtggcttcttttctttgtatcattcatcttcttctttaatcacttaacattcctaaaatgcttcactgtacgtagttaagtcgtagctataacttcaaattttttaaaagagacaaactgtaaaaaatgtgtgtattcttaaaatgcaatatttgtaaggcttgttccaatgccacatacttgcagctcccattctatgtgtcatcaatagtgtcctatgcaataaaattatttgcaggtctttaaatcattttaggaaaggatgatcaaaaataatgcatccagcagtacaataaaagtaaaccacaaaaaaatacctcaggaaagaatagaaagaaagtctatctaatgacatgcctatatgagaagaatagcctagatatgaatatatggcatttgcagatttttatattagttgctttgttaaaaaaaaaaagattgtattgctgtccttgaatgccatagtcaaagagagtttttaatagaaccatgttggttgcactttgtagtgtttggtgctcatttaaatatctgaacatttactacagtttttaactctactgtgtaatataaaagatcttgcagaagttcttagtgttggtttaatattacctaatgaaagtgatgacatattttttatatctggaatgagcctgttgggatcgcattgcataccttcggggtacaagtcagtttctacactgggtgctgatccttgcacgcgccctttctaccatctcacggtggggatggccgcagggctgtgcacccagaagaagatggctgttagcgtttcggccttcataatggcctgagactttctttctgtaggtggtctggagctgtccggctggtggccccctattttgccatttagcgaacaaccacaggaattttaaaaacaaaaacatcccaagattttttcatttcaaaatgcttcaaagtccacattagatcagatactccgctgtcggcacattcagctgaggttcattacaatcgagactgcaatgtgatctatgtttcatcttgtttttataataaaaagcttcagggaacaagcccaaagccctcaccacaaaaaa

SEQ ID NO: 2896 - DNA, 1589 bp, Homo sapiens
tggaacactttatgttgaactgtggtagaggaaacaagacagttctgtctgcagaagcccattatggctgtaactggagatgacacagatgaggaaactgaacttgccccaagtcacatggctgctgccactggtgacatgccaacttaccagatccgagctcctactgctgctttgccacagggagtggtgatggctgcatcgcccggaagtttgcacagtccccagcagctggcagaagaagcaacacgcaaacgagagctgaggctaatgaaaaacagggaagctgccaaagaatgtcgacgtcgaaagaaagaatatgtaaaatgtctggagagccgagttgcagtgctggaagtccagaacaagaagcttatagaggaacttgaaaccttgaaagacatttgttctcccaaaacagattactagaaatatttaactatgaactgaaggcagcatgtatagttgcttttgaaggaatacaatatatagctggcaagaatggtggcttcttttctttgtatcattcatcttcttctttaatcacttaacattcctaaaatgcttcactgtacgtagttaagtcgtagctataacttcaaattttttaaaagagacaaactgtaaaaaatgtgtgtattcttaaaatgcaatatttgtaaggcttgttccaatgccacatacttgcagctcccattctatgtgtcatcaatagtgtcctatgcaataaaattatttgcaggtctttaaatcattttaggaaaggatgatcaaaaataatgcatccagcagtacaataaaagtaaaccacaaaaaaatacctcaggaaagaatagaaagaaagtctatctaatgacatgcctatatgagaagaatagcctagatatgaatatatggcatttgcagatttttatattagttgctttgttaaaaaaaaaaagattgtattgctgtccttgaatgccatagtcaaagagagtttttaatagaaccatgttggttgcactttgtagtgtttggtgctcatttaaatatctgaacatttactacagtttttaactctactgtgtaatataaaagatcttgcagaagttcttagtgttggtttaatattacctaatgaaagtgatgacatattttttatatctggaatgagcctgttgggatcgcattgcataccttcggggtacaagtcagtttctacactgggtgctgatccttgcacgcgccctttctaccatctcacggtggggatggccgcagggctgtgcacccagaagaagatggctgttagcgtttcggccttcataatggcctgagactttctttctgtaggtggtctggagctgtccggctggtggccccctattttgccatttagcgaacaaccacaggaattttaaaaacaaaaacatcccaagattttttcatttcaaaatgcttcaaagtccacattagatcagatactccgctgtcggcacattcagctgaggttcattacaatcgagactgcaatgtgatctatgtttcatcttgtttttataataaaaagcttcagggaacaagcccaaagccctcaccacaaaaaa

SEQ ID NO: 2897 - DNA, 1955 bp, Homo sapiens
tggaacactttatgttgaactgtggtagaggaaacaagacagttctgtctgcagaagcccattatggctgtaactggagatgacacagctgccactggtgacatgccaacttaccagatccgagctcctactgctgctttgccacagggagtggtgatggctgcatcgcccggaagtttgcacagtccccagcagctggcagaagaagcaacacgcaaacgagagctgaggctaatgaaaaacagggaagctgcccgggagtgtcgcaggaagaagaaagaatatgtcaaatgtcttgaaaatcgtgtggctgtgcttgaaaaccaaaacaagactctcattgaggaactcaaggccctcaaagatctttattgccataaagtagagtaactgtctttgacttggaccttgtttactctaatcaaggcaggagatgcagcagtcctacttattgccatgtggacttgtgggaaggacacgtgtgacccttaagaatccagtttggattagtgtttgaaattgaattgggaatgttgttccaggatgtggaatgcagccgtgatcacacttaccgagcttactttgatctgtttgtcaatagcatgcaaaaaatgctttgtttgccctttgcttctgctttttttcagggaagctgccaaagaatgtcgacgtcgaaagaaagaatatgtaaaatgtctggagagccgagttgcagtgctggaagtccagaacaagaagcttatagaggaacttgaaaccttgaaagacatttgttctcccaaaacagattactagaaatatttaactatgaactgaaggcagcatgtatagttgcttttgaaggaatacaatatatagctggcaagaatggtggcttcttttctttgtatcattcatcttcttctttaatcacttaacattcctaaaatgcttcactgtacgtagttaagtcgtagctataacttcaaattttttaaaagagacaaactgtaaaaaatgtgtgtattcttaaaatgcaatatttgtaaggcttgttccaatgccacatacttgcagctcccattctatgtgtcatcaatagtgtcctatgcaataaaattatttgcaggtctttaaatcattttaggaaaggatgatcaaaaataatgcatccagcagtacaataaaagtaaaccacaaaaaaatacctcaggaaagaatagaaagaaagtctatctaatgacatgcctatatgagaagaatagcctagatatgaatatatggcatttgcagatttttatattagttgctttgttaaaaaaaaaaagattgtattgctgtccttgaatgccatagtcaaagagagtttttaatagaaccatgttggttgcactttgtagtgtttggtgctcatttaaatatctgaacatttactacagtttttaactctactgtgtaatataaaagatcttgcagaagttcttagtgttggtttaatattacctaatgaaagtgatgacatattttttatatctggaatgagcctgttgggatcgcattgcataccttcggggtacaagtcagtttctacactgggtgctgatccttgcacgcgccctttctaccatctcacggtggggatggccgcagggctgtgcacccagaagaagatggctgttagcgtttcggccttcataatggcctgagactttctttctgtaggtggtctggagctgtccggctggtggccccctattttgccatttagcgaacaaccacaggaattttaaaaacaaaaacatcccaagattttttcatttcaaaatgcttcaaagtccacattagatcagatactccgctgtcggcacattcagctgaggttcattacaatcgagactgcaatgtgatctatgtttcatcttgtttttataataaaaagcttcagggaacaagcccaaagccctcaccacaaaaaa

SEQ ID NO: 2898 - DNA, 2065 bp, Homo sapiens
gtaaaatgctgctgacagatttagagttaactagctcaccactgcctctgcctccaagctgccttttagactgaatagcttttcttgttagccctactttaacatttcttttgaagtggttgtctgcttgaagagggaaacacgtcatgaaactgtaatgcatgaacagaactcaggagttgtctggccagcttagtgctgccactggtgacatgccaacttaccagatccgagctcctactgctgctttgccacagggagtggtgatggctgcatcgcccggaagtttgcacagtccccagcagctggcagaagaagcaacacgcaaacgagagctgaggctaatgaaaaacagggaagctgcccgggagtgtcgcaggaagaagaaagaatatgtcaaatgtcttgaaaatcgtgtggctgtgcttgaaaaccaaaacaagactctcattgaggaactcaaggccctcaaagatctttattgccataaagtagagtaactgtctttgacttggaccttgtttactctaatcaaggcaggagatgcagcagtcctacttattgccatgtggacttgtgggaaggacacgtgtgacccttaagaatccagtttggattagtgtttgaaattgaattgggaatgttgttccaggatgtggaatgcagccgtgatcacacttaccgagcttactttgatctgtttgtcaatagcatgcaaaaaatgctttgtttgccctttgcttctgctttttttcagggaagctgccaaagaatgtcgacgtcgaaagaaagaatatgtaaaatgtctggagagccgagttgcagtgctggaagtccagaacaagaagcttatagaggaacttgaaaccttgaaagacatttgttctcccaaaacagattactagaaatatttaactatgaactgaaggcagcatgtatagttgcttttgaaggaatacaatatatagctggcaagaatggtggcttcttttctttgtatcattcatcttcttctttaatcacttaacattcctaaaatgcttcactgtacgtagttaagtcgtagctataacttcaaattttttaaaagagacaaactgtaaaaaatgtgtgtattcttaaaatgcaatatttgtaaggcttgttccaatgccacatacttgcagctcccattctatgtgtcatcaatagtgtcctatgcaataaaattatttgcaggtctttaaatcattttaggaaaggatgatcaaaaataatgcatccagcagtacaataaaagtaaaccacaaaaaaatacctcaggaaagaatagaaagaaagtctatctaatgacatgcctatatgagaagaatagcctagatatgaatatatggcatttgcagatttttatattagttgctttgttaaaaaaaaaaagattgtattgctgtccttgaatgccatagtcaaagagagtttttaatagaaccatgttggttgcactttgtagtgtttggtgctcatttaaatatctgaacatttactacagtttttaactctactgtgtaatataaaagatcttgcagaagttcttagtgttggtttaatattacctaatgaaagtgatgacatattttttatatctggaatgagcctgttgggatcgcattgcataccttcggggtacaagtcagtttctacactgggtgctgatccttgcacgcgccctttctaccatctcacggtggggatggccgcagggctgtgcacccagaagaagatggctgttagcgtttcggccttcataatggcctgagactttctttctgtaggtggtctggagctgtccggctggtggccccctattttgccatttagcgaacaaccacaggaattttaaaaacaaaaacatcccaagattttttcatttcaaaatgcttcaaagtccacattagatcagatactccgctgtcggcacattcagctgaggttcattacaatcgagactgcaatgtgatctatgtttcatcttgtttttataataaaaagcttcagggaacaagcccaaagccctcaccacaaaaaa

SEQ ID NO: 2899 - DNA, 2108 bp, Homo sapiens
gtaaaatgctgctgacagatttagagttaactagctcaccactgcctctgcctccaagctgccttttagactgaatagcttttcttgttagccctactttaacatttcttttgaagtggttgtctgcttgaagagggaaacacgtcatgaaactgtaatgcatgaacagaactcaggagttgtctggccagcttagtggtaagatcgagcctcctactgaggccgtccctgcatgcgcctgctgccactggtgacatgccaacttaccagatccgagctcctactgctgctttgccacagggagtggtgatggctgcatcgcccggaagtttgcacagtccccagcagctggcagaagaagcaacacgcaaacgagagctgaggctaatgaaaaacagggaagctgcccgggagtgtcgcaggaagaagaaagaatatgtcaaatgtcttgaaaatcgtgtggctgtgcttgaaaaccaaaacaagactctcattgaggaactcaaggccctcaaagatctttattgccataaagtagagtaactgtctttgacttggaccttgtttactctaatcaaggcaggagatgcagcagtcctacttattgccatgtggacttgtgggaaggacacgtgtgacccttaagaatccagtttggattagtgtttgaaattgaattgggaatgttgttccaggatgtggaatgcagccgtgatcacacttaccgagcttactttgatctgtttgtcaatagcatgcaaaaaatgctttgtttgccctttgcttctgctttttttcagggaagctgccaaagaatgtcgacgtcgaaagaaagaatatgtaaaatgtctggagagccgagttgcagtgctggaagtccagaacaagaagcttatagaggaacttgaaaccttgaaagacatttgttctcccaaaacagattactagaaatatttaactatgaactgaaggcagcatgtatagttgcttttgaaggaatacaatatatagctggcaagaatggtggcttcttttctttgtatcattcatcttcttctttaatcacttaacattcctaaaatgcttcactgtacgtagttaagtcgtagctataacttcaaattttttaaaagagacaaactgtaaaaaatgtgtgtattcttaaaatgcaatatttgtaaggcttgttccaatgccacatacttgcagctcccattctatgtgtcatcaatagtgtcctatgcaataaaattatttgcaggtctttaaatcattttaggaaaggatgatcaaaaataatgcatccagcagtacaataaaagtaaaccacaaaaaaatacctcaggaaagaatagaaagaaagtctatctaatgacatgcctatatgagaagaatagcctagatatgaatatatggcatttgcagatttttatattagttgctttgttaaaaaaaaaaagattgtattgctgtccttgaatgccatagtcaaagagagtttttaatagaaccatgttggttgcactttgtagtgtttggtgctcatttaaatatctgaacatttactacagtttttaactctactgtgtaatataaaagatcttgcagaagttcttagtgttggtttaatattacctaatgaaagtgatgacatattttttatatctggaatgagcctgttgggatcgcattgcataccttcggggtacaagtcagtttctacactgggtgctgatccttgcacgcgccctttctaccatctcacggtggggatggccgcagggctgtgcacccagaagaagatggctgttagcgtttcggccttcataatggcctgagactttctttctgtaggtggtctggagctgtccggctggtggccccctattttgccatttagcgaacaaccacaggaattttaaaaacaaaaacatcccaagattttttcatttcaaaatgcttcaaagtccacattagatcagatactccgctgtcggcacattcagctgaggttcattacaatcgagactgcaatgtgatctatgtttcatcttgtttttataataaaaagcttcagggaacaagcccaaagccctcaccacaaaaaa

SEQ ID NO: 2900 - DNA, 2144 bp, Homo sapiens
gtaaaatgctgctgacagatttagagttaactagctcaccactgcctctgcctccaagctgccttttagactgaatagcttttcttgttagccctactttaacatttcttttgaagtggttgtctgcttgaagagggaaacacgtcatgaaactgtaatgcatgaacagaactcaggagttgtctggccagcttagtggtaagatcgagcctcctactgaggccgtccctgcatgcgcctgatgaggaaactgaacttgccccaagtcacatggctgctgccactggtgacatgccaacttaccagatccgagctcctactgctgctttgccacagggagtggtgatggctgcatcgcccggaagtttgcacagtccccagcagctggcagaagaagcaacacgcaaacgagagctgaggctaatgaaaaacagggaagctgcccgggagtgtcgcaggaagaagaaagaatatgtcaaatgtcttgaaaatcgtgtggctgtgcttgaaaaccaaaacaagactctcattgaggaactcaaggccctcaaagatctttattgccataaagtagagtaactgtctttgacttggaccttgtttactctaatcaaggcaggagatgcagcagtcctacttattgccatgtggacttgtgggaaggacacgtgtgacccttaagaatccagtttggattagtgtttgaaattgaattgggaatgttgttccaggatgtggaatgcagccgtgatcacacttaccgagcttactttgatctgtttgtcaatagcatgcaaaaaatgctttgtttgccctttgcttctgctttttttcagggaagctgccaaagaatgtcgacgtcgaaagaaagaatatgtaaaatgtctggagagccgagttgcagtgctggaagtccagaacaagaagcttatagaggaacttgaaaccttgaaagacatttgttctcccaaaacagattactagaaatatttaactatgaactgaaggcagcatgtatagttgcttttgaaggaatacaatatatagctggcaagaatggtggcttcttttctttgtatcattcatcttcttctttaatcacttaacattcctaaaatgcttcactgtacgtagttaagtcgtagctataacttcaaattttttaaaagagacaaactgtaaaaaatgtgtgtattcttaaaatgcaatatttgtaaggcttgttccaatgccacatacttgcagctcccattctatgtgtcatcaatagtgtcctatgcaataaaattatttgcaggtctttaaatcattttaggaaaggatgatcaaaaataatgcatccagcagtacaataaaagtaaaccacaaaaaaatacctcaggaaagaatagaaagaaagtctatctaatgacatgcctatatgagaagaatagcctagatatgaatatatggcatttgcagatttttatattagttgctttgttaaaaaaaaaaagattgtattgctgtccttgaatgccatagtcaaagagagtttttaatagaaccatgttggttgcactttgtagtgtttggtgctcatttaaatatctgaacatttactacagtttttaactctactgtgtaatataaaagatcttgcagaagttcttagtgttggtttaatattacctaatgaaagtgatgacatattttttatatctggaatgagcctgttgggatcgcattgcataccttcggggtacaagtcagtttctacactgggtgctgatccttgcacgcgccctttctaccatctcacggtggggatggccgcagggctgtgcacccagaagaagatggctgttagcgtttcggccttcataatggcctgagactttctttctgtaggtggtctggagctgtccggctggtggccccctattttgccatttagcgaacaaccacaggaattttaaaaacaaaaacatcccaagattttttcatttcaaaatgcttcaaagtccacattagatcagatactccgctgtcggcacattcagctgaggttcattacaatcgagactgcaatgtgatctatgtttcatcttgtttttataataaaaagcttcagggaacaagcccaaagccctcaccacaaaaaa

SEQ ID NO: 2901 - DNA, 1663 bp, Homo sapiens
gtaaaatgctgctgacagatttagagttaactagctcaccactgcctctgcctccaagctgccttttagactgaatagcttttcttgttagccctactttaacatttcttttgaagtggttgtctgcttgaagagggaaacacgtcatgaaactgtaatgcatgaacagaactcaggagttgtctggccagcttagtgctgccactggtgacatgccaacttaccagatccgagctcctactgctgctttgccacagggagtggtgatggctgcatcgcccggaagtttgcacagtccccagcagctggcagaagaagcaacacgcaaacgagagctgaggctaatgaaaaacagggaagctgccaaagaatgtcgacgtcgaaagaaagaatatgtaaaatgtctggagagccgagttgcagtgctggaagtccagaacaagaagcttatagaggaacttgaaaccttgaaagacatttgttctcccaaaacagattactagaaatatttaactatgaactgaaggcagcatgtatagttgcttttgaaggaatacaatatatagctggcaagaatggtggcttcttttctttgtatcattcatcttcttctttaatcacttaacattcctaaaatgcttcactgtacgtagttaagtcgtagctataacttcaaattttttaaaagagacaaactgtaaaaaatgtgtgtattcttaaaatgcaatatttgtaaggcttgttccaatgccacatacttgcagctcccattctatgtgtcatcaatagtgtcctatgcaataaaattatttgcaggtctttaaatcattttaggaaaggatgatcaaaaataatgcatccagcagtacaataaaagtaaaccacaaaaaaatacctcaggaaagaatagaaagaaagtctatctaatgacatgcctatatgagaagaatagcctagatatgaatatatggcatttgcagatttttatattagttgctttgttaaaaaaaaaaagattgtattgctgtccttgaatgccatagtcaaagagagtttttaatagaaccatgttggttgcactttgtagtgtttggtgctcatttaaatatctgaacatttactacagtttttaactctactgtgtaatataaaagatcttgcagaagttcttagtgttggtttaatattacctaatgaaagtgatgacatattttttatatctggaatgagcctgttgggatcgcattgcataccttcggggtacaagtcagtttctacactgggtgctgatccttgcacgcgccctttctaccatctcacggtggggatggccgcagggctgtgcacccagaagaagatggctgttagcgtttcggccttcataatggcctgagactttctttctgtaggtggtctggagctgtccggctggtggccccctattttgccatttagcgaacaaccacaggaattttaaaaacaaaaacatcccaagattttttcatttcaaaatgcttcaaagtccacattagatcagatactccgctgtcggcacattcagctgaggttcattacaatcgagactgcaatgtgatctatgtttcatcttgtttttataataaaaagcttcagggaacaagcccaaagccctcaccacaaaaaa

SEQ ID NO: 2902 - DNA, 1706 bp, Homo sapiens
gtaaaatgctgctgacagatttagagttaactagctcaccactgcctctgcctccaagctgccttttagactgaatagcttttcttgttagccctactttaacatttcttttgaagtggttgtctgcttgaagagggaaacacgtcatgaaactgtaatgcatgaacagaactcaggagttgtctggccagcttagtggtaagatcgagcctcctactgaggccgtccctgcatgcgcctgctgccactggtgacatgccaacttaccagatccgagctcctactgctgctttgccacagggagtggtgatggctgcatcgcccggaagtttgcacagtccccagcagctggcagaagaagcaacacgcaaacgagagctgaggctaatgaaaaacagggaagctgccaaagaatgtcgacgtcgaaagaaagaatatgtaaaatgtctggagagccgagttgcagtgctggaagtccagaacaagaagcttatagaggaacttgaaaccttgaaagacatttgttctcccaaaacagattactagaaatatttaactatgaactgaaggcagcatgtatagttgcttttgaaggaatacaatatatagctggcaagaatggtggcttcttttctttgtatcattcatcttcttctttaatcacttaacattcctaaaatgcttcactgtacgtagttaagtcgtagctataacttcaaattttttaaaagagacaaactgtaaaaaatgtgtgtattcttaaaatgcaatatttgtaaggcttgttccaatgccacatacttgcagctcccattctatgtgtcatcaatagtgtcctatgcaataaaattatttgcaggtctttaaatcattttaggaaaggatgatcaaaaataatgcatccagcagtacaataaaagtaaaccacaaaaaaatacctcaggaaagaatagaaagaaagtctatctaatgacatgcctatatgagaagaatagcctagatatgaatatatggcatttgcagatttttatattagttgctttgttaaaaaaaaaaagattgtattgctgtccttgaatgccatagtcaaagagagtttttaatagaaccatgttggttgcactttgtagtgtttggtgctcatttaaatatctgaacatttactacagtttttaactctactgtgtaatataaaagatcttgcagaagttcttagtgttggtttaatattacctaatgaaagtgatgacatattttttatatctggaatgagcctgttgggatcgcattgcataccttcggggtacaagtcagtttctacactgggtgctgatccttgcacgcgccctttctaccatctcacggtggggatggccgcagggctgtgcacccagaagaagatggctgttagcgtttcggccttcataatggcctgagactttctttctgtaggtggtctggagctgtccggctggtggccccctattttgccatttagcgaacaaccacaggaattttaaaaacaaaaacatcccaagattttttcatttcaaaatgcttcaaagtccacattagatcagatactccgctgtcggcacattcagctgaggttcattacaatcgagactgcaatgtgatctatgtttcatcttgtttttataataaaaagcttcagggaacaagcccaaagccctcaccacaaaaaa

SEQ ID NO: 2903 - DNA, 2005 bp, Homo sapiens
acattcttagccaccgaagtatgggcaccaaaagcgataaggagcatgtgttccttaataaatgtcacatcagaaaatgactgttccaggacagtaaccacctcccgatggtagcagcaattgcagagacagatgaatctgcagaatcagaaggtgtaattgattctcataaacgtagagaaatcctttcacgaagaccctcttataggaaaatactgaatgaactgtcctctgatgtgcctggtgttcccaagattgaagaagagagatcagaggaagaaggaacaccacctagtattgctaccatggcagtaccaactagcatatatcagactagcacggggcaatacattgctatagcccaaggtggaacaatccagatttctaacccaggatctgatggtgttcagggactgcaggcattaacaatgacaaattcaggagctcctccaccaggtgctacaattgtacagtacgcagcacaatcagctgatggcacacagcagttctttgtcccaggcagccaggttgttgttcaagctgccactggtgacatgccaacttaccagatccgagctcctactgctgctttgccacagggagtggtgatggctgcatcgcccggaagtttgcacagtccccagcagctggcagaagaagcaacacgcaaacgagagctgaggctaatgaaaaacagggaagctgccaaagaatgtcgacgtcgaaagaaagaatatgtaaaatgtctggagagccgagttgcagtgctggaagtccagaacaagaagcttatagaggaacttgaaaccttgaaagacatttgttctcccaaaacagattactagaaatatttaactatgaactgaaggcagcatgtatagttgcttttgaaggaatacaatatatagctggcaagaatggtggcttcttttctttgtatcattcatcttcttctttaatcacttaacattcctaaaatgcttcactgtacgtagttaagtcgtagctataacttcaaattttttaaaagagacaaactgtaaaaaatgtgtgtattcttaaaatgcaatatttgtaaggcttgttccaatgccacatacttgcagctcccattctatgtgtcatcaatagtgtcctatgcaataaaattatttgcaggtctttaaatcattttaggaaaggatgatcaaaaataatgcatccagcagtacaataaaagtaaaccacaaaaaaatacctcaggaaagaatagaaagaaagtctatctaatgacatgcctatatgagaagaatagcctagatatgaatatatggcatttgcagatttttatattagttgctttgttaaaaaaaaaaagattgtattgctgtccttgaatgccatagtcaaagagagtttttaatagaaccatgttggttgcactttgtagtgtttggtgctcatttaaatatctgaacatttactacagtttttaactctactgtgtaatataaaagatcttgcagaagttcttagtgttggtttaatattacctaatgaaagtgatgacatattttttatatctggaatgagcctgttgggatcgcattgcataccttcggggtacaagtcagtttctacactgggtgctgatccttgcacgcgccctttctaccatctcacggtggggatggccgcagggctgtgcacccagaagaagatggctgttagcgtttcggccttcataatggcctgagactttctttctgtaggtggtctggagctgtccggctggtggccccctattttgccatttagcgaacaaccacaggaattttaaaaacaaaaacatcccaagattttttcatttcaaaatgcttcaaagtccacattagatcagatactccgctgtcggcacattcagctgaggttcattacaatcgagactgcaatgtgatctatgtttcatcttgtttttataataaaaagcttcagggaacaagcccaaagccctcaccacaaaaaa

SEQ ID NO: 2904 - DNA, 1816 bp, Homo sapiens
acattcttagccaccgaagtatgggcaccaaaagcgataaggagcatgtgttccttaataaatgtcacatcagaaaatgactgttccaggacagtaaccacctcccgatggtagcagcaattgcagagacagatgaatctgcagaatcagaaggtgtaattgattctcataaacgtagagaaatcctttcacgaagaccctcttataggaaaatactgaatgaactgtcctctgatgtgcctggtgttcccaagattgaagaagagagatcagaggaagaaggaacaccacctagtattgctaccatggcagtaccaactagcatatatcagactagcacggggcaatacactgccactggtgacatgccaacttaccagatccgagctcctactgctgctttgccacagggagtggtgatggctgcatcgcccggaagtttgcacagtccccagcagctggcagaagaagcaacacgcaaacgagagctgaggctaatgaaaaacagggaagctgccaaagaatgtcgacgtcgaaagaaagaatatgtaaaatgtctggagagccgagttgcagtgctggaagtccagaacaagaagcttatagaggaacttgaaaccttgaaagacatttgttctcccaaaacagattactagaaatatttaactatgaactgaaggcagcatgtatagttgcttttgaaggaatacaatatatagctggcaagaatggtggcttcttttctttgtatcattcatcttcttctttaatcacttaacattcctaaaatgcttcactgtacgtagttaagtcgtagctataacttcaaattttttaaaagagacaaactgtaaaaaatgtgtgtattcttaaaatgcaatatttgtaaggcttgttccaatgccacatacttgcagctcccattctatgtgtcatcaatagtgtcctatgcaataaaattatttgcaggtctttaaatcattttaggaaaggatgatcaaaaataatgcatccagcagtacaataaaagtaaaccacaaaaaaatacctcaggaaagaatagaaagaaagtctatctaatgacatgcctatatgagaagaatagcctagatatgaatatatggcatttgcagatttttatattagttgctttgttaaaaaaaaaaagattgtattgctgtccttgaatgccatagtcaaagagagtttttaatagaaccatgttggttgcactttgtagtgtttggtgctcatttaaatatctgaacatttactacagtttttaactctactgtgtaatataaaagatcttgcagaagttcttagtgttggtttaatattacctaatgaaagtgatgacatattttttatatctggaatgagcctgttgggatcgcattgcataccttcggggtacaagtcagtttctacactgggtgctgatccttgcacgcgccctttctaccatctcacggtggggatggccgcagggctgtgcacccagaagaagatggctgttagcgtttcggccttcataatggcctgagactttctttctgtaggtggtctggagctgtccggctggtggccccctattttgccatttagcgaacaaccacaggaattttaaaaacaaaaacatcccaagattttttcatttcaaaatgcttcaaagtccacattagatcagatactccgctgtcggcacattcagctgaggttcattacaatcgagactgcaatgtgatctatgtttcatcttgtttttataataaaaagcttcagggaacaagcccaaagccctcaccacaaaaaa

SEQ ID NO: 2905 - DNA, 2160 bp, Homo sapiens
agctacgggtcagagctagtccactaggtgctaatcaaatgctgtgttacaacactgtgaggttttcccagttataagtgtcactattagggttttttttaattgcaaagccaaataaggctgtcaattgcatcatcttaccttatttcttcagattaagtactgtttatagtgggatttttggtggatgtggtggcatcagcataatctatgtttcaggcgtcctatagaagaggattattcttcaggggatgtggaagaaaaggtagcagcaattgcagagacagatgaatctgcagaatcagaaggtgtaattgattctcataaacgtagagaaatcctttcacgaagaccctcttataggaaaatactgaatgaactgtcctctgatgtgcctggtgttcccaagattgaagaagagagatcagaggaagaaggaacaccacctagtattgctaccatggcagtaccaactagcatatatcagactagcacggggcaatacattgctatagcccaaggtggaacaatccagatttctaacccaggatctgatggtgttcagggactgcaggcattaacaatgacaaattcaggagctcctccaccaggtgctacaattgtacagtacgcagcacaatcagctgatggcacacagcagttctttgtcccaggcagccaggttgttgttcaagctgccactggtgacatgccaacttaccagatccgagctcctactgctgctttgccacagggagtggtgatggctgcatcgcccggaagtttgcacagtccccagcagctggcagaagaagcaacacgcaaacgagagctgaggctaatgaaaaacagggaagctgccaaagaatgtcgacgtcgaaagaaagaatatgtaaaatgtctggagagccgagttgcagtgctggaagtccagaacaagaagcttatagaggaacttgaaaccttgaaagacatttgttctcccaaaacagattactagaaatatttaactatgaactgaaggcagcatgtatagttgcttttgaaggaatacaatatatagctggcaagaatggtggcttcttttctttgtatcattcatcttcttctttaatcacttaacattcctaaaatgcttcactgtacgtagttaagtcgtagctataacttcaaattttttaaaagagacaaactgtaaaaaatgtgtgtattcttaaaatgcaatatttgtaaggcttgttccaatgccacatacttgcagctcccattctatgtgtcatcaatagtgtcctatgcaataaaattatttgcaggtctttaaatcattttaggaaaggatgatcaaaaataatgcatccagcagtacaataaaagtaaaccacaaaaaaatacctcaggaaagaatagaaagaaagtctatctaatgacatgcctatatgagaagaatagcctagatatgaatatatggcatttgcagatttttatattagttgctttgttaaaaaaaaaaagattgtattgctgtccttgaatgccatagtcaaagagagtttttaatagaaccatgttggttgcactttgtagtgtttggtgctcatttaaatatctgaacatttactacagtttttaactctactgtgtaatataaaagatcttgcagaagttcttagtgttggtttaatattacctaatgaaagtgatgacatattttttatatctggaatgagcctgttgggatcgcattgcataccttcggggtacaagtcagtttctacactgggtgctgatccttgcacgcgccctttctaccatctcacggtggggatggccgcagggctgtgcacccagaagaagatggctgttagcgtttcggccttcataatggcctgagactttctttctgtaggtggtctggagctgtccggctggtggccccctattttgccatttagcgaacaaccacaggaattttaaaaacaaaaacatcccaagattttttcatttcaaaatgcttcaaagtccacattagatcagatactccgctgtcggcacattcagctgaggttcattacaatcgagactgcaatgtgatctatgtttcatcttgtttttataataaaaagcttcagggaacaagcccaaagccctcaccacaaaaaa

SEQ ID NO: 2906 - DNA, 1971 bp, Homo sapiens
agctacgggtcagagctagtccactaggtgctaatcaaatgctgtgttacaacactgtgaggttttcccagttataagtgtcactattagggttttttttaattgcaaagccaaataaggctgtcaattgcatcatcttaccttatttcttcagattaagtactgtttatagtgggatttttggtggatgtggtggcatcagcataatctatgtttcaggcgtcctatagaagaggattattcttcaggggatgtggaagaaaaggtagcagcaattgcagagacagatgaatctgcagaatcagaaggtgtaattgattctcataaacgtagagaaatcctttcacgaagaccctcttataggaaaatactgaatgaactgtcctctgatgtgcctggtgttcccaagattgaagaagagagatcagaggaagaaggaacaccacctagtattgctaccatggcagtaccaactagcatatatcagactagcacggggcaatacactgccactggtgacatgccaacttaccagatccgagctcctactgctgctttgccacagggagtggtgatggctgcatcgcccggaagtttgcacagtccccagcagctggcagaagaagcaacacgcaaacgagagctgaggctaatgaaaaacagggaagctgccaaagaatgtcgacgtcgaaagaaagaatatgtaaaatgtctggagagccgagttgcagtgctggaagtccagaacaagaagcttatagaggaacttgaaaccttgaaagacatttgttctcccaaaacagattactagaaatatttaactatgaactgaaggcagcatgtatagttgcttttgaaggaatacaatatatagctggcaagaatggtggcttcttttctttgtatcattcatcttcttctttaatcacttaacattcctaaaatgcttcactgtacgtagttaagtcgtagctataacttcaaattttttaaaagagacaaactgtaaaaaatgtgtgtattcttaaaatgcaatatttgtaaggcttgttccaatgccacatacttgcagctcccattctatgtgtcatcaatagtgtcctatgcaataaaattatttgcaggtctttaaatcattttaggaaaggatgatcaaaaataatgcatccagcagtacaataaaagtaaaccacaaaaaaatacctcaggaaagaatagaaagaaagtctatctaatgacatgcctatatgagaagaatagcctagatatgaatatatggcatttgcagatttttatattagttgctttgttaaaaaaaaaaagattgtattgctgtccttgaatgccatagtcaaagagagtttttaatagaaccatgttggttgcactttgtagtgtttggtgctcatttaaatatctgaacatttactacagtttttaactctactgtgtaatataaaagatcttgcagaagttcttagtgttggtttaatattacctaatgaaagtgatgacatattttttatatctggaatgagcctgttgggatcgcattgcataccttcggggtacaagtcagtttctacactgggtgctgatccttgcacgcgccctttctaccatctcacggtggggatggccgcagggctgtgcacccagaagaagatggctgttagcgtttcggccttcataatggcctgagactttctttctgtaggtggtctggagctgtccggctggtggccccctattttgccatttagcgaacaaccacaggaattttaaaaacaaaaacatcccaagattttttcatttcaaaatgcttcaaagtccacattagatcagatactccgctgtcggcacattcagctgaggttcattacaatcgagactgcaatgtgatctatgtttcatcttgtttttataataaaaagcttcagggaacaagcccaaagccctcaccacaaaaaa

SEQ ID NO: 2907 - DNA, 1786 bp, Homo sapiens
gctggcggccggcagggggcggagttcgagcctggatttttttcctcggggcctcccccgggaggccgtcccggcgtgggggaggggaggacggggcgggaggacgcggttcggtcggctgcagcgctacttttggtccggggtcggcagggaggccgcggctaccgcatcacagctgacgtgaggactacgtggggccgctgccggctccgggttgctgggcggcggcgccgctgctgagcggcggtcgggctcgccgtctccacctcctcgcgtccgtaatcagtgacgaggtccgctacgtaaatccctttgcggcggctgccactggtgacatgccaacttaccagatccgagctcctactgctgctttgccacagggagtggtgatggctgcatcgcccggaagtttgcacagtccccagcagctggcagaagaagcaacacgcaaacgagagctgaggctaatgaaaaacagggaagctgccaaagaatgtcgacgtcgaaagaaagaatatgtaaaatgtctggagagccgagttgcagtgctggaagtccagaacaagaagcttatagaggaacttgaaaccttgaaagacatttgttctcccaaaacagattactagaaatatttaactatgaactgaaggcagcatgtatagttgcttttgaaggaatacaatatatagctggcaagaatggtggcttcttttctttgtatcattcatcttcttctttaatcacttaacattcctaaaatgcttcactgtacgtagttaagtcgtagctataacttcaaattttttaaaagagacaaactgtaaaaaatgtgtgtattcttaaaatgcaatatttgtaaggcttgttccaatgccacatacttgcagctcccattctatgtgtcatcaatagtgtcctatgcaataaaattatttgcaggtctttaaatcattttaggaaaggatgatcaaaaataatgcatccagcagtacaataaaagtaaaccacaaaaaaatacctcaggaaagaatagaaagaaagtctatctaatgacatgcctatatgagaagaatagcctagatatgaatatatggcatttgcagatttttatattagttgctttgttaaaaaaaaaaagattgtattgctgtccttgaatgccatagtcaaagagagtttttaatagaaccatgttggttgcactttgtagtgtttggtgctcatttaaatatctgaacatttactacagtttttaactctactgtgtaatataaaagatcttgcagaagttcttagtgttggtttaatattacctaatgaaagtgatgacatattttttatatctggaatgagcctgttgggatcgcattgcataccttcggggtacaagtcagtttctacactgggtgctgatccttgcacgcgccctttctaccatctcacggtggggatggccgcagggctgtgcacccagaagaagatggctgttagcgtttcggccttcataatggcctgagactttctttctgtaggtggtctggagctgtccggctggtggccccctattttgccatttagcgaacaaccacaggaattttaaaaacaaaaacatcccaagattttttcatttcaaaatgcttcaaagtccacattagatcagatactccgctgtcggcacattcagctgaggttcattacaatcgagactgcaatgtgatctatgtttcatcttgtttttataataaaaagcttcagggaacaagcccaaagccctcaccacaaaaaa

SEQ ID NO: 2908 - DNA, 2188 bp, Homo sapiens
gctggcggccggcagggggcggagttcgagcctggatttttttcctcggggcctcccccgggaggccgtcccggcgtgggggaggggaggacggggcgggaggacgcggttcggtcggctgcagcgctacttttggtccggggtcggcagggaggccgcggctaccgcatcacagctgacgtgaggactacgtggggccgctgccggctccgggttgctgggcggcggcgccgctgctgagcggcggtcgggctcgccgtctccacctcctcgcgtccgtaatcagtgacgaggtccgctacgtaaatccctttgcggcggctgccactggtgacatgccaacttaccagatccgagctcctactgctgctttgccacagggagtggtgatggctgcatcgcccggaagtttgcacagtccccagcagctggcagaagaagcaacacgcaaacgagagctgaggctaatgaaaaacagggaagctgcccgggagtgtcgcaggaagaagaaagaatatgtcaaatgtcttgaaaatcgtgtggctgtgcttgaaaaccaaaacaagactctcattgaggaactcaaggccctcaaagatctttattgccataaagtagagtaactgtctttgacttggaccttgtttactctaatcaaggcaggagatgcagcagtcctacttattgccatgtggacttgtgggaaggacacgtgtgacccttaagaatccagtttggattagtgtttgaaattgaattgggaatgttgttccaggatgtggaatgcagccgtgatcacacttaccgagcttactttgatctgtttgtcaatagcatgcaaaaaatgctttgtttgccctttgcttctgctttttttcagggaagctgccaaagaatgtcgacgtcgaaagaaagaatatgtaaaatgtctggagagccgagttgcagtgctggaagtccagaacaagaagcttatagaggaacttgaaaccttgaaagacatttgttctcccaaaacagattactagaaatatttaactatgaactgaaggcagcatgtatagttgcttttgaaggaatacaatatatagctggcaagaatggtggcttcttttctttgtatcattcatcttcttctttaatcacttaacattcctaaaatgcttcactgtacgtagttaagtcgtagctataacttcaaattttttaaaagagacaaactgtaaaaaatgtgtgtattcttaaaatgcaatatttgtaaggcttgttccaatgccacatacttgcagctcccattctatgtgtcatcaatagtgtcctatgcaataaaattatttgcaggtctttaaatcattttaggaaaggatgatcaaaaataatgcatccagcagtacaataaaagtaaaccacaaaaaaatacctcaggaaagaatagaaagaaagtctatctaatgacatgcctatatgagaagaatagcctagatatgaatatatggcatttgcagatttttatattagttgctttgttaaaaaaaaaaagattgtattgctgtccttgaatgccatagtcaaagagagtttttaatagaaccatgttggttgcactttgtagtgtttggtgctcatttaaatatctgaacatttactacagtttttaactctactgtgtaatataaaagatcttgcagaagttcttagtgttggtttaatattacctaatgaaagtgatgacatattttttatatctggaatgagcctgttgggatcgcattgcataccttcggggtacaagtcagtttctacactgggtgctgatccttgcacgcgccctttctaccatctcacggtggggatggccgcagggctgtgcacccagaagaagatggctgttagcgtttcggccttcataatggcctgagactttctttctgtaggtggtctggagctgtccggctggtggccccctattttgccatttagcgaacaaccacaggaattttaaaaacaaaaacatcccaagattttttcatttcaaaatgcttcaaagtccacattagatcagatactccgctgtcggcacattcagctgaggttcattacaatcgagactgcaatgtgatctatgtttcatcttgtttttataataaaaagcttcagggaacaagcccaaagccctcaccacaaaaaa

SEQ ID NO: 2909 - DNA, 2519 bp, Homo sapiens
gataaataaagaaaacaggaaaggaggaaagcattgattacaaatatcttaacaatgagcaaatgtgcaaggaaaaaatatattaagacaaatccaagacaaatgaccatggaaacagttgaatcccagcatgatggaagtataacagcttctttgacagagagcaagtctgctcatgtgcagactcagactggccaaaattcaatccctgctttagctcaggtagcagcaattgcagagacagatgaatctgcagaatcagaaggtgtaattgattctcataaacgtagagaaatcctttcacgaagaccctcttataggaaaatactgaatgaactgtcctctgatgtgcctggtgttcccaagattgaagaagagagatcagaggaagaaggaacaccacctagtattgctaccatggcagtaccaactagcatatatcagactagcacggggcaatacattgctatagcccaaggtggaacaatccagatttctaacccaggatctgatggtgttcagggactgcaggcattaacaatgacaaattcaggagctcctccaccaggtgctacaattgtacagtacgcagcacaatcagctgatggcacacagcagttctttgtcccaggcagccaggttgttgttcaagctgccactggtgacatgccaacttaccagatccgagctcctactgctgctttgccacagggagtggtgatggctgcatcgcccggaagtttgcacagtccccagcagctggcagaagaagcaacacgcaaacgagagctgaggctaatgaaaaacagggaagctgcccgggagtgtcgcaggaagaagaaagaatatgtcaaatgtcttgaaaatcgtgtggctgtgcttgaaaaccaaaacaagactctcattgaggaactcaaggccctcaaagatctttattgccataaagtagagtaactgtctttgacttggaccttgtttactctaatcaaggcaggagatgcagcagtcctacttattgccatgtggacttgtgggaaggacacgtgtgacccttaagaatccagtttggattagtgtttgaaattgaattgggaatgttgttccaggatgtggaatgcagccgtgatcacacttaccgagcttactttgatctgtttgtcaatagcatgcaaaaaatgctttgtttgccctttgcttctgctttttttcagggaagctgccaaagaatgtcgacgtcgaaagaaagaatatgtaaaatgtctggagagccgagttgcagtgctggaagtccagaacaagaagcttatagaggaacttgaaaccttgaaagacatttgttctcccaaaacagattactagaaatatttaactatgaactgaaggcagcatgtatagttgcttttgaaggaatacaatatatagctggcaagaatggtggcttcttttctttgtatcattcatcttcttctttaatcacttaacattcctaaaatgcttcactgtacgtagttaagtcgtagctataacttcaaattttttaaaagagacaaactgtaaaaaatgtgtgtattcttaaaatgcaatatttgtaaggcttgttccaatgccacatacttgcagctcccattctatgtgtcatcaatagtgtcctatgcaataaaattatttgcaggtctttaaatcattttaggaaaggatgatcaaaaataatgcatccagcagtacaataaaagtaaaccacaaaaaaatacctcaggaaagaatagaaagaaagtctatctaatgacatgcctatatgagaagaatagcctagatatgaatatatggcatttgcagatttttatattagttgctttgttaaaaaaaaaaagattgtattgctgtccttgaatgccatagtcaaagagagtttttaatagaaccatgttggttgcactttgtagtgtttggtgctcatttaaatatctgaacatttactacagtttttaactctactgtgtaatataaaagatcttgcagaagttcttagtgttggtttaatattacctaatgaaagtgatgacatattttttatatctggaatgagcctgttgggatcgcattgcataccttcggggtacaagtcagtttctacactgggtgctgatccttgcacgcgccctttctaccatctcacggtggggatggccgcagggctgtgcacccagaagaagatggctgttagcgtttcggccttcataatggcctgagactttctttctgtaggtggtctggagctgtccggctggtggccccctattttgccatttagcgaacaaccacaggaattttaaaaacaaaaacatcccaagattttttcatttcaaaatgcttcaaagtccacattagatcagatactccgctgtcggcacattcagctgaggttcattacaatcgagactgcaatgtgatctatgtttcatcttgtttttataataaaaagcttcagggaacaagcccaaagccctcaccacaaaaaa

SEQ ID NO: 2910 - DNA, 2330 bp, Homo sapiens
gataaataaagaaaacaggaaaggaggaaagcattgattacaaatatcttaacaatgagcaaatgtgcaaggaaaaaatatattaagacaaatccaagacaaatgaccatggaaacagttgaatcccagcatgatggaagtataacagcttctttgacagagagcaagtctgctcatgtgcagactcagactggccaaaattcaatccctgctttagctcaggtagcagcaattgcagagacagatgaatctgcagaatcagaaggtgtaattgattctcataaacgtagagaaatcctttcacgaagaccctcttataggaaaatactgaatgaactgtcctctgatgtgcctggtgttcccaagattgaagaagagagatcagaggaagaaggaacaccacctagtattgctaccatggcagtaccaactagcatatatcagactagcacggggcaatacactgccactggtgacatgccaacttaccagatccgagctcctactgctgctttgccacagggagtggtgatggctgcatcgcccggaagtttgcacagtccccagcagctggcagaagaagcaacacgcaaacgagagctgaggctaatgaaaaacagggaagctgcccgggagtgtcgcaggaagaagaaagaatatgtcaaatgtcttgaaaatcgtgtggctgtgcttgaaaaccaaaacaagactctcattgaggaactcaaggccctcaaagatctttattgccataaagtagagtaactgtctttgacttggaccttgtttactctaatcaaggcaggagatgcagcagtcctacttattgccatgtggacttgtgggaaggacacgtgtgacccttaagaatccagtttggattagtgtttgaaattgaattgggaatgttgttccaggatgtggaatgcagccgtgatcacacttaccgagcttactttgatctgtttgtcaatagcatgcaaaaaatgctttgtttgccctttgcttctgctttttttcagggaagctgccaaagaatgtcgacgtcgaaagaaagaatatgtaaaatgtctggagagccgagttgcagtgctggaagtccagaacaagaagcttatagaggaacttgaaaccttgaaagacatttgttctcccaaaacagattactagaaatatttaactatgaactgaaggcagcatgtatagttgcttttgaaggaatacaatatatagctggcaagaatggtggcttcttttctttgtatcattcatcttcttctttaatcacttaacattcctaaaatgcttcactgtacgtagttaagtcgtagctataacttcaaattttttaaaagagacaaactgtaaaaaatgtgtgtattcttaaaatgcaatatttgtaaggcttgttccaatgccacatacttgcagctcccattctatgtgtcatcaatagtgtcctatgcaataaaattatttgcaggtctttaaatcattttaggaaaggatgatcaaaaataatgcatccagcagtacaataaaagtaaaccacaaaaaaatacctcaggaaagaatagaaagaaagtctatctaatgacatgcctatatgagaagaatagcctagatatgaatatatggcatttgcagatttttatattagttgctttgttaaaaaaaaaaagattgtattgctgtccttgaatgccatagtcaaagagagtttttaatagaaccatgttggttgcactttgtagtgtttggtgctcatttaaatatctgaacatttactacagtttttaactctactgtgtaatataaaagatcttgcagaagttcttagtgttggtttaatattacctaatgaaagtgatgacatattttttatatctggaatgagcctgttgggatcgcattgcataccttcggggtacaagtcagtttctacactgggtgctgatccttgcacgcgccctttctaccatctcacggtggggatggccgcagggctgtgcacccagaagaagatggctgttagcgtttcggccttcataatggcctgagactttctttctgtaggtggtctggagctgtccggctggtggccccctattttgccatttagcgaacaaccacaggaattttaaaaacaaaaacatcccaagattttttcatttcaaaatgcttcaaagtccacattagatcagatactccgctgtcggcacattcagctgaggttcattacaatcgagactgcaatgtgatctatgtttcatcttgtttttataataaaaagcttcagggaacaagcccaaagccctcaccacaaaaaa

SEQ ID NO: 2911 - DNA, 2687 bp, Homo sapiens
gctggcggccggcagggggcggagttcgagcctggatttttttcctcggggcctcccccgggaggccgtcccggcgtgggggaggggaggacggggcgggaggacgcggttcggtcggctgcagcgctacttttggtccggggtcggcagggaggccgcggctaccgcatcacagctgacgtgaggactacgtggggccgctgccggctccgggttgctgggcggcggcgccgctgctgagcggcggtcgggctcgccgtctccacctcctcgcgtccgtaatcagtgacgaggtccgctacgtaaatccctttgcggcgggataaataaagaaaacaggaaaggaggaaagcattgattacaaatatcttaacaatgagcaaatgtgcaaggaaaaaatatattaagacaaatccaagacaaatgaccatggaaacagttgaatcccagcatgatggaagtataacagcttctttgacagagagcaagtctgctcatgtgcagactcagactggccaaaattcaatccctgctttagctcaggtagcagcaattgcagagacagatgaatctgcagaatcagaaggtgtaattgattctcataaacgtagagaaatcctttcacgaagaccctcttataggaaaatactgaatgaactgtcctctgatgtgcctggtgttcccaagattgaagaagagagatcagaggaagaaggaacaccacctagtattgctaccatggcagtaccaactagcatatatcagactagcacggggcaatacaatgaggaaactgaacttgccccaagtcacatggctgctgccactggtgacatgccaacttaccagatccgagctcctactgctgctttgccacagggagtggtgatggctgcatcgcccggaagtttgcacagtccccagcagctggcagaagaagcaacacgcaaacgagagctgaggctaatgaaaaacagggaagctgcccgggagtgtcgcaggaagaagaaagaatatgtcaaatgtcttgaaaatcgtgtggctgtgcttgaaaaccaaaacaagactctcattgaggaactcaaggccctcaaagatctttattgccataaagtagagtaactgtctttgacttggaccttgtttactctaatcaaggcaggagatgcagcagtcctacttattgccatgtggacttgtgggaaggacacgtgtgacccttaagaatccagtttggattagtgtttgaaattgaattgggaatgttgttccaggatgtggaatgcagccgtgatcacacttaccgagcttactttgatctgtttgtcaatagcatgcaaaaaatgctttgtttgccctttgcttctgctttttttcagggaagctgccaaagaatgtcgacgtcgaaagaaagaatatgtaaaatgtctggagagccgagttgcagtgctggaagtccagaacaagaagcttatagaggaacttgaaaccttgaaagacatttgttctcccaaaacagattactagaaatatttaactatgaactgaaggcagcatgtatagttgcttttgaaggaatacaatatatagctggcaagaatggtggcttcttttctttgtatcattcatcttcttctttaatcacttaacattcctaaaatgcttcactgtacgtagttaagtcgtagctataacttcaaattttttaaaagagacaaactgtaaaaaatgtgtgtattcttaaaatgcaatatttgtaaggcttgttccaatgccacatacttgcagctcccattctatgtgtcatcaatagtgtcctatgcaataaaattatttgcaggtctttaaatcattttaggaaaggatgatcaaaaataatgcatccagcagtacaataaaagtaaaccacaaaaaaatacctcaggaaagaatagaaagaaagtctatctaatgacatgcctatatgagaagaatagcctagatatgaatatatggcatttgcagatttttatattagttgctttgttaaaaaaaaaaagattgtattgctgtccttgaatgccatagtcaaagagagtttttaatagaaccatgttggttgcactttgtagtgtttggtgctcatttaaatatctgaacatttactacagtttttaactctactgtgtaatataaaagatcttgcagaagttcttagtgttggtttaatattacctaatgaaagtgatgacatattttttatatctggaatgagcctgttgggatcgcattgcataccttcggggtacaagtcagtttctacactgggtgctgatccttgcacgcgccctttctaccatctcacggtggggatggccgcagggctgtgcacccagaagaagatggctgttagcgtttcggccttcataatggcctgagactttctttctgtaggtggtctggagctgtccggctggtggccccctattttgccatttagcgaacaaccacaggaattttaaaaacaaaaacatcccaagattttttcatttcaaaatgcttcaaagtccacattagatcagatactccgctgtcggcacattcagctgaggttcattacaatcgagactgcaatgtgatctatgtttcatcttgtttttataataaaaagcttcagggaacaagcccaaagccctcaccacaaaaaa

SEQ ID NO: 2912 - DNA, 1938 bp, Homo sapiens
gacccgcctgcctcctcgcgaacttgggacgagttggaaaatcctccctgagagagccgtgcggctcaggggagcggtttaactcggaaaaggaaaaggaatccagaaacaaatgaccatggaaacagttgaatcccagcatgatggaagtataacagcttctttgacagagagcaagtctgctcatgtgcagactcagactggccaaaattcaatccctgctttagctcaggtagcagcaattgcagagacagatgaatctgcagaatcagaaggtgtaattgattctcataaacgtagagaaatcctttcacgaagaccctcttataggaaaatactgaatgaactgtcctctgatgtgcctggtgttcccaagattgaagaagagagatcagaggaagaaggaacaccacctagtattgctaccatggcagtaccaactagcatatatcagactagcacggggcaatacactgccactggtgacatgccaacttaccagatccgagctcctactgctgctttgccacagggagtggtgatggctgcatcgcccggaagtttgcacagtccccagcagctggcagaagaagcaacacgcaaacgagagctgaggctaatgaaaaacagggaagctgccaaagaatgtcgacgtcgaaagaaagaatatgtaaaatgtctggagagccgagttgcagtgctggaagtccagaacaagaagcttatagaggaacttgaaaccttgaaagacatttgttctcccaaaacagattactagaaatatttaactatgaactgaaggcagcatgtatagttgcttttgaaggaatacaatatatagctggcaagaatggtggcttcttttctttgtatcattcatcttcttctttaatcacttaacattcctaaaatgcttcactgtacgtagttaagtcgtagctataacttcaaattttttaaaagagacaaactgtaaaaaatgtgtgtattcttaaaatgcaatatttgtaaggcttgttccaatgccacatacttgcagctcccattctatgtgtcatcaatagtgtcctatgcaataaaattatttgcaggtctttaaatcattttaggaaaggatgatcaaaaataatgcatccagcagtacaataaaagtaaaccacaaaaaaatacctcaggaaagaatagaaagaaagtctatctaatgacatgcctatatgagaagaatagcctagatatgaatatatggcatttgcagatttttatattagttgctttgttaaaaaaaaaaagattgtattgctgtccttgaatgccatagtcaaagagagtttttaatagaaccatgttggttgcactttgtagtgtttggtgctcatttaaatatctgaacatttactacagtttttaactctactgtgtaatataaaagatcttgcagaagttcttagtgttggtttaatattacctaatgaaagtgatgacatattttttatatctggaatgagcctgttgggatcgcattgcataccttcggggtacaagtcagtttctacactgggtgctgatccttgcacgcgccctttctaccatctcacggtggggatggccgcagggctgtgcacccagaagaagatggctgttagcgtttcggccttcataatggcctgagactttctttctgtaggtggtctggagctgtccggctggtggccccctattttgccatttagcgaacaaccacaggaattttaaaaacaaaaacatcccaagattttttcatttcaaaatgcttcaaagtccacattagatcagatactccgctgtcggcacattcagctgaggttcattacaatcgagactgcaatgtgatctatgtttcatcttgtttttataataaaaagcttcagggaacaagcccaaagccctcaccacaaaaaa

SEQ ID NO: 2913 - DNA, 4575 bp, Homo sapiens
cagggaggggaagacggggagccggacgcacgaccggcgagcacagaagggcacaggagctgctccgcgagataccagcgagctgaggcgcggggctggctgggaagtagtcccggccgggccctggccccgcccctgcagggcggagggacgcatcacgcaggggtggggaagccggatccgtgcgcagggttgctaagggtgaaacttttcattgactttgctcacttcgggccggggcgcgggaaggtgcgggttgttggctgaggcaagccgtggctcgggcgacgcggggccaggagggcaggaccgtctgccggcgacagcccataccgtctgccgttgcgcgacacgaaccaccctccgatccgccatccccgcgtcgtcgccgctagtccgcccgcccgccctcgggccccccgctgccgagcccgacctcctaagagctgaaagaaattattgagagtcatagtccatagccccctgcttcgtcccccaaccctcaacgacgaaaaggacttcggtcccctggcccggcgacgcccgggaaggaaaggagagcgacctccgccccgcgctcaggccaccctggagggagaagccgccccgcggccggtagagcgccccgccgccgcggagacccgaagccgcctggagcccaaggctgtacacgtgccctgtgctgattctctgcctaggaaaggaccatgcagctagagatcaaagtggccctgaacttcatcatctcctacttgtacaacaagctgccccggcgccgggcagacctgtttggggaggagctagagcggcttttgaaaaagaaatatgaaggccactggtaccctgagaagccactgaaaggctctggcttccgctgtgttcacattggggagatggtggaccccgtggtggagctggccgccaagcggagtggcctggcggtggaagatgtgcgggccaatgtgcctgaggagctgagtgtctggattgatccctttgaggtgtcctaccagattggtgagaagggagctgtgaaagtgctgtacctggatgacagtgagggttgcggtgccccagagctggacaaggagatcaagagcagcttcaaccctgacgcccaggtgttcgtgcccattggcagccaggacagctccctgtccaactccccatcgccatcctttggccagtcacccagccctaccttcattccccgctccgctcagcccatcaccttcaccaccgcctccttcgctgccaccaaatttggctccactaagatgaagaaggggggcggggcagcaagtggtgggggtgtagccagcagtggggcgggtggccagcagccaccacagcagcctcgcatggcccgctcacccaccaacagcctgctgaagcacaagagcctctctctgtctatgcattcactgaacttcatcacggccaacccggcccctcagtcccagctctcacccaatgccaaggagttcgtgtacaacggtggtggctcacccagcctcttctttgatgcggccgatggccagggcagcggcaccccaggcccgtttggaggcagtggggctggcacctgcaacagcagcagctttgacatggcccaggtatttggaggtggtgccaacagcctcttcctggagaagacaccctttgtggaaggcctcagctacaacctgaacaccatgcagtatcccagccagcagttccagcccgtggtgctggccaactgaccatctacctgcccgtggggccaggagcacccaagaccacagaaaagagaaaggaaaggccaaaaaaaagaggaaaagaaaaatgtacaaaaagattttcgatcttctcactcttacttctagaaaaaagatccagcccaggcacggaatgggagggccctgcaaagcacccaagtgtgtttcactcaccccttaccgctcgcccaccggcctgtgatttatttggttggtttgggttttatatttctttttcttttttttttttcttacatgtagttttctatataacatctttaatgagtggcttcctgtgctaagaatggtccagatgtgaactgctgctccctgctcctcccttcctccttcacactcctagtttaggattgatgtgtccaagctcatagggaagaaagagctgcagctggagcctgaccctccctggaacagggagaggctggcccgtgtcactgcctctgtcacccagctatcctcgcactcaaagccatccaacctcagcaggccttctcgggccctgccacctgaataggtctgaccccagtccccactccctttcaggctgggccacagggagttgctggctggccacttgacaccctccccctggagctgatgtctgtgactacagggagattagcacttcgtctagtgaaactcctttcatctctgtcctatggccccaccccaccattccctctaggcccagaccatcatcatggccctggccattgatgtgtatgggctttctttccctcatgcagccccttcttccccaggctggatgttgtgggtagggaggggtgtgtgtgtgtgtatttggtttgctgtccttttttaaaggattccaagccatgtgaaacttcccttctggatgtgattctgggtcgcaagtccttatttatatgtgaggctggggaatgggctgggggtattggcagtccttttgcagggcagtgtgtgtggtggggtgacaccgctgtggcttagcccaagacactcccagaggaaaacactgcagaaggaactggtttgcagactgtggaaggatctgcagttttgtttttgaccaaaaaaataataataagttagctctgaagggcagagggaatacccaagcccctgatgcctatgagaagtccctggacttcaaccctcctgttgtttggccttagcccagagggagctgctcacctgagcacccttgggggtgggcagagaggcagggtgggattttagagttagtgtctgtgcgggggcagccctgagcctggagttgagactttggggtctcttagtttggaggtgttgagtgcatttgtgcccctgcctggttgagagcttcttggtacctcttgccaccccttctcactgccctgacccaaccccactggaccttgatgctgcgaggagtggtgtcctgacggactcagcactcccgcctgatgtattggatcataggagagcacttgctctcctgcctctgccaggagagggcttgttcctccaactctaggaggccaggcaagcatggacaggagccaagggagcagggtcattaactttttcttctttgcaaagtgggcacttggcatcagggtcccaatcaccagaaagcaccaaagcccctggcaccccacccactccatcctacccagggaccccaagtaggcaactgttatggcagtgggtccagcccaggccagcactgccagcctcctctccctgcagtaggcaccagctctacctcccccggcaggcaatgtcctggcttctcagcccagcaccatctgttcccctagacttctcaggggccagcccagtctgggccaccctttgtttccctcatcctcggctcccacacaggtgacagacccagcagatagcttctctctgggaaaggttggatgctgccttacatccccttctagccctcctcccatccacacacacaggcacccacccacaccaggtcggcttgtttctcacatgtagggagagaggggagaccaacccctttgtgtcttttgaaatacgaagaaaaatgtgtgttcaggagcatgactccagtgctgcgctcttgggcccagttcagtctgtcttgtctcaaatctaggcatttttgcttcaattttattttttttaagaatacaaaaacagaaatctgcactaatttacctggtttcgtaggaaaacttttttttattttttacattttttggtgtccgtttgtattgaataatttgctacatttgtaaaatgtaagaggtatataatatatgtatatttctaacgtaaaaaacataatttttttcttttcaagattttttcttaaaaagatgagagaaacatattttttcaggaaaaacaaactttaaaaaaaaaagaggagaaataaaaccttttctcccctttccccatcctctatctatccctctttcccaggaacaaatcaaaaggtggattatcttctgaagaatggaaactgttagtccagaatgatgtgtttttctcaatgcagtgagttatagattctctagttttctccctagggatgggaagggggcattgaggcaagcctggagaggagcccggggagcagggtcatgaacttttttctttagtgaaggaggaatacaatcaagggttttgtattcagaatgttgtgcaatattttggaatgggacattggtgtgtttagagattttagtttaaaaacaaaacaaaaagattgatcaaatctgtacagtttctattgttccagatttttttaagtttgtattaaaagcatgatacataatagccttcaaaaaaaaaa

SEQ ID NO: 2914 - DNA, 2113 bp, Homo sapiens
gcggccccagtcagacgcaggcagccccaaagcctgaacaggcagggccagacccagcttcttcgcctccgccagcggggaccccgagctagagccgcagcgggacctgcccggcccccggctccagcgagcgagcggcgagcaggcggctcacagaggcctggccgcccacggaacccggggcccggcggccgccgccgcgatgtttccccgcgagaagacgtggaacatctcgttcgcgggctgcggcttcctcggcgtctactacgtcggcgtggcctcctgcctccgcgagcacgcgcccttcctggtggccaacgccacgcacatctacggcgcctcggccggggcgctcacggccacggcgctggtcaccggggtctgcctgggtgaggctggtgccaagttcattgaggtatctaaagaggcccggaagcggttcctgggccccctgcacccctccttcaacctggtaaagatcatccgcagtttcctgctgaaggtcctgcctgctgatagccatgagcatgccagtgggcgcctgggcatctccctgacccgcgtgtcagacggcgagaatgtcattatatcccacttcaactccaaggacgagctcatccaggccaatgtctgcagcggtttcatccccgtgtactgtgggctcatccctccctccctccagggggtgcgctacgtggatggtggcatttcagacaacctgccactctatgagcttaagaacaccatcacagtgtcccccttctcgggcgagagtgacatctgtccgcaggacagctccaccaacatccacgagctgcgggtcaccaacaccagcatccagttcaacctgcgcaacctctaccgcctctccaaggccctcttcccgccggagcccctggtgctgcgagagatgtgcaagcagggataccgggatggcctgcgctttctgcagcggaacggcctcctgaaccggcccaaccccttgctggcgttgccccccgcccgcccccacggcccagaggacaaggaccaggcagtggagagcgcccaagcggaggattactcgcagctgccgggagaagatcacatcctggagcacctgcccgcccggctcaatgaggccctgctggaggcctgcgtggagcccacggacctgctgaccaccctctccaacatgctgcctgtgcgtctggccacggccatgatggtgccctacacgctgccgctggagagcgctctgtccttcaccatccgcttgctggagtggctgcccgacgttcccgaggacatccggtggatgaaggagcagacgggcagcatctgccagtacctggtgatgcgcgccaagaggaagctgggcaggcacctgccctccaggctgccggagcaggtggagctgcgccgcgtccagtcgctgccgtccgtgccgctgtcctgcgccgcctacagagaggcactgcccggctggatgcgcaacaacctctcgctgggggacgcgctggccaagtgggaggagtgccagcgccagctgctgctcggcctcttctgcaccaacgtggccttcccgcccgaagctctgcgcatgcgcgcacccgccgacccggctcccgcccccgcggacccagcatccccgcagcaccagctggccgggcctgcccccttgctgagcacccctgctcccgaggcccggcccgtgatcggggccctggggctgtgagaccccgaccctctcgaggaaccctgcctgagacgcctccattaccactgcgcagtgagatgaggggactcacagttgccaagaggggtctttgccgtgggccccctcgccagccactcaccagctgcatgcactgagaggggaggtttccacacccctcccctgggccgctgaggccccgcgcacctgtgccttaatcttccctcccctgtgctgcccgagcacctcccccgcccctttactcctgagaactttgcagctgcccttccctccccgtttttcatggcctgctgaaatatgtgtgtgaagaattatttattttcgccaaagcacatgtaataaatgctgcagcccaaaaaaaaaaaaaaaaaaaaaaaaaaaaaaaaaaaaaaaaaa

SEQ ID NO: 2915 - DNA, 1081 bp, Homo sapiens
agtttgtagcggacaacatggcggccttcatgctgggctcgctgctgcggacgttcaagcagatggttccttcatcagcttcaggccaagttcgaagtcactatgtagactggagaatgtggcgcgatgtgaagagacgaaaaatggcctatgaatacgcagatgagaggctacgtattaattcactcaggaagaataccattttgccaaaaattcttcaggatgtggctgatgaagaaattgctgccctcccccgggatagctgtcctgttagaatcagaaatcggtgtgttatgacgtcccgtccgcgtggtgtgaagcggcgctggaggcttagtcgtatagtcttccgtcacttagctgaccatgggcaactttctgggatccagcgagcgacatggtaaatgagctccagaacctattgagcttgcagggaagccaagcttgcagttccagcaagcaaagattttttttaatagaccaaaccctaatctctacaggggcccagtacagttgtttggcctacctgatgctatctctaaactacttttaaaatgaagacatttgggtgtttcatgtcagtgaattatcttttctcttggacttaacaaacatactgttcccatacatagtacaaagagtagcataataaatattttctgtgaatgttttttataccctccttttaagtttaatcttttagtaacatataggggtttttgtattaagagcattatttcataaaatgctatcttatacataatccaactaattgacatgtagctcatgtatggcagtttgtaatcctggactagctttgctgacctgcagagctccccttaactattattgttagataaacagattggatagcaaggctgctgttctggattatctaatgctccacttcttcttgtgatggctgaacaaaagaaccactaagtgttttcttgtccatccttaagggactttaaaacaaattatgcctctttaagtccttgaaagtctccatctaaagaggaaaagtttgttggaacagtatatattccctatttttatgtttatttaatccataacagaa

SEQ ID NO: 2916 - DNA, 4968 bp, Homo sapiens
gcggccgccgtggccctcacagtcggcgtttcgccgcctgcccgcggtgcccgcgcacgccggccgccatcgccttcgcgcctggctggcgggggcgctgtcctcccaggccgtccgcgccgctccctggagctcggcggagcgcggcagccagggccggcggaggcgcgaggagccgggcgccaccgccgccgccgccgccgccgccgcgggggccatgaccgtggagcagaacgtgctgcagcagagcgcggcgcagaagcaccagcagacgtttttgaatcaactgagagaaattacggggattaatgacacccagatactacagcaagccttgaaggatagtaatggaaacttggaattagcagtggctttccttactgcgaagaatgctaagacccctcagcaggaggagacaacttactaccaaacagcacttcctggcaatgatagatacatcagtgtgggaagccaagcagatacaaatgtgattgatctcactggagatgataaagatgatcttcagagagcaattgccttgagtttggccgaatcaaacagggcattcagggagactggaataactgatgaggaacaagccattagcagagttcttgaagccagcatagcagagaataaagcatgtttgaagaggacacctacagaagtttggagggattctcgaaacccttatgatagaaaaagacaggacaaagctcccgttgggctaaagaatgttggcaatacttgttggtttagtgctgttattcagtcattatttaatcttttggaatttagaagattagttctgaattacaagcctccatcaaatgctcaagatttaccccgaaaccaaaaggaacatcggaatttgccttttatgcgtgagctgaggtatctatttgcacttcttgttggtaccaaaaggaagtatgttgatccatcaagagcagttgaaattcttaaggatgctttcaaatcaaatgactcacagcagcaagatgtgagtgagtttacacacaaattattagattggttagaagatgccttccaaatgaaagctgaagaggagacggatgaagagaagccaaagaaccccatggtagagttgttctatggcagattcctggctgtgggagtacttgaaggtaaaaaatttgaaaacactgaaatgtttggtcagtacccacttcaggtcaatgggttcaaagatctgcatgagtgcctagaagctgcaatgattgaaggagaaattgagtctttacattcagagaattcaggaaaatcaggccaagagcattggtttactgaattaccacctgtgttaacatttgaattgtcaagatttgaatttaatcaggcattgggaagaccagaaaaaattcacaacaaattagaatttccccaagttttatatttggacagatacatgcacagaaacagagaaataacaagaattaagagggaagagatcaagagactgaaagattacctcacggtattacaacaaaggctagaaagatatttaagctatggttccggtcccaaacgattccccttggtagatgttcttcagtatgcattggaatttgcctcaagtaaacctgtttgcacttctcctgttgacgatattgacgctagttccccacctagtggttccataccatcacagacattaccaagcacaacagaacaacagggagccctatcttcagaactgccaagcacatcaccttcatcagttgctgccatttcatcgagatcagtaatacacaaaccatttactcagtcccggatacctccagatttgcccatgcatccggcaccaaggcacataacggaggaagaactttctgtgctggaaagttgtttacatcgctggaggacagaaatagaaaatgacaccagagatttgcaggaaagcatatccagaatccatcgaacaattgaattaatgtactctgacaaatctatgatacaagttccttatcgattacatgccgttttagttcacgaaggccaagctaatgctgggcactactgggcatatatttttgatcatcgtgaaagcagatggatgaagtacaatgatattgctgtgacaaaatcatcatgggaagagctagtgagggactcttttggtggttatagaaatgccagtgcatactgtttaatgtacataaatgataaggcacagttcctaatacaagaggagtttaataaagaaactgggcagccccttgttggtatagaaacattaccaccggatttgagagattttgttgaggaagacaaccaacgatttgaaaaagaactagaagaatgggatgcacaacttgcccagaaagctttgcaggaaaagcttttagcgtctcagaaattgagagagtcagagacttctgtgacaacagcacaagcagcaggagacccagaatatctagagcagccatcaagaagtgatttctcaaagcacttgaaagaagaaactattcaaataattaccaaggcatcacatgagcatgaagataaaagtcctgaaacagttttgcagtcggcaattaagttggaatatgcaaggttggttaagttggcccaagaagacaccccaccagaaaccgattatcgtttacatcatgtagtggtctactttatccagaaccaggcaccaaagaaaattattgagaaaacattactagaacaatttggagatagaaatttgagttttgatgaaaggtgtcacaacataatgaaagttgctcaagccaaactggaaatgataaaacctgaagaagtaaacttggaggaatatgaggagtggcatcaggattataggaaattcagggaaacaactatgtatctcataattgggctagaaaattttcaaagagaaagttatatagattccttgctgttcctcatctgtgcttatcagaataacaaagaactcttgtctaaaggcttatacagaggacatgatgaagaattgatatcacattatagaagagaatgtttgctaaaattaaatgagcaagccgcagaactcttcgaatctggagaggatcgagaagtaaacaatggtttgattatcatgaatgagtttattgtcccatttttgccattattactggtggatgaaatggaagaaaaggatatactagctgtagaagatatgagaaatcgatggtgttcctaccttggtcaagaaatggaaccacacctccaagaaaagctgacagattttttgccaaaactgcttgattgttctatggagattaaaagtttccatgagccaccgaagttaccttcatattccacgcatgaactctgtgagcgatttgcccgaatcatgttgtccctcagtcgaactcctgctgatggaagataaactgcacactttccctgaacacactgtataaactctttttagttcttaacccttgccttcctgtcacagggtttgcttgttgctgctatagtttttaacttttttttattttaataactgcaaaagacaaaatgactatacagactttagtcagactgcagacaataaagctgaaaatcgcatggcgctcagacattttaaccggaactgatgtataatcacaaatctaattgattttattatggcaaaactatgcttttgccaccttcctgttgcagtattactttgcttttatcttttctttctcaacagctttccattcagtctggatccttccatgactacagccatttaagtgttcagcactgtgtacgatacataatatttggtagcttgtaaatgaaataaagaataaagttttatttatggctacctatgtgtttgtaagcaggtatattgtatattagtgtattagtaatactagataaatgaattttgtctggggattaagattggatagttaatagattaatacaatcttttaattctgctctaatgctagcaaattggaaaatgtttaagtctttgacacttaaatttatctatatttttaacaaagttcttgaacttagtatggcaccggaacctgttttgaattcagtcaggtttttactcaagtaagtggttgattttttttaagtcaaactacactgaaacttttatccttttcttagattaatcttactttttaaatgtatttacaatatacagcaaggtgattatttcaagagaatcccaaagtacttgaataagggctattgtaaaatttaaaagaaatatttatatatacacatatatacacatacacacatgtatatatatattcttcataatggaggacaatgttttgcaatatataaatcattctatttttgtaaattgtatatcactttaattgaaaatgttctctactaattaatactgtgaaacaaaattgatgttgtttaactagaagttatgagtatcttaactgcctttattccttttcaaaaaggaaaaagctgtagaacattttgtagatgaaactactgtttaagattaatgaattaatattgtgaatgaaaatcaaaatccatactttaaaggtaatcatgttactaacaacctatttttgaattcataaaaatttctttataaatgatgttttgtgaacatagtaaaatagaccattatactatgtgtatgtttgatacagcgtcgccaaaactagtgttctttattagtgcctctcacaaaagatcctggatggaggagtaagatgaaatattatgctattatatgatgctgtttgtaaaggtattaatgtactagtaaggtgttaatgacaaggaattagtactattcctgttgtaaagttagattttgcatattgtatctatcaaaatatgtttgggtttagattttaagttgtctactgagcagatttctgcattggttttccagtcctgttaaaagtttagaaacttcatatgtgtcatcacagcttttgtaaagaaagtatccttaatattttatgacattct

SEQ ID NO: 2917 - DNA, 2315 bp, Homo sapiens
ccgcgccgcatggaggccggctgaggagcgccgctgcctcgcctcggtacgccgcgcggcgcggacggcgcgctccccacaggtgcaggaagccgccgcccagccatggacggggaggagcagcagccaccgcacgaggccaacgtggaacctgttgtgccgtcagaggcttcagagccggtgcccagggtgctttctggagacccccagaacctgtccgacgtggacgccttcaacctgctcctggagatgaagctgaagcggcggcgtcagcggcccaacctgccgcgcactgtgacccagttggtggctgaggacgggagcagggtgtacgtggtggggacagcccacttcagcgacgacagcaagagggacgttgtgaagaccatccgggaggtgcagcctgacgtggtggtcgtggagctctgccaatatcgtgtgtccatgctgaagatggacgagagcacgctgctgcgggaggcccaggagctcagcctggagaagctgcagcaggccgtgaggcagaacgggctcatgtcggggctgatgcagatgctgctgctgaaggtgtctgcacacatcaccgagcagctgggcatggccccaggtggcgagttcagggaggccttcaaggaggccagcaaggtgcctttctgcaagttccacctgggtgaccgacccatccccgtcaccttcaagagggccatcgcagcgctctccttctggcagaaggtcaggctggcttggggcctgtgcttcctgtcagaccccatcagcaaggatgacgtggaacgctgcaagcagaaggacctactggagcagatgatggccgagatgattggcgagttcccagacctgcaccgcaccatcgtctcggagcgcgacgtctacctaacctacatgctgcgccaggccgcgcggcgcctcgagctgcctcgggcctctgacgccgagcccaggaagtgcgtcccctccgtggtcgtgggcgtcgtgggcatgggccacgtgcctggcatcgagaagaactggagcaccgacctcaacatccaggagatcatgaccgtgcccccgccgtccgtctccggcagagtgtctcggttggccgtgaaggccgccttcttcggcctgctgggctacagcctgtactggatgggccgccgcaccgcgagcctggtcctgtcgctgcccgccgcgcagtactgcctgcagagggtgaccgaggcccggcacaagtaggagactgctccccgcccgctcgggcccctgaggagccagtgcccccgcggcacttctgggtgccaggtgcatcctagcccgcccgaggcccctgccaccccccatgggggtctgggcccggcctcgcctgccctcctgggccagtcacccctcccccagcccacccaaataaaggattatttaactgtctgagctcaggcctcccggcagcccctcccctcccacactgcaggggccgttccccagcttctggacaagacacccagctccgagggggcaggggcttataggaggggccgaggcgtgcgctgccctctcagccctggtggcaggcgggggacaatggccactgtccctacctcactgtgccttcctgtgctccggccacaggagcgtcggcccaggggcggctcctgggggctccagggcaggcgagactgggaaaggcccagccctggagctccagccgaccccaccgtgcccctggcatcctggccctggccgccacctccctggcaccgtctgcctgcagggattctgtgtttttggcttttttaatgtcttaaaatcttttactcaggtaattttaatttcagagagaaaaactgaagtaaatgtcaaaaaacaccagccttaaatccaaagggagagaattcgtgttcttgggtctgtcccgagtgggctcgcgtgcagccaaacatcagctctgggtccaggcgtggcctcagctgggagcctgtgtcctgagcccccggagcgaaggggtgcctggggcatcttggccctctctgggcagacaatgtgtgcacctatgtggaaggccaaggacatgggctgtggccaggcctgtcccgctcaggccccctgcccggcggccgtctgtgtgcggggcctccctcctggctgtccaggacacagcccgtgcagccccagcctggacccaggccatctctggttgtgtctgtgccgactcggtgttgaatcaaatcaggtgtgcgtcaggagccggctgtgtccttcctgccacactcggggattcattccttagaaactgaaataaattctaattttggaaactc

SEQ ID NO: 2918 - DNA, 4430 bp, Homo sapiens
gagagccgccatttttgagagcgggggagaagagacaagcaggggcggcagaggctcaacgggatgctgactgggttttgcttttcgtcccagccttgtggggccgggacggaagaacccatcaaagcccttcctcccgccgcctctccggaatgaggtctcagcacccgcgcgggacagcacccttcctcctgcgacagagcccaagaagaggccgaaaccgagaccatgccagggaagctgaaggtgaaaatcgtggccgggcgccatttgccagtgatggaccgtgctagtgacctgactgatgccttcgtggaggtaaaatttggtaataccacctttaaaacagatgtgtaccttaagtcactcaaccctcagtggaactcggagtggtttaaatttgaggtggatgatgaagacttacaagatgaacctttacagatcacagttcttgaccatgatacttacagtgcaaatgatgccattggtaaagtgtacattgatattgatcctttactgtatagtgaagctgcaacagtcatctcaggatggtttccaatttatgacaccatacatggtatccgtggggaaatcaatgtagttgtcaaagtagacctcttcaatgatttaaatcgatttaggcagtcatcatgtggagtcaaattcttttgcacaacgtctattccaaaatgctatagagctgtgataattcatggatttgtagaagaacttgtggtcaatgaagacccagaatatcagtggattgatcgaattcgcacaccaagggcatcaaatgaggccagacagagactcatttcgttaatgtcaggtgagctgcagaggaagattggcttgaaagtacttgaaatgagaggaaatgcagttgtggggtacttacagtgtttcgatctggagggcgagtctgggttagtggtgcgagccataggaacggcgtgtactctggataaattaagtagcccagcagcattccttcctgcatgtaattccccatccaaagaaatgaaggagattcccttcaatgaagatcccaatcccaatactcactcatcaggaccctcaacccctctgaaaaaccaaacttattccttttcaccttccaagtcctacagtcgacagtcctcttcttctgacacagatttgagtttgacacccaaaactggaatgggaagtggtagtgctggaaaagaaggggggccctttaaagctcttttaagacaacagactcaatcagcgttggaacagagggaatttccattttttaccttgacggcatttcctcctggattccttgtacacgttgggggtgtagttagtgcacgttctgtgaagcttttggatcgtatccacaatcctgatgaaccagaaactcgagatgcatggtgggcagaaatcagacaagaaataaaatcacatgctaaagcattaggctgtcatgctgtagtgggctacagtgaatcaactagcatctgtgaagaggtctgcattttatctgcatctggcacagcggctgtactgaatcctagatttctgcaggatggcaccgtggaaggctgtttggaacagaggcttgaagaaaatttgcctacacgttgtggattttgtcatataccatatgatgaactgaatatgccatttccagctcatctcacatattgctataactgcaggaaacaaaaagttcctgatgttctgtttacaactatagacctcccaacagatgcaacagttattggaaaaggttgtcttattcaagcaaggttatgtcgcttaaaaaagaaagcacaggcagaagcaaatgctacagctatcagtaatctcttgccatttatggaatatgaagtgcatactcagctaatgaataaactaaaactcaaaggaatgaatgctttgtttggactaagaattcagatcacagtgggtgaaaatatgttgatgggcttagcgtctgccacaggtgtgtatttagcagctttaccaactcctggtggtattcagattgctgggaagactcctaatgatggctcatatgaacaacacatctctcatatgcagaagaagataaatgacacaattgctaaaaacaaagagttatatgaaatcaatcctccagagatatctgaagagattataggatcacccatcccagaacctaggcaacgctcaagacttctaagatctcaatcagaaagctcggatgaagttacagaattagacctttcacatgggaaaaaagatgcttttgttttggagattgatgacacagatgccatggaagatgtccattctctacttactgatgttcctcctccttcaggcttttatagttgtaatacagaaattatgcccggtataaataattggacctctgaaatacagatgttcacttcagtaagagtaatcagattaagcagcctcaacctgactaatcaagctctcaataagaactttaatgatctctgtgaaaatttgctcaagagcctgtactttaaactacgatctatgatcccctgctgcctttgccatgtaaattttacagtatctctgcctgaagatgaattaattcaggttacagtcacggcagtcgcaatcacttttgacaaaaatcaggctttacaaaccacaaaaacccctgttgaaaagtcattgcaaagagcctcaacagataatgaagaacttttacaatttccactggaactgtgttcagattcacttccttctcatccttttccaccagctaaagccatgacagttgaaaaagcaagtccagtgggtgatggaaatttccggaatcgttctgctccaccttgtgcaaattccacagttggggttgttaagatgacacctctttcttttattcctggagcaaaaataactaagtatcttgggataattaacatgttttttattcgagagactacttctcttcgggaggaaggaggagtcagtggttttctccatgcttttattgctgaagtgtttgcaatggtgagagctcatgttgctgcattaggagggaatgctgttgtctcctacataatgaagcagtgtgtcttcatggagaatccaaataaaaaccaggcacagtgtcttataaatgtaagtggtgacgcagtggtttttgttcgtgaatctgacttagaagtggtgtcatctcagcaacctactaccaactgccagtcatcatgtactgaaggcgaagttacaacctgaggaaaattaggaaaaaagagctcaactaaatgaaattcatcaatctctgttattttgtcattaattatcttcttagacttaaaattgaacttgagataaataaggaagaattgagtagatttgatttgcctggagtcttttggaggcatgagaattttctaatcttgacattttgtttgcctgttctagacaggccctgtggggtcttgacccttcagtaagttaagataaatttttaaaagaaccgtagcaaagatggaacctttgtaatttatgttgattttaataaaatcataatttaaaaaatgaaatgggaagattgtcaggaaattaggatagctactctagtataatttagaaaaactaagcaagagattctccagttgctagtgagtaagcactctgatttgagaaatgtgtggggacaatggagaaaagttttcagaaaactgctatgtagatttctgaatgtgttgtattttgctgaggaattcggtaacaactgaaagggaaaagtgcttcagccatcttttgaaaacaagttaaaattctggaacttgtatctgtaatacatcctaactcttgtaaaagaaaataatttatcatagctggtgtcctttcattgaaagttgtaatactgtctctaaggagggaggaaaagattattatataattttataactggcaacatttgagttagtattgactttgtctaaaagaggcttgacttcaactgggataaaaatgtcagtgaattttgttaaagtagtaaaaatgcagttgacttagtaggaacataaaattatttcctaataagataatattgcactcctaccaaataaacaggattttagtaatatctgagggattgttgatggtgagttagactgtatttggcatagaatttggaaatgtaacttgaatgtaaatatgctgcaaaatgttgaatgtatacatagaaagactttttctgtcgacgccaaatgcccgttgtaaatgaaccttaaatattacattcctcctttgcacaataatatttctttataacacttatgattttttcccccaggacaacaaactgcccttaagagtcatttccttgttatcacaggtgtcaatatttttctgtattttgtttataattttattttttaaataaaaagtgtataaaaataaaaaaaaaaaaaaaaaaaaaaaaa

SEQ ID NO: 2919 - DNA, 1797 bp, Homo sapiens
ggcgggtactgcgttagtgattagagtttcttccctgccggaggtgggatacacggtagcatcatggtcgaggaggtacagaaacattctgtacacacccttgtgttcaggtcgttgaagaggacccatgacatgtttgtagctgataatggaaaacctgtgcctttagatgaagagagtcacaaacgaaaaatggcaatcaagcttcgtaatgagtatggtcctgtgttgcatatgcctacttcaaaagaaaatcttaaagagaagggtcctcagaatgcaacggattcatatgttcataaacagtaccctgccaatcaaggacaagaagttgaatactttgtggcaggtacacatccatacccaccaggacctggggttgctttgacagcagatactaagatccagagaatgccaagtgaatcagctgcacagtccttagcggtggcattacctttgcagaccaaggctgatgcaaatcgtactgcccctagtggaagtgaataccgacatcctggggcttctgaccgtccacagcctacagcgatgaattcaattgtcatggagactggcaataccaagaactctgcactgatggctaaaaaagcccctacaatgccaaaaccccagtggcacccaccgtggaaactctacagggttatcagtgggcatcttggctgggttcgatgtattgctgtggaacctggaaatcagtggtttgttactggatctgctgacagaactataaagatctgggacttggctagtggcaaattaaaactgtcattgactgggcatattagtactgtgcggggcgtgatagtaagcacaaggagcccatatctgttctcttgtggagaagacaaacaagtgaaatgctgggatctcgaatacaataaggttatacggcattatcatggacatttaagtgcagtgtatggtttggatttgcacccgacaatcgatgtgttggtaacctgtagtcgagattcaactgcacggatttgggatgtgagaactaaagccagtgtacacacattatctggacatacaaatgcagttgctacagtgagatgtcaggctgcagaaccacaaattattacaggaagccatgatactacaattcgattatgggatctggtggctggaaaaacaagagtgacattaacaaatcacaaaaaatcagttagggctgtggttttacatccaagacattacacatttgcatctggttctccagataacataaagcagtggaaattccctgatggaagtttcattcaaaatctttccggtcataatgctattattaacacattgacggtaaattctgatggagtgcttgtatctggagctgacaatggcaccatgcatctttgggactggagaactggctacaattttcagagagttcacgcagctgtgcaacctgggtctttggacagtgaatcaggaatatttgcttgtgcttttgatcagtctgaaagtcgattactaacagctgaagctgataaaaccattaaagtatacagagaggatgacacagccacagaagaaactcatccagtcagctggaaaccagaaattatcaagagaaagagattttaatgaatgtggaattttttctctctctttttttttctttttaattaaaaaaaaaaaagcttggcgttcatgaggatatccagtcattttgtgctctggctgggaatataaaggagaaattcacttgcttcaatcattgctgcttcatattttacaataaactgtcccctgtcccctaaaaaaaaaaaaaaa

SEQ ID NO: 2920 - DNA, 2720 bp, Homo sapiens
acccggcctgccccgcggcaagatggcggcctgaacgcagctggcagcggcggaaagcttagatcagcctttccacagctgttagcagcatctgccccaatttcagctgaagattcaggtgccccagggactggaagaaattacagtgcctacttggaaagaagaagagatagcgacttgccccagtccaaccccagagcgggagctgtggctaaaggaagtggaggggccgtgggatgcggagagccgagggctaactcccggacagcggaacagagagagctgccgacaaacagacgtccagagtccttctggccacatctctgagcctgcctccttcttgcttctcagcaggcggaggagccgtcacctcccagaatgactagtgccgcccctgctaagaaaccctaccgtaaggcaccaccagagcatcgggagctgcgtttggaaattcctggatcccggcttgagcaggaggaacccctgactgatgcagaaaggatgaagctcttacaggaggagaatgaagagcttcgccggcgcctggcctccgccaccagacgcactgaggccctggaacgtgagctggaaattgggcaggactgcctggagctggagctgggccagagccgcgaggagctggacaaatttaaggataagttccgcaggctgcagaacagctacacggcttcccagcggaccaaccaggagttggaggacaagctgcacacactgatcaagaaggctgagatggataggaagacgctggactgggagattgtggagctgaccaacaagctgctggatgccaagaacaccatcaacaagctggaagagctcaatgagcggtaccggctggactgcaacccggctgtacagctcctcaagtgcaacaagtcccacttccgaaaccacaagtttgccgatctgccctgtgagctacaggacatggttcggaaacatttgcacagtggtcaagaggccgccagcccaggtcctgctcccagcctagccccaggggctgtggtgcctacctcagtcattgcccgagtgttagagaagccggagtctctactgctcaattcagcccagtcaggcagcgccgggcgccccttggctgaggatgtctttgtgcatgtggacatgagtgagggtgtcccaggtgatccagccagtcccccggcccctggcagccccaccccacaacccaatggggagtgccactctctgggtactgccaggggctccccggaggaagagctgcccctgccagcctttgagaagctgaacccctacccaaccccgtctccaccacacccactgtatcctggccgcagggtaatagagttctctgaggataaggttcggatcccccgcaacagccccctgcccaactgcacttacgctacccgccaggccatttccctgagcctggtagaggaggggagtgagcgggcccgccccagcccagtgcccagcacccctgcctcagcccaggcctcaccccaccaccagcccagcccagcacccctaacactcagtgccccagctagctctgccagctctgaagaggacctgctggtcagctggcagcgggcatttgtggaccgtactccaccacctgctgctgtggcccagcgcacagcctttggacgcgatgccctccctgagctgcagcgccattttgcccatagccccgctgacagagatgaggtggtccaggcaccttctgcccgacccgaagagagtgagcttttgctacccacagaacctgactctggctttcccagggaggaagaagagctgaacctgcctatcagtcctgaggaagagcgccagagcctgctgcccattaacaggggcacagaggaggggccaggcacttcccacaccgagggcagggcctggccactccccagctccagtcgcccccagcgcagccccaagaggatgggggttcaccacctgcaccgcaaggacagcctgacccaggcccaggagcagggcaacctgctcaactagggcccctgctggccttcctgccattgctgcaccaggactgcaaggagtccccacaccttggcagctcagggtccccagtccaagcccttgacctctcctctatccagacccgcacagctgtttcctgtgtggatggggtcaggttgtgggccatgccaggcctgtcagctgcgttgactgactgcagcagcttgcctcatggttttccctttttcttagaatatttattcttcagaggtaacatgcagttgggtctcaagacctttcctccaatcagcccaacccagcccagactgggcttttctggggagctgaggagtttatcagtattcatcttccatcctttcatagtcacaagttttgttattttgtttttttttgggggtgatggtgtaattgttaacctcatttccgtttcctacctgtttgcttccccccccagtcctccgcatgagctgttgccctccaggggcctggcacagctggccttggggacgagggagaggactgattcagggccccctcagctgtctcctccctccctctggaaaggagggtggggctcaggggcctcaagctgggctctgtgtgaggcctggcccccactcccaaccttggctctagactgttactcttaagctttgagaaattttcacattgatgactattttaaaatcaaataaaactattttactggt

SEQ ID NO: 2921 - DNA, 3003 bp, Homo sapiens
ccaaccccggcctaggctctccaccgcatcggattctggaatttacgatcacgaaagttctattgtcccgcgattggctcccgggccgcatgacatcatagcgcttgattcatccttcgggtcccgattggctggccgcgccattgtgacgtcacggtcagcccacgttctgattgtagatagccggcgccttcctcttcccatcgcgcgggtcctagccaccggtgtctccttctacatccgcctctgcgccggctgccacccgcgctccctccgccgccgccgccttgctgctgctcaaagctgctgccgccccttgggctaaaaggttttcaaatggaacattttgatgcatcacttagtacctatttcaaggcattgctaggccctcgagatactagagtaaaaggatggtttcttctggacaattatatacccacatttatctgctctgtcatatatttactaattgtatggctgggaccaaaatacatgaggaataaacagccattctcttgccgggggattttagtggtgtataaccttggactcacactgctgtctctgtatatgttctgtgagttagtaacaggagtatgggaaggcaaatacaacttcttctgtcagggcacacgcaccgcaggagaatcagatatgaagattatccgtgtcctctggtggtactacttctccaaactcatagaatttatggacactttcttcttcatcctgcgcaagaacaaccaccagatcacggtcctgcacgtctaccaccatgcctcgatgctgaacatctggtggtttgtgatgaactgggtcccctgcggccactcttattttggtgccacacttaatagcttcatccacgtcctcatgtactcttactatggtttgtcgtcagtcccttccatgcgtccatacctctggtggaagaagtacatcactcaggggcagctgcttcagtttgtgctgacaatcatccagaccagctgcggggtcatctggccgtgcacattccctcttggttggttgtatttccagattggatacatgatttccctgattgctctcttcacaaacttctacattcagacctacaacaagaaaggggcctcccgaaggaaagaccacctgaaggaccaccagaatgggtccatggctgctgtgaatggacacaccaacagcttttcacccctggaaaacaatgtgaagccaaggaagctgcggaaggattgaagtcaaagaattgaaaccctccaaaccacgtcatctgattgtaagcacaatatgagttgtgccccaatgctcgttaacagctgctgtaactagtctggcctacaatagtgtgattcatgtaggacttctttcatcaattcaaaacccctagaaaacgtatacagattatataagtagggataagatttctaacatttctgggctctctgacccctgcgctagactgtggaaagggagtattattatagtatacaacactgctgttgccttattagttataacatgataggtgctgaattgtgattcacaatttaaaaacactgtaatccaaacttttttttttaactgtagatcatgcatgtgattgtaaatgtaaatttgtacaatgttgttatggtagagaaacacacatgccttaaaatttaaaaagcagggcccaaagcttattagtttaaattagggtatgtttcaagtttgtattaatttgtaatagctctgtttagaaaaaatcaaagaccatgatttatgaaactaatgtgacataatttccagtgacttgttgatgtgaaatcagacacggcaccttcagttttgtactattggctttgaatcaagcaggctcaaatctagtggaacagtcagtttaactttttaacagatcttatttttttattttgagtgccactattaatgtaaaaaggggggggctctacagcagtcgtgatgaaacttaaatatatattctttgtcctcgagattttaggaagggtgtagggtgagtaggccatttttaatttctgaagtgctaagtgtttttatacagcaaacaaaaagtcaattttgctttccaccagtgcgagagaggatgtatacttttcaagagagatgattgcctatttaccgtttgacagagtcccgtagatgagcaatggggaactggttgccagggtctaaatttggattgatttatgcactgttatctgttttgacacagatttccttgtaaaatgtgcctagtttaccaaaattaacaaagggggggaaaggaccttagaactttttaaggtaaaatcaaatatagctacagcataagagaatcgagaaatttgatagaggtaacttgtttaatgtaaatctaatagtacttgtaatttctttctgcttagaatctaaagatgtgtttagaacctcttgtttaaaaataatagactgcttatcataaaatcacatctcacacatttgaggcagtggtcaaacaggtaaagcctatgatgtgtgtcattttaaagtgtcggaatttagcctctgaataccttctccattgggggaaagatattcttggaaccactcatgacatatcttagaaggtcattgacaatgtataaactaattgttggtttgatatttatgtaaatatcagtttaccatgctttaattttgcacattcgtactatagggagcctattggttctctattagtcttgtgggttttctgtttgaaaaggagtcatggcatctgtttacatttaccttatcaaacctagaatgtgtatatttataaatgtatgtcttcattgctaggtactaatttgcagatgtctttacatatttcaatacagaaactataacattcaatagtgtgctgtcaaagtgtgcttagctcacctggatatacctacattgttaaatgtctaaacagtaatcattaaaacatttttgattacctgtgaaaaaaaaaaaaaaaaaaaaaaaaaaaaaaaaaaaaaa

SEQ ID NO: 2922 - DNA, 6706 bp, Homo sapiens
agcccacccgcctggctgcgcgtcccgggcccggcggctgaagaggagccgcggcgaggaacaagagtgtggtgagaggacgcggaaacacctgatatcccagcaaaggaagctgcagaggaagggtcctgccccgtgagcgaggacagcctccaggagcacagcggcttctcctaacatccccctggcagtgaattacggatgaccccgtatatgaggaggtgtggatgccgacacacggggagagctcctgagaccagcacacaggaccagtgtcctccccgtgaccttgcagttgtgtagccacaagtgggagccacagagaaggagagcccataaggggactcttttcaagacacggtgttaaatcaaggctctgaagttggggccacagccggtctcagctttctgtgttctgggggcgcggtgatatgacagcatgtgaagtgagtgggtgagcacggactcctgagagcgagggcgcacccaatacctagttatccggtactgcagagagacacctggtcagccagcgttgcaaagagggatagctagtcactcaggctgcagagagagacacctggtcacccaggctgcagaaacaaccgcagtcaactgcagctccagtcattgctggatgttggctgacgcggtcctggcgccagctggagatccattcaccaagactttctgggcagatttaaagtggctggggttcagaagttcagcaagttggacacacccctcctcgctggagaggagagggcaaaggcgaggcgggggagcagcgtgtgagattccccccttcacacacacaacaaagcgtggacacacagaagtgaaatctgatcgcgtgccaggaaaagctgtgaggctggaaaccccggagtaaggctcgaccttggccagacctgcaggctgcggaaccgggggcgcgcgggcgcagcgcagcacagcccggccatggagcacgcggtggccccctgcgtcctctacccagggactgagcccggggctgccggggagagcgagagcgagggcgccgcgtccccggcgcagacaccctgcagtctcggcgcgtccctgtgcttcagctccggggaagagtccccgccgcagtccctcgcctcagcggcggaaggcgcggccacctccccgccctccagcggtggcccgcgggtggtggagcggcagtgggaggccggcagcgcgggcgccgcgtccccggaggagctcgcgtcccctgaggagcgcgcgtgcccggaagagcccgcggcgccgtcccccgaaccgcgcgtttggcttgaggaccccgcgtcccccgaggagcccggggagcccgcgcccgtacccccggggttcggggcggtgtacggggagccggacctggtgctggaggtgtcggggcgccggctgcgcgcgcacaaggcggtgctggcggcgcgcagcgactacttccgcgcgcgcgcgtcgcgggacgtgctgcgggtgcagggagtgagcctgacggcgctgcggctgctcctcgccgacgcctacagcgggcgcatggcgggcgtgcggcccgacaacgtggccgaggtggtggccggcgcgcgccgcctgcagctgcccggcgccgcgcagcgcgccaccgacgccgtggggccgcagctgagcctggccaactgctacgaggtcctgagcgcggccaagcggcagcggctgaacgagctgcgcgacgccgcctactgcttcatgagcgaccactatctggaggtgctgcgcgagcccgccgtgttcggccgcctgtcgggcgcagagcgggacctgctgctgcgccgccgcctgcgcgccggccgcgcccacctcttggccgcggcgctcgggccggcgggggagcgcgcgggcagccggcctcagagcccctcgggggacgcggacgcgcgcggggacgcggccgtctactgcttccacgcggcggccggagagtggcgcgagctgacgcggctgcccgagggcgcgccggcgcggggctgcggcctgtgcgtcctctacaactacctcttcgtggcgggcggcgtggcgcccgcgggccccgacggccgcgcgcgcccgtccgaccaggtcttctgctacaacccggccacggacagctggagcgccgtgaggcccctgcgccaggcgcgctcgcagctgcggctgctggccctggacggtcacctctacgccgtgggcggcgagtgcctgctcagcgtggagcgctacgacccgcgcgccgaccgctgggcccccgtggcgccgctgccccggggcgccttcgccgtggcgcatgaggccaccacctgccacggcgagatctacgtgtccgggggctccctcttctatcgcctgctcaagtatgacccgcggcgcgacgagtggcaggagtgcccgtgcagcagcagccgcgagcgctcggccgacatggtggctctcgacggcttcatctaccgcttcgatctgagcggcagccgcggcgaggcgcaggcggcggggccgagcggggtcagcgtgtcccgataccactgcctggccaagcagtggagcccgtgcgtcgcgcccctgcgcctccccggcggccccacgggcctgcagcccttccgctgcgccgccctggacggcgccatctactgcgtgagccgcgcgggcacctggcgcttccagcctgcccgggaaggcgaggccggcggcgacgcaggccagggcggcggcttcgaggcgctgggcgcccccttggacgtccggggtgtgctcatcccgttcgctctcagcctgcctgagaagccgccccgaggggagcagggcgccccgtaggccggcggggtcggcgggcgtctccctcggcaggggtttgcggggcccaggtccctttgggcccgcggaggaggacgtggtggggagtcggggccgctggccacgctggtggtttggacacttcgaaggagccccgaggacgctctcagggccgctttcgctttgctttccttttgcttgtctttgcttctgggggtggatgccttgagacccaggaggtgtgcggatgggtcccttgacagacaggacacagagaaggctgtgggatccaaagggtcagcctcagggtacagtgggggttcctgaggcagcctgcagccggccccggggtgtcccgaaccccgcagagcaccgaggctgtgcgcaggagcctgggaccctcaagtaggtcgccgcgaactatcgggggaagcacgcagagaggggtcacgccttttatttttggcttgagatttaaaattataactgataagtaaagctctttctgatttagttgaaaatttcgtaccatgtgctcgctttggttggctcaactccaaaaagagtaatttaataagcattaaaggtaaaatctttgattaccagtaaggtttcttgttcaatatgcattggaagtatttccttccccacaccattgctactcaaactcacatgcctagagcagctccgtctcactgttggaccgagggggctttcatattttcagttgaaaggatgttaactgatgtagcgatgatttaccattatttaaattttaagtcttcagtggctaaatgtgaccaaacagcacatcataagtaggaaaaacttaccagggtgcttgtctatctaaaaagcaatttttgatagtccactctgtatgcccagccgctttcataatctggaacgagataaaatattcctaaaaagcggggaaaatcattttgctttgacagttctataaaaaaaagtgtaggcacattttaaacccactgtatatgatgttttcaatgtggatcgtgtagttctgatgagggagattaatttttacaatcagtattctaagtgtggccgagtgacagtgggcatagatttataacaaggaagtgacgtgcttatcaccatagatttgcaagtaaactgcatgtatttaattgtattgaattgagttccaaaataccctaatagaattaacacgaggctcactgcattgacagggtatgaggattaaaaacaaatcagttgggtcgtttctcatttaacattttacttttcaagtgtgtatacagaggacttactattatgactttgaggatgagatccatgctcacaaatagaggcgaacatttgaactccgaatccaacccattttcttactgtaagaggaaaagttactggaacgtaactagttgaaatcctgcctactttaatattatttgtttgttaatccagtaatgggaactgccatctctgtagaaatcagtgggtaattgaaaaataggttatgctttttaaagagtctgtggttatgagaggtctcagttaagtgtgtttagaagtgatcagcttgaaccttatgcatgactcgggggctggaatttatgatctgggttacggtatgttctggggacgtgtctgcttgcccatggttactcatgaactgaggggatagcttggcaacttggttaatcatcttgggaaagaaaaacagacttcatatcgcctgacttgattggccttttataggagtatactggagaaatggttgtagaaacagtatttacagcaaaaggaaacaaataatgttcattttaagcaatgtaccattcacactgtcctgccttttcctctagaattttattaatggtagaaatttttatatgaaatgggaccaggaccaggctaatattttcagtccttaaatatcaaactcatatgctgttatcactgtgattttacttgtgaaatcattcctgtaatgtttagtgtttgaaaatgaaatattgaaattaggtttccagagtaacactgtccccggaaaaggatatgagaagtggtggatgttggatgggggtggttgcacagtcctgtgcggttcccatggctttccagcgtttcatttagtgaaggaatgctcacactagatgtagcacagcttcctgtggggcccggcagcaaagccccaggtgctccctgtcacctcacaacaaaatgcactaagaaacgtaaagaataagaggaattaatacccaccattaaaggatgtccggccaacctattgtggaaatttatagaatagtatacaccacagttctgaatagtgatatcacataaaaatacatactagaggacctgccaagccatgagcagtgtttttgctttttgggggccagtccctggggtgtggagccgctagggtttgcacccatgaaacagaaaagccacaccctccaaggtgtggctttcattttgggactgctgcagggagggcagaggcattgctgagactgcctggcaacggctgatgccccaggtaggaccttttccatttcaaagtggtgttctaagtctgcgtccaacactgtgtaggaaaaaggttggtgcaaaaatattcctggtcatccacccattaaaatagttagatgaggctattgccttgatgacagctgtccacactcctcatgaaattaacccgtatgccggggcatttccaaatgtctgactcgtgaaattaacccatacgcaggggcctttccaaatgtctgaaaaggcagtggtgtcttttggggaaaatgttatgcatggaagcctgaccttttgcttagttgacagcaatcccttctgtattgccaatcaaggttcatttgagatgcagaggaatgagcttgagccttcctccttttccttccggttttattcttcctcttgggaacatccctccactccgcactgcttcctgcagctttgtagagctggatttggaacttcgggatttggtttctgagtctgtggaggcaccgacttctcctgtaagaaaatgaatgttgtggaaattctttggctacttaactaaaactcgtgactgtataagtttggctacaaataagtaagaaattaatcatctgctctgtttctgctaatttctggtgtcacttcagtaattctggtagcagccgttgaatctgtcagtctcttaggtaacttcctgtaaacgatttggaaataggatgttttcaacgttcttttgtcttttgctgaagtcaggatagattcaagacataatctcttgtaagatctaaatagagcaaatgtaaacaaaagtgcatttttgtattcttgttaattttagatgctttcctagcttacaaaaagttctatttttgggttaaaaatcaatcaactttctgatatttccccttctgcaatgttattgttcataagaaaacacgagctgaaaatggaaatctgcagttgtttcagttgtcttgaatttctttcagtggccacatcatttccacgttttccacatccgggaggaagcctggactgtgcagccttcgggcacccggcacagacactgtgctggcaggagcttcagacacgccaagtggatggatttggattgaacgcatatgaaacaggagacgggttctcatgtgagatcaaagctcctccaaagcctgttcaagctctaagcgattctcaaatgttaccatttattaaaggtaaactacacctgttgaaggccaagttcagggcagctgttgtgatctgtgtagttaatgtatttattaatgcttgacttttaaaatcctgggcataaatagtgcagagcctcgtatgtttgtcagttcatgccgagatgaaataaatcacgcagaaagtgccagtc

SEQ ID NO: 2923 - DNA, 2619 bp, Homo sapiens
ttacatttacagtgtagcaaaagagaaagtaactatgttgctgctggagatcaatgaagccgagtgaatgggggctgaatgtgcgagtccatagctgaagaggagcgccagatggtggaggaatacacttatttatgaaactgtcttgagttcttcttgaattgccagttttcagcctcctcatgcctccgtctcctttagacgacagggtagtagtggcactatctaggcccgtccgacctcaggatctcaacctttgtttagactctagttaccttggctctgccaacccaggcagtaacagccaccctcctgtcatcgccaccaccgttgtgtccctcaaggctgcgaatctgacgtatatgccctcatccagcggctctgcccgctcgctgaattgtggatgcagcagtgccagctgctgcactgtggcaacctacgacaaggacaatcaggcccaaacccaagccattgccgctggcaccaccaccactgccatcggaacctctaccacctgccctgctaaccagatggtcaacaataatgagaatacaggctctctaagtccatcaagtggggtgggcagccctgtgtcagggacccccaagcagctagccagcatcaaaataatctaccccaatgacttggcaaagaagatgaccaaatgcagcaagagtcacctgccgagtcagggccctgtcatcattgactgcaggcccttcatggagtacaacaagagtcacatccaaggagctgtccacattaactgtgccgataagatcagccggcggagactgcagcagggcaagatcactgtcctagacttgatttcctgtagggaaggcaaggactctttcaagaggatcttttccaaagaaattatagtttatgatgagaataccaatgaaccaagccgagtgatgccctcccagccacttcacatagtcctcgagtccctgaagagagaaggcaaagaacctctggtgttgaaaggtggacttagtagttttaagcagaaccatgaaaacctctgtgacaactccctccagctccaagagtgccgggaggtggggggcggcgcatccgcggcctcgagcttgctacctcagcccatccccaccacccctgacatcgagaacgctgagctcacccccatcttgcccttcctgttccttggcaatgagcaggatgctcaggacctggacaccatgcagcggctgaacatcggctacgtcatcaacgtcaccactcatcttcccctctaccactatgagaaaggcctgttcaactacaagcggctgccagccactgacagcaacaagcagaacctgcggcagtactttgaagaggcttttgagttcattgaggaagctcaccagtgtgggaaggggcttctcatccactgccaggctggggtgtcccgctccgccaccatcgtcatcgcttacttgatgaagcacactcggatgaccatgactgatgcttataaatttgtcaaaggcaaacgaccaattatctccccaaaccttaacttcatggggcagttgctagagttcgaggaagacctaaacaacggtgtgacaccgagaatccttacaccaaagctgatgggcgtggagacggttgtgtgacaatggtctggatggaaaggattgctgctctccattaggagacaatgaggaaggaggatggattctggttttttttctttctttttttttttgtagttgggagtaagtttgtgaatggaaacaaacttgtttaaacactttatttttaacaagtgtaagaagactataacttttgatgccattgagattcacctcccacaaactgacaaattaaggaggttaaagaagtaatttttttaagccaacaataaaaatataatacaacttgtttctcccccttttccttttaagctatttgtagagtttatgactaaatagtctgtgcaggttcatagaccgaagatactacacactttaaaccaattaaaaagaaccaaaagtaaatagaaaagacattgaatcaccaaggcctgggatcaacctgggctgtccacacagaaaacaaaaacccaaccaaaccaagccctgttgtgctcactggtgcaaagagaagatcagggcagcttaagtggtctaagaatccttcaggcattctttaaggagaaaaaggatacctttgattttgtgtgtttcatgctctggattttttttttttttccttctctgggtttaagagattttttttgaaatagtgaggaactgaccattatatgccttcactggcttcttgtgcaataatatgatgttttaagtgtgcaaacaagttagagctggcagctgaatgatagacaaatagtgcaaatttgccagcttggagatagaaaggaattcaacaatatatcaaatactttccttcccacctttttccttttttttttttttttctgatttgattctggttacagtgccataaaccttgttacatatgtatatcagaatgtaagaaaaaaaaatttatttaaaaatatttttcgcaaaaaaaaaaaaaatcttggtgtgtttctgttgattgtgtaaaaatttattttcattatataaatgaaactgg

SEQ ID NO: 2924 - DNA, 2244 bp, Homo sapiens
cttgtatggttgactttgagtgattcccaggatatttaccctgctattgtcttaccataatcttgatgtgtctagcctcttacaaatgagaaaatcctaccgaggaatttcccatttgtaatagtttgtcttggggagcaaagaggaggatagccaatgatcatgatgatctcctcttttctcacgcagagcaggtgttcatgataaaaagcaagtcttttgtgtcttcatgatctgaagagaggaaacaacacggatcaagatgatcctagacctcctaatcatggggatgattacaaggagttgcagaccctactctctattttgcagtgggtggagttgtggataggggtgacccatcagtcattgagaaatgaatctcctgggtgctacttgtgaaagtgaggatcctctctccctttcctgtggatgcagctgagattctggacagcctagacttcttcctcagtgtcagagtaagattgcctcaatggggcggggcaggacacactgctgacctcaccactgggcgccctgggcagccactgcgaggcctcgtcattttcgagttggtgagacaccgcggcagtcgacttggaagatgctctggtggtagaggtggacttagtagttttaagcagaaccatgaaaacctctgtgacaactccctccagctccaagagtgccgggaggtggggggcggcgcatccgcggcctcgagcttgctacctcagcccatccccaccacccctgacatcgagaacgctgagctcacccccatcttgcccttcctgttccttggcaatgagcaggatgctcaggacctggacaccatgcagcggctgaacatcggctacgtcatcaacgtcaccactcatcttcccctctaccactatgagaaaggcctgttcaactacaagcggctgccagccactgacagcaacaagcagaacctgcggcagtactttgaagaggcttttgagttcattgaggaagctcaccagtgtgggaaggggcttctcatccactgccaggctggggtgtcccgctccgccaccatcgtcatcgcttacttgatgaagcacactcggatgaccatgactgatgcttataaatttgtcaaaggcaaacgaccaattatctccccaaaccttaacttcatggggcagttgctagagttcgaggaagacctaaacaacggtgtgacaccgagaatccttacaccaaagctgatgggcgtggagacggttgtgtgacaatggtctggatggaaaggattgctgctctccattaggagacaatgaggaaggaggatggattctggttttttttctttctttttttttttgtagttgggagtaagtttgtgaatggaaacaaacttgtttaaacactttatttttaacaagtgtaagaagactataacttttgatgccattgagattcacctcccacaaactgacaaattaaggaggttaaagaagtaatttttttaagccaacaataaaaatataatacaacttgtttctcccccttttccttttaagctatttgtagagtttatgactaaatagtctgtgcaggttcatagaccgaagatactacacactttaaaccaattaaaaagaaccaaaagtaaatagaaaagacattgaatcaccaaggcctgggatcaacctgggctgtccacacagaaaacaaaaacccaaccaaaccaagccctgttgtgctcactggtgcaaagagaagatcagggcagcttaagtggtctaagaatccttcaggcattctttaaggagaaaaaggatacctttgattttgtgtgtttcatgctctggattttttttttttttccttctctgggtttaagagattttttttgaaatagtgaggaactgaccattatatgccttcactggcttcttgtgcaataatatgatgttttaagtgtgcaaacaagttagagctggcagctgaatgatagacaaatagtgcaaatttgccagcttggagatagaaaggaattcaacaatatatcaaatactttccttcccacctttttccttttttttttttttttctgatttgattctggttacagtgccataaaccttgttacatatgtatatcagaatgtaagaaaaaaaaatttatttaaaaatatttttcgcaaaaaaaaaaaaaatcttggtgtgtttctgttgattgtgtaaaaatttattttcattatataaatgaaactgg

SEQ ID NO: 2925 - DNA, 1765 bp, Homo sapiens
ttacatttacagtgtagcaaaagagaaagtaactatgttgctgctggagatcaatgaagccgagtgaatgggggctgaatgtgcgagtccatagctgaagaggagcgccagatggtggaggaatacacttatttatgaagtggacttagtagttttaagcagaaccatgaaaacctctgtgacaactccctccagctccaagagtgccgggaggtggggggcggcgcatccgcggcctcgagcttgctacctcagcccatccccaccacccctgacatcgagaacgctgagctcacccccatcttgcccttcctgttccttggcaatgagcaggatgctcaggacctggacaccatgcagcggctgaacatcggctacgtcatcaacgtcaccactcatcttcccctctaccactatgagaaaggcctgttcaactacaagcggctgccagccactgacagcaacaagcagaacctgcggcagtactttgaagaggcttttgagttcattgaggaagctcaccagtgtgggaaggggcttctcatccactgccaggctggggtgtcccgctccgccaccatcgtcatcgcttacttgatgaagcacactcggatgaccatgactgatgcttataaatttgtcaaaggcaaacgaccaattatctccccaaaccttaacttcatggggcagttgctagagttcgaggaagacctaaacaacggtgtgacaccgagaatccttacaccaaagctgatgggcgtggagacggttgtgtgacaatggtctggatggaaaggattgctgctctccattaggagacaatgaggaaggaggatggattctggttttttttctttctttttttttttgtagttgggagtaagtttgtgaatggaaacaaacttgtttaaacactttatttttaacaagtgtaagaagactataacttttgatgccattgagattcacctcccacaaactgacaaattaaggaggttaaagaagtaatttttttaagccaacaataaaaatataatacaacttgtttctcccccttttccttttaagctatttgtagagtttatgactaaatagtctgtgcaggttcatagaccgaagatactacacactttaaaccaattaaaaagaaccaaaagtaaatagaaaagacattgaatcaccaaggcctgggatcaacctgggctgtccacacagaaaacaaaaacccaaccaaaccaagccctgttgtgctcactggtgcaaagagaagatcagggcagcttaagtggtctaagaatccttcaggcattctttaaggagaaaaaggatacctttgattttgtgtgtttcatgctctggattttttttttttttccttctctgggtttaagagattttttttgaaatagtgaggaactgaccattatatgccttcactggcttcttgtgcaataatatgatgttttaagtgtgcaaacaagttagagctggcagctgaatgatagacaaatagtgcaaatttgccagcttggagatagaaaggaattcaacaatatatcaaatactttccttcccacctttttccttttttttttttttttctgatttgattctggttacagtgccataaaccttgttacatatgtatatcagaatgtaagaaaaaaaaatttatttaaaaatatttttcgcaaaaaaaaaaaaaatcttggtgtgtttctgttgattgtgtaaaaatttattttcattatataaatgaaactgg

SEQ ID NO: 2926 - DNA, 668 bp, Homo sapiens
gcaaggcgggggctgagctgcgccggccggaaacccagcaggcggcgaagatggcggagaacagcggtcgcgccggcaagagcagcgggagcggcgcggggaagggggcggtgtccgcagagcaggtgattgctggcttcaaccgccttcggcaggaacagcgaggcctggcatccaaagcagctgagttggagatggagttgaatgagcacagcctagtgatcgatacactgaaggaggtagatgaaactcgtaagtgctaccgcatggttggaggagtgctggtggagcgaactgtcaaagaggtgctgcccgctttggagaacaacaaggagcagatacagaagatcattgagacactgacacagcagcttcaggcaaagggaaaagaactaaatgaattccgggaaaagcacaacattcgtctcatgggagaagatgagaagccagcagccaaggaaaactcagaaggggctggggctaaggccagctcagctggagtgttggtctcctagggaccaaggcctttgcatttttttctaccctgactcccacttctaatttctctttattgttattattattattttctctgctattgtaatatttttttgttaattaaatgttttggtcagaatcttaaaaaaaaaaaaaaaaaaaaaaaaaaa

SEQ ID NO: 2927 - DNA, 999 bp, Homo sapiens
tttttttggcggtataaaagtgcttctttatttggtcatacagctttcaaatgttgcttaacgaacagatagcatttttataatcagaggaaagactcagtattaaagtgcgcgtcccatcattgcaaccgggccctcgggcagccagctctctcttgcttcgcgtccggctctcaggccctggagctcggcctccctaccttctccaggcgcgggtcctgctccttttccggccgcccttcctcagcccccggctcggacactctgcaggagaccaagagaagggggaaatggggctgggggccgtccccgggagacaggcggccttccgagagggactggagcaggccgtgcggtatgccaaagccctgggctgtcccaggatccacctgatggctggccgagtaccccagggagctgatcgaatagcagtcaaggctgagatggaggccgtttttctggagaacctgaggcatgcagctggggttttggctcaggaggacctcgtgggactgctggagcccatcaacacccgcatcactgacccccagtacttcctggacacgccccagcaggcggcagccatcttacagaaggtaggaagacccaacctccaattacaaatggacatattccactggcagatcatggatgggaacctgacaggaaacatccgggagttcctgcccattgttgggcatgtgcaggtggcacaggtcccaggccgaggggagcccagcagccccggagagctgaatttcccctatctgtttcaactgctggaagatgaaggctacaaaggcttcgtgggctgtgagtatcagcctcgaggagacacagtagagggcttgagttggctacgttcatactgggataggcggggccacccagaggctggccagtgagggcccgcacaccacccacgtgcctccagacagcgagtgacatcccatctcctcctctgcattaaagatgacctgctgaaaaaaaaaaaaaaaa

SEQ ID NO: 2928 - DNA, 3106 bp, Homo sapiens
tctgcttccggggcgcgggtgacgcgacgacggcgacactttgctacggagtgcatcggacgtcgaagcctagagtctctgcgtctttccctcttccgctgcctcattcctttccttcctagccttggtcgtcgccgccaccatgaacaagaagaagaaaccgttcctagggatgcccgcgcccctcggctacgtgccggggctgggccggggcgccactggcttcaccacgcggtcagacattgggcccgcccgtgatgcaaatgaccctgtggatgatcgccatgcacccccaggcaagagaaccgttggggaccagatgaagaaaaatcaggctgctgacgatgacgacgaggatctaaatgacaccaattacgatgagtttaatggctatgctgggagcctcttctcaagtggaccctacgagaaagatgatgaggaagcagatgctatctatgcagccctggataaaaggatggatgaaagaagaaaagaaagacgggagcaaagggagaaagaagaaatagagaaatatcgtatggaacgccccaaaatccaacagcagttctcagacctcaagaggaagttggcagaagtcacagaagaagagtggctgagcatccccgaggttggcgatgccagaaataaacgtcagcggaacccacgctatgagaagctgacccctgttcctgacagtttctttgccaaacatttacagaccggagagaaccatacctcagtggatccccgacaaactcaatttggaggtcttaacacaccctatccaggtggactaaacactccatacccaggtggaatgacgccaggactgatgacacctggcacaggtgagctggacatgaggaagattggccaagcgaggaacactctgatggacatgaggctgagccaggtgtctgactccgtgagtggacagaccgtcgttgaccccaaaggctacctgacggatttaaattccatgatcccgacacacggaggagacatcaatgatatcaagaaggcgcgactgctcctcaagtctgttcgggagacgaaccctcatcacccgccagcctggattgcatcagcccgcctggaagaagtcactgggaagctacaagtagctcggaaccttatcatgaaggggacggagatgtgccccaagagtgaagatgtctggctggaagcagccaggttgcagcctggggacacagccaaggccgtggtagcccaagctgtccgtcatctcccacagtctgtcaggatttacatcagagccgcagagctggaaacggacattcgtgcaaagaagcgggttcttcggaaagccctcgagcatgttccaaactcggttcgcttgtggaaagcagccgttgagctggaagaacctgaagatgctagaatcatgctgagccgagctgtggagtgctgccccaccagcgtggagctctggcttgctctggcaaggctggagacctatgaaaatgcccgcaaggtcttgaacaaggcgcgggagaacattcctacagaccgacatatctggatcacggctgctaagctggaggaagccaatgggaacacgcagatggtggagaagatcatcgaccgagccatcacctcgctgcgggccaacggtgtggagatcaaccgtgagcagtggatccaggatgccgaggaatgtgacagggctgggagtgtggccacctgccaggccgtcatgcgtgccgtgattgggattgggattgaggaggaagatcggaagcatacctggatggaggatgctgacagttgtgtagcccacaatgccctggagtgtgcacgagccatctacgcctacgccctgcaggtgttccccagcaagaagagtgtgtggctgcgcgccgcgtacttcgagaagaaccatggcactcgggagtccctggaagcactcctgcagagggctgtggcccactgccccaaagcagaggtgctgtggctcatgggcgccaagtccaagtggctggcaggggatgtgcctgcagcaaggagcatcctggccctggccttccaggccaaccccaacagtgaggagatctggctggcagccgtgaagctggagtccgagaatgatgagtacgagcgggcccggaggctgctggccaaggcgcggagcagtgcccccaccgcccgggtgttcatgaagtctgtgaagctggagtgggtgcaagacaacatcagggcagcccaagatctgtgcgaggaggccctgcggcactatgaggacttccccaagctgtggatgatgaaggggcagatcgaggagcagaaggagatgatggagaaggcgcgggaagcctataaccaggggttgaagaagtgtccccactccacacccctgtggcttttgctctctcggctggaggagaagattgggcagcttactcgagcacgggccattttggaaaagtctcgtctgaagaacccaaagaaccctgggctgtggttggagtccgtgcggctggagtaccgtgcggggctgaagaacatcgcaaatacactcatggccaaggcgctgcaggagtgccccaactccggtatcctgtggtctgaggccatcttcctcgaggcaaggccccagaggaggaccaagagcgtggatgccctgaagaagtgtgagcatgacccccatgtgctcctggccgtggccaagctgttttggagtcagcggaagatcaccaaggccagggagtggttccaccgcactgtgaagattgactcggacctgggggatgcctgggccttcttctacaagtttgagctgcagcatggcactgaggagcagcaggaggaggtgaggaagcgctgtgagagtgcagagcctcggcatggggagctgtggtgcgccgtgtccaaggacatcgccaactggcagaagaagatcggggacatccttaggctggtggccggccgcatcaagaacaccttctgattgagcggttgccatggccggtctccgtggggcagggttgggccgcatgtggaagggctctgagctgtgtcctccttcattaaaagtttttatgtctcgtgtcagaaaaaaaaaaaaaaaaaaaaaaaaaaaaaaaaa

SEQ ID NO: 2929 - DNA, 3088 bp, Homo sapiens
cgcgccagggaggttgtcgggaggggccggcgaataaaacgagcggcgaaagaaccgaaaaaaggctcgacgctaccgtgtatgaggaactttgatccttgcgggccaccattccggaagtagaatttagaggaagaaaataccggagttgcagggtataggtaaatttctcaaggttataggttggggttcttagaactttttgtggtgtgtgttggcctagagcgactcagaagcgttagtgacttcacctaaaaaagctaacctctctgctgagcgcgaccggtatgcggcgcaggatgagcctcagggcttctgttaagagtctgtctgagaaagccggtctgcgctgttcctcggtggcgaccttaattatgagatgagctaatgctttactgacttaaccatggcgcagcgggcagtgtggctcataagccacgaaccgggaactccactttgtggcaccgtgagattctccagacggtatccaactgttgaaaaacgagccagagtcttcaatggagcaagttatgtgcctgttcctgaagatggtccctttcttaaagcactgctctttgaacttagattattggatgatgataaagacttcgttgagagtcgtgatagctgttcacgcatcaataaaacatccatttatggactcctgataggaggtgaagaactctggccagttgttgcttttctgaagaatgacatgatatatgcttgtgttccactagttgaacaaactctgtcccctcgtccgccactaattagtgtcagtggagtttcacaaggctttgaatttctttttgggatacaggattttctttattcaggtcaaaaaaatgactctgagctgaatacaaaattgagccagttgcctgacttgcttctgcaggcttgtccatttggtactttattagatgccaacttacagaattcattagataataccaattttgcatctgtgactcagccacagaaacagccagcttggaaaactgggacgtacaaaggaaaaccacaagtttctatttctatcactgaaaaggtaaaatccatgcaatatgataaacagggtatagcagatacatggcaagttgttggaacagtgacttgcaagtgtgatttggaaggaatcatgccaaatgttaccatcagcttgagtctccccaccaatggatctccacttcaggatattctagttcacccttgtgtaacttctcttgactctgcaattctgacttctagtagtattgatgcaatggatgactctgcatttagtgggccttacaaatttccattcactccacctttagagtcattcaacttatgcttctacacttcccaggtccctgccccaccaattttgggtttttatcaaatgaaggaggaagaagtacaactaagaataaccattaatttaaaacttcatgaaagtgtgaaaaataattttgaattctgtgaagcccatatacctttttacaatagaggtccaattacacatttggaatacaaaactagttttggccagcttgaagtatttcgagagaaaagcttattgatctggattattggccagaagttcccaaaatcaatggaaattagtctttctggaactgtaacttttggagccaagagccatgagaagcagccatttgacccaatttgtactggagaaacagcatatttaaagcttcattttaggatcttagattacacacttactggatgttatgcagatcagcattcagttcaagtttttgcatcaggaaaaccaaaaataagtgcacaccggaaactaatttcttctgattattacatctggaattctaaagcccctgctccagtaacatatggatcattattattgtaatagtctcatgtttaaatgggattatataatgataacagtttaaagaaaatcataatcttatatttttaatgtggatgcatataacctgtgagtgaaaaatcactgaatgatttaattgtaaaagtagtcttatgtggtgtttgtagtctgatagagcttgaaaggacattttaaaagctaatgtctccaattttgtcaaccttcgattttatgccagtataattcagaacatagaaaagtaatgattcacttgggctcattttagactggtcctgggtcaccctgccacacttgtttcctagtgtttctgtggcagacattgctaatcaattacagcccttttctgtactgagccttggataaagggtcaggctcctttttagttcagagattcaggcagccactcccagtgggttgtagataatgtgcaagataaaaactattttctcttccaaatctaagtactaagctcctagtataaggtgttgttacagaataccagagaccatgttagagacaactacatctcttcaaaaaacagccaacagagacaaaggaaaagtgtttaaatagtaagctgttcttcttaatcagaactatcctattgactaataaataatctgcataattctacttaaggtgtgtaatctctgttctagagttagtttttaagtaagcttgttaatctgccactttgacattttgcttaggatgtcagtagccatattaagatgtgtagaataccttcagaagatgatcatagtgttttgtaatcatttaatgtctgcagccaaatttttaaaggtaatttagacctaatactgctcttgctgtgtcttattaagttaaaattaatgaatgaattctggtaaaaattcaaaaggcactctgtgagtagagagtatcatttaagcttattttagtcacatgtagtatatatctccttaaagctgtcactctcactttcttaccattctcttgatttcttcagaaaccatctagtcatcatctttatactctacctgcttctgcaattatatatcatattatgttttcagagcagttcattgtcaagttggactttaagtgaccattcaagaaaagatgaaatctcacgaacctcaaaacttcattcatgtctttttacaaatgagaaaaaaaaatgcattaaagattaatactcaatttgaaaaaaaaaaaaaaaaaaaa

SEQ ID NO: 2930 - DNA, 5220 bp, Homo sapiens
ggcctcgcctgcggccgctccctccgcctcctccccgccccgagccccagtcagcccgtcttccttcccctcccttgcatgatggaaacaccatggctgcggcggcccagctctctctgacacagttatcaagtgggaatcctgtatatgaaaaatactatagacaggttgatacaggcaatactggaagggtgttggcttctgatgctgctgctttcctgaaaaaatcagggcttccagacttgatacttggaaagatttgggatttagccgacacagatggcaaaggtatcctgaacaaacaagaattctttgttgctttgcgtcttgtggcatgtgcccagaatggattggaagtttcactaagtagtttgaacctggctgttcctccaccaagatttcatgataccagtagtcctttgctaatcagtggaacctctgcagctgagctcccatgggctgtaaaacctgaagataaggccaaatatgatgcaatatttgatagtttaagcccagtgaatggatttctgtctggtgataaagtgaaaccagtgttgctcaactctaagttacctgtggatatccttggaagagtttgggagttgagtgatattgaccatgatggaatgcttgacagagatgagtttgcagttgccatgtttttggtatactgtgcactggagaaagaacctgtgccaatgtccttgcctccagccttggtgccaccatctaagagaaaaacgtgggttgtatcccctgcagaaaaagctaaatatgatgaaatcttcctgaaaactgataaagatatggacggatttgtgtctggattggaggtccgtgaaatattcttgaaaacaggtttaccttctaccttactagcccatatatggtcattatgcgacacaaaggactgtgggaagctttcaaaggatcagtttgccttggcttttcacttaatcagtcagaagttaatcaagggcattgatcctcctcacgttcttactcctgaaatgattccaccatcagacagggccagtttacaaaagaacatcataggatcaagtcctgttgcagatttctctgctattaaggaactagatactcttaacaatgaaatagttgacctacagagggaaaagaataatgtggaacaggaccttaaggagaaggaagatactattaaacagaggacaagtgaggttcaggatcttcaagatgaagttcaaagggagaatactaatctgcaaaaactacaggcccagaaacagcaggtacaggaactccttgatgaactggatgagcagaaagcccagctggaggagcaactcaaggaagtcagaaagaaatgtgctgaggaggcccaactgatctcttctctgaaagctgaattaactagtcaggaatcgcagatctccacttacgaagaagaattggcaaaagctagagaagagctgagccgtctacagcaagaaacagcagaattggaggagagtgtagagtcagggaaggctcagttggaacctcttcagcagcacctacaagattcacaacaggaaattagttcaatgcaaatgaaactgatggaaatgaaagatttggaaaatcataatagtcagttaaattggtgcagtagcccacacagcattcttgtaaacggagctacagattattgcagcctcagcaccagcagcagtgaaacagccaaccttaatgaacatgttgaaggccagagcaacctagagtctgagcccatacaccaggaatctccagcaagaagtagtcctgaactactgccttctggtgtgactgatgaaaatgaggtgactacagctgttactgaaaaagtttgttctgaactcgacaataatagacattcaaaagaggaagatccatttaatgtagactcaagttcgctgacaggtccagttgcagatacaaacttggattttttccagtctgatccttttgttggcagtgatcctttcaaggatgatccttttggaaaaatcgatccatttggtggtgatcctttcaaaggttcagatccatttgcatcagactgtttcttcaggcaatctactgatccttttgccacttcaagcactgaccctttcagtgcagccaacaatagcagtattacatcggtagaaacgttgaagcacaatgatccttttgctcctggtggaacagttgttgcagcaagcgattcagccacagacccctttgcttctgtttttgggaatgaatcatttggaggtggatttgctgacttcagcacattgtcaaaggtcaacaatgaagatccttttcgttcagccacatcgagctctgtcagcaacgtagtgattacaaaaaatgtatttgaggaaacatcggtcaaaagtgaagatgaacccccagcactgccaccaaagatcggaactccaacaagaccctgccctctaccacctgggaaaagatccatcaacaaattggattctcctgatccctttaaactgaatgatccatttcagcctttcccaggcaacgatagccccaaagaaaaagatcctgaaatattttgtgatccattcacttctgctactaccactaccaataaagaggctgatccaagcaattttgccaacttcagtgcttatccctctgaagaagatatgatcgaatgggccaagagggaaagtgagagagaggaagagcagaggcttgcccgactaaatcagcaggaacaagaagacttagaactggctattgcactcagcaaatctgagatatcagaagcatgaagaattctcttgttctttggcaacaatatagtattcttcttcctgaatactgaaactatttacaatgtgtatcaaaactacctgtgagcatgggaatacaaaaggtttgagattcctgtaaatgtgacaaaattttaggattttttttttttcttcattacagattcgtctttttttttttttcttataaaagccgtaacccagtcagacaaattcaccttcacttaggcccctgttctggtatacatttactgtgagcttttgcctgcctgtgctattttacttgtaaagctagagcacccaagcttctgccttctggaatatagagaaatagtttcaccctgcactaccctgttctgtagttattctgatgatagccagtgaggttcttaaagtttgcagtattctcccctgattggaatggttgagtgagggtaagggaaagaatatcttatttcttttatgattggtgcaaattggctaaagtgcatttttaaatttcctctacttaatttgtttttcagagataaggaaaaatattttgcacagatttactccactatggaaaagggatgctgtaggttgaaccattatagcctcagattcgatcttttcctaactaaaaatattaaagcctcatgtgtgaaataaatttttaaaaagatttatctggatttagagaattttagatcaacagatacctctcagtgtgtttgctaattaataaaaatcagtttcttacaaataaagtttgtaagaaaatgttcattttaagtgatagatagtggagaaaatttatcacctaaaatatacccatcagtataaggcaagcaaaagtcttaacatggcagccattctgcctttgccgtggccctgtcctgtttagttcttagtgggttaatttttgtacttttgcagaagaaacttcagcaagctagaactggaaggtactttaatttttcatatatatttgtttttttttttttaatgaaggctcatttacttgaaatgtaaaaactttcactgaatacaaatagaaaaagtgatgtgttttatatcatattgctttttgtccatctttgtggtttagtttatttactcacttcatgtttttcacctataaaattgtcaagctagcaaaaaaactcttgtttttttaattgggagagaagagacctgccagattatcagacctcttcatgttaaaagaccatctcctgtaaaactgacctagtggacaagctgaatttgaaatagactgtgaagtaagctgtaacttgtcattttaattttgtttaacacggttactgacttagatgatgtattaaataccaagataaagaaaaatgcacctaaaatctaattagaattctctgggtcaacaagtcaaggtggtattgatctgtgttaatctgagtaacttattgcctagcctataaataaattccaaaatatccaattcatttcttcttgaaatggtgcttgttttgttttctttccattacacaattagactcctacagtttaaaacaaactttaaaccactatcttgcactgctaacttttttctacctttgtaaatagaaacatttctgcataaaagtcatacatatgaagcaagggctgaatcataatcacaaggcttaattttgataaacgaatccagtgacctaaggattttctgcaaaatttgactgggagttgtgataggtggtatttttgtttattttcttcctcttactccttaggataaaggtaagttgacttgaacaactttcttttgcactgggaaaataagcaaatgtttaaatgcttcaaaaaaattttcaattaaactcaaatattaaatatctataacttataaacaccaactttcaatgtaataaatgtatcctaatcttatgtatgtttaactggattacatagatttttatcttttgttaaaatgtgtataccccgtggaccaacataatattaaagtatgtatatattatataaatatatatgtatatgtgctcgcttgtgtaggatgaatgtcttagagtcgtttgtggtattttatgttgttgactctggctccagggcctgtgcttgaaaaggacagataagtattgcccagagctaagtggcactacttacaaagttttaaatgtcttctacatactgattcatgtttatttgagctctctttatagaattttctcttaaagtttcaaacctctaagttgtagcctgtaattatgagaacagtaaactttaagtaataataaagaatcccatccatatatccaatttgcaattgagttttgcatggttctctgattatgtccatgctgtgtccaaggaggagtaggtacatacaatcagcacagattaatatatgtaaagggtttgggacagcacctggtatagaataaataataaatgtaaactatta

SEQ ID NO: 2931 - DNA, 2945 bp, Homo sapiens
gccgggccgcggctctcgccgcccagcccagcccagcccggcccggcccggccctgccgcggaggcgaggccgccagtgtcccgcgcccctgatatctgcagtgagcctgatacctgcctctgcccttctgagcctgttcctcttccctgagtacagggcacaaagcttgcgccctgaggggcggccggcgcgctccctggcccggtccccgcccggccccgggccccccgcccctccccgacccggggccggggcccctgccgccgccgccgccgccttccgacccctgcgccccggccccggtcccccgggccatgcagcctcggccccgcgggcgcccgccgcgcacccgaggagatgaggctccgcaatggcaccttcctgacgctgctgctcttctgcctgtgcgccttcctctcgctgtcctggtacgcggcactcagcggccagaaaggcgacgttgtggacgtttaccagcgggagttcctggcgctgcgcgatcggttgcacgcagctgagcaggagagcctcaagcgctccaaggagctcaacctggtgctggacgagatcaagagggccgtgtcagaaaggcaggcgctgcgagacggagacggcaatcgcacctggggccgcctaacagaggacccccgattgaagccgtggaacggctcacaccggcacgtgctgcacctgcccaccgtcttccatcacctgccacacctgctggccaaggagagcagtctgcagcccgcggtgcgcgtgggccagggccgcaccggagtgtcggtggtgatgggcatcccgagcgtgcggcgcgaggtgcactcgtacctgactgacactctgcactcgctcatctccgagctgagcccgcaggagaaggaggactcggtcatcgtggtgctgatcgccgagactgactcacagtacacttcggcagtgacagagaacatcaaggccttgttccccacggagatccattctgggctcctggaggtcatctcaccctccccccacttctaccctgacttctcccgcctccgagagtcctttggggaccccaaggagagagtcaggtggaggaccaaacagaacctcgattactgcttcctcatgatgtacgcgcagtccaaaggcatctactacgtgcagctggaggatgacatcgtggccaagcccaactacctgagcaccatgaagaactttgcactgcagcagccttcagaggactggatgatcctggagttctcccagctgggcttcattggtaagatgttcaagtcgctggacctgagcctgattgtagagttcattctcatgttctaccgggacaagcccatcgactggctcctggaccatattctgtgggtgaaagtctgcaaccccgagaaggatgcgaagcactgtgaccggcagaaagccaacctgcggatccgcttcaaaccgtccctcttccagcacgtgggcactcactcctcgctggctggcaagatccagaaactgaaggacaaagactttggaaagcaggcgctgcggaaggagcatgtgaacccgccagcagaggtgagcacgagcctgaagacataccagcacttcaccctggagaaagcctacctgcgcgaggacttcttctgggccttcacccctgccgcgggggacttcatccgcttccgcttcttccaacctctaagactggagcggttcttcttccgcagtgggaacatcgagcacccggaggacaagctcttcaacacgtctgtggaggtgctgcccttcgacaaccctcagtcagacaaggaggccctgcaggagggccgcaccgccaccctccggtaccctcggagccccgacggctacctccagatcggctccttctacaagggagtggcagagggagaggtggacccagccttcggccctctggaagcactgcgcctctcgatccagacggactcccctgtgtgggtgattctgagcgagatcttcctgaaaaaggccgactaagctgcgggcttctgagggtaccctgtggccagccctgaagcccacatttctgggggtgtcgtcactgccgtccccggagggccagatacggccccgcccaaagggttctgcctggcgtcgggcttgggccggcctggggtccgccgctggcccggaggccctaggagctggtgctgcccccgcccgccgggccgcggaggaggcaggcggcccccacactgtgcctgaggcccggaaccgttcgcacccggcctgccccagtcaggccgttttagaagagcttttacttgggcgcccgccgtctctggcgcgaacactggaatgcatatactactttatgtgctgtgttttttattcttggatacatttgattttttcacgtaagtccacatatacttctataagagcgtgacttgtaataaagggttaatgaagtgtgtgcctcaaatgtgagcgccctgggcatctccctctgccctgcggttggcttcatttggtctgtgccccaacatgccaactaagcctggcactgggcctccccagccagcatcagcagcgacctttccctgctaagtcaaggagccagcctggcctgcaggcgcggggtccagcccctggctgtgcagctgcagtgccacctcggcgccagcgtaccccccttcctaggatcaggccgcaaagtctgtcactggtgaaaccagctcagaatctgggaccacaatgcctatagcaggtcccccgaatgtctcccccatgtccaaggcctgcgatgaggccttcccttagctcctcaagctgaaggcatttcccagcctccttgttcccctccgtgtgtctcagcttggtcctcatcctgggtccccgacactcctctggcacattagggtctcccgctcacctcagggcctttgcacacactgttgcccctccttggaaagct

SEQ ID NO: 2932 - DNA, 3592 bp, Homo sapiens
gtgactgaactttgcctgatcatgaccttgatcatgcacagggctgctggtggggtgaggccatcccacgcaactctggggtctgtgaagccaccaaggatcaaggaatggaagagctgcctgagtgtagagggagttcggtcaggcttcttaaacttggagacttggaaacagaaggccttgtaggccacataggttttcagagactcgcctggcagaggcctggagcgtcctgctgcgtggactgtgggcaccgagccaccaggaggttgttgatctcattcttgctcactggtccctgccagactggtggtgcctctctactgtcgggcagccccacctctgtgctgccccatccacctacagccctcatgcctgggcccagctggaggttctgacaggggccccctggggtggcatgcggacccttcagggtgccccaggcgcagcacaggtctccagagacacaggcaccagggcgttcagagctagtcccctcgctgctgttgactgtccttgagcagccccagggccggtttctcaacctcatttgctcacctgagcaatgaagtgaggtgggctcctggaactgcagcagccaccccccggggccatcgtgaggctaagaatccagtgcagggtgagcaaccagcgaccgctacaaggacagtgaagagctagcaccaggaccttgggtagcccacccgctggagggagcgtgtgctgcaaaaagcaagagtgggctttggaggccaacggatggagcggattcagtctgaggctgttccagcccttgcttaggatccacctacctaggtctggaaatcgtatttccacttcagatgccttctcagaggataaaataacccccggtgggggagagtactggaagagggctaattcccctggttttctccccatgagcattagtgtcagtgtaattttagagtgaccccagctatgtcacgtgtggcaggcacaagaacagatgtcaatgagctattgcagaggtggacacccagatgtgtgcgctggcacactggaggggcccgtagggtggctctagaccgccccctcgtgacggcttgcctaccacctgcaggcgacgttgtggacgtttaccagcgggagttcctggcgctgcgcgatcggttgcacgcagctgagcaggagagcctcaagcgctccaaggagctcaacctggtgctggacgagatcaagagggccgtgtcagaaaggcaggcgctgcgagacggagacggcaatcgcacctggggccgcctaacagaggacccccgattgaagccgtggaacggctcacaccggcacgtgctgcacctgcccaccgtcttccatcacctgccacacctgctggccaaggagagcagtctgcagcccgcggtgcgcgtgggccagggccgcaccggagtgtcggtggtgatgggcatcccgagcgtgcggcgcgaggtgcactcgtacctgactgacactctgcactcgctcatctccgagctgagcccgcaggagaaggaggactcggtcatcgtggtgctgatcgccgagactgactcacagtacacttcggcagtgacagagaacatcaaggccttgttccccacggagatccattctgggctcctggaggtcatctcaccctccccccacttctaccctgacttctcccgcctccgagagtcctttggggaccccaaggagagagtcaggtggaggaccaaacagaacctcgattactgcttcctcatgatgtacgcgcagtccaaaggcatctactacgtgcagctggaggatgacatcgtggccaagcccaactacctgagcaccatgaagaactttgcactgcagcagccttcagaggactggatgatcctggagttctcccagctgggcttcattggtaagatgttcaagtcgctggacctgagcctgattgtagagttcattctcatgttctaccgggacaagcccatcgactggctcctggaccatattctgtgggtgaaagtctgcaaccccgagaaggatgcgaagcactgtgaccggcagaaagccaacctgcggatccgcttcaaaccgtccctcttccagcacgtgggcactcactcctcgctggctggcaagatccagaaactgaaggacaaagactttggaaagcaggcgctgcggaaggagcatgtgaacccgccagcagaggtgagcacgagcctgaagacataccagcacttcaccctggagaaagcctacctgcgcgaggacttcttctgggccttcacccctgccgcgggggacttcatccgcttccgcttcttccaacctctaagactggagcggttcttcttccgcagtgggaacatcgagcacccggaggacaagctcttcaacacgtctgtggaggtgctgcccttcgacaaccctcagtcagacaaggaggccctgcaggagggccgcaccgccaccctccggtaccctcggagccccgacggctacctccagatcggctccttctacaagggagtggcagagggagaggtggacccagccttcggccctctggaagcactgcgcctctcgatccagacggactcccctgtgtgggtgattctgagcgagatcttcctgaaaaaggccgactaagctgcgggcttctgagggtaccctgtggccagccctgaagcccacatttctgggggtgtcgtcactgccgtccccggagggccagatacggccccgcccaaagggttctgcctggcgtcgggcttgggccggcctggggtccgccgctggcccggaggccctaggagctggtgctgcccccgcccgccgggccgcggaggaggcaggcggcccccacactgtgcctgaggcccggaaccgttcgcacccggcctgccccagtcaggccgttttagaagagcttttacttgggcgcccgccgtctctggcgcgaacactggaatgcatatactactttatgtgctgtgttttttattcttggatacatttgattttttcacgtaagtccacatatacttctataagagcgtgacttgtaataaagggttaatgaagtgtgtgcctcaaatgtgagcgccctgggcatctccctctgccctgcggttggcttcatttggtctgtgccccaacatgccaactaagcctggcactgggcctccccagccagcatcagcagcgacctttccctgctaagtcaaggagccagcctggcctgcaggcgcggggtccagcccctggctgtgcagctgcagtgccacctcggcgccagcgtaccccccttcctaggatcaggccgcaaagtctgtcactggtgaaaccagctcagaatctgggaccacaatgcctatagcaggtcccccgaatgtctcccccatgtccaaggcctgcgatgaggccttcccttagctcctcaagctgaaggcatttcccagcctccttgttcccctccgtgtgtctcagcttggtcctcatcctgggtccccgacactcctctggcacattagggtctcccgctcacctcagggcctttgcacacactgttgcccctccttggaaagct

SEQ ID NO: 2933 - DNA, 3156 bp, Homo sapiens
ttgagtcctgccctgggagggacagtatctgtttagatttgcgtctaaatttaaaccctgatcgtcggcctccctccccgctccccaccctcccctcccctccccttcctccctccctccctcctcctccttcctcgttctctcgcgcagggcccccgcggccggggcagtcccgcagccgagcgcagccgggcgcgcgccaccgcccactcgccctgtgcccgccgcagcccgaaactggccacggccgggaacggaggggacagcggggatcgtgagctccggcccgggcgagcgggtgcgtctgccgcagagtcggcacctgaaggacatggaggaaagaccggcagagaccaatgccaatgtggacaactcggcgtccccctcggtggcccagctggccgggcggtttagggagcaggcggctgcagccaaggagacaccagccagtaaaccaacccgaaggaaaccggcctgttccctccccctgttcccccccaaggtagacctgggccagaatggtgaggagaaatcaccacccaatgcgagccagcctcctaaattcaaggtcaagagctcgcctctgattgagaagcttcaggccaatttaacctttgagccagctgctctactgcctggggcctcacccaagagtcctggactcaaggctatggtgtcgccatttcacagcccaccttctacccccagcagccctggtgtgcgatctaggcccagcgaggcagaggaggtgcctgtcagcttcgaccagccccctgaaggcagtcatctgccctgttacaacaaggtgcggacgaggggctcaataaaaaggcgccctccctccaggcgattccgaaggtcacagtcagactgtggagaacttggagatttcagggcggtggagtcatctcagcagaacggtgctaaggaagaggatggggatgaagtgttgccatccaagagcaaggccccaggatcccctttgtccagtgagggagcagcgggagagggagtgagaaccctgggacctgctgaaaagcctcctctgaggaggtcacccagcaggacagagaagcaggaggaggacagggccacagaggaagccaagaacggtgaaaaggccaggcggagttcagaggaggtggacggccagcacccggcccaagaggaggtcccggaatcgccccagacctctggcccagaggcagaaaataggtgtgggagccccagggaggaaaagccagctggagaggaagcagagatggaaaaggctacagaggtgaagggggagagggtgcaaaatgaagaggtgggacctgaacatgacagccaagaaacaaagaagctggaggagggagctgcagtgaaggagaccccccacagtccccctggaggagtgaagggcggagatgtccccaagcaggaaaaaggcaaggaaaaacaacaggagggggcagtgctcgagccaggctgcagcccccagaccggccctgcccagctggagaccagcagtgaggtccagagcgagccagcagtccccaagccggaggatgacactcctgtccaggacactaaaatgtgaagaacagctcattgtgccccagtgatgaagttgctggacacatctctttgcaggtagcagcaacagttgtagcagcagcagacgaagccattgcagaggcagaatatgctgagtgtctggagtcagcctgaagacacagggtggattatttcctggcctccacaccaaacgttcccttgcagatggagactgaatctgagggcagcagacttttatcagcttgagtttatgtcatttgatggacttggttcaacaacaagaacttacttaaaacaatgtactgtggtgatgagtcccaggggcactggtcagcctgtggagccctggatgctatccacacccacctatccctgcagctaatttagctgatctctaatttaactgagctctaatttagctgatcagattttgcttgggtaaagttcctttttaatgttctaaagtgtttacggttctcaaatatcagttaaaaactaattttaggtggccataaacataaaatagaaaccctgtaagttacagaagaccctaaattgtatcaaaaccctagagacaacttttcaatttgatccaaatttgaactggccaaccagtctttaaaacactggactagaagagataatgattgaaacatttaaaaaaaaaaagtgctccattcgcaggagcttttcctgtcctgtggttttccagttggtgaccaccatgggaggtcgctggctcggctcactcccttctcccacccttgagaatgtggagaactcccatggagaggcagaatggcaggaggtttcatgtcccgcgttgcatctcctcctgaaagaaaagcagtgatacctgaataatgctggctctccgattgatcctgtgaggatgaatttgcatttccagaatccttgagcatggattagatgtttcctgggaggtgccttgagtaccattatgtgcaagctacataattaaaacatttttcttagtttccctgggaagcttttcttgactcacagcccaggttcttctgcccaacacaaaaggagtgagttggggtctttagtctcttcttattgggtagctcttgctttaatattctgtttggtgagtgtaagggattctgcaagggacagggggcctgactacccagtctttgacttgtatcctctcccctcttcatacactcctgctgaaaaatgttaatccaaatacacatttaaacttagggtcggtccttattctgatttgagtattttaatgtctcagtgtgctgatttggtagttggaagaattattcttctggaggtctgttagactacatcctacactgacttcagaaaacagtctgtcagacaaaaaggccttatgtcaccactggtacctcagtttcctcatcccatttacagtttttctaactccagggtagtgtttagtgttaatatttgggatatattttttttcaaaactgtttttaagtagtttgtaatttgtaacaaacttgtaacctggttgggactgatattgtcatagctatgataaactttggatattagcagaatttgggaaaaaaaaaaaaaaaaaaaaaa

SEQ ID NO: 2934 - DNA, 1544 bp, Homo sapiens
gcgctcccggaacgcgcgcaccgcagacggcgcggatcgcagggagccggtccgccgccggaacgggagcctgggtgtgcgtgtggagtccggactcgtgggagacgatcgcgatgaacacggtgctgtcgcgggcgaactcactgttcgccttctcgctgagcgtgatggcggcgctcaccttcggctgcttcatcaccaccgccttcaaagacaggagcgtcccggtgcggctgcacgtctcgcggatcatgctaaaaaatgtagaagatttcactggacctagagaaagaagtgatctgggatttatcacatttgatataactgctgatctagagaatatatttgattggaatgttaagcagttgtttctttatttatcagcagaatattcaacaaaaaataatgctctgaaccaagttgtcctatgggacaagattgttttgagaggtgataatccgaagctgctgctgaaagatatgaaaacaaaatattttttctttgacgatggaaatggtctcaagggaaacaggaatgtcactttgaccctgtcttggaacgtcgtaccaaatgctggaattctacctcttgtgacaggatcaggacacgtatctgtcccatttccagatacatatgaaataacgaagagttattaaattattctgaatttgaaacaacatatttttatacttaatgaattgtatctcattaatctcttcccttacatcttcatgtattgttggtttgttttttggttttgggttttttttttttttttttggtataagaactaacatcaaaaggcctgtttaaagggaaaggttaatgggctacttaatattatgaacaaaacaaaaaaacaaggctgccacagtggaatattatcttacaagaataagaactacataaaacagatttgtaaaaaatacatatttgaagtattccctgtatttccattattctttatggaatataaagtaagcatgaaaggtagttaaaactttcaggtgcctgtagagtcataataactgtattttatgccttgcattcacgcaaattcacattggatgtgatttaaaagtagacattctctttttcctcttttaggatatgtttgattactggaaaattaatatggttatttgttagaagtctggtttataaaaaagccaaaagtgatggaatttattccatttgtcttaggaaggcccataatacttgtttttcttacatgtgactagcaactttctccacttaaagactaaatacctctttatatgatgtaaattattctaattcattttaaaatcttttaggtcagcaaaatgtgtgtcttcagtgctttctctaaaaacgttcctttatagctttgtacttttttttttagcgttgccattgaaagttaaaatgtttgcatggtttaccctctgagttatgtttcttctagtgagcatgcctgctgtcactaagtgaattatttactactttttgtaggtctatattttaataattattgggataataataaaaaaaaaaaaaaaaaa

SEQ ID NO: 2935 - DNA, 2570 bp, Homo sapiens
ggactcgagcgctccgattggagttagggcctgcttgtctgcgtgctgcgaagtccgcggctgcccccggggccctagtcgttgggttccagggtccttcacgttccattcccaggctggtctgagctccggggccgtggtcccgctgcctcctccggtcgtcgtgcggaagctgcgacgcaggcagaccatggcagagttctcccagaaacgggggaagcggcgtagcgacgaagggctgggcagcatggtggacttcctcctggccaatgcccgcctggtgctgggcgtgggcggggctgctgtgctgggcattgccaccctggccgtgaagcggttcattgacagggccactagcccgcgggatgaggatgacaccaaggcagacagctggaaggaactgagcctgctcaaggccacaccacacctgcagccccggcctccacctgctgcccttagccagccagtgttgcccttggccccctcgtcgtctgccccagaagggcctgcagaaactgatcctgaggtgacaccacagctcagctccccagcaccgctgtgtctgacactgcaggagaggctgctggccttcgagcgggaccgtgtgaccatcccagcagcccaggtggctttggccaaacagctggctggcgacatcgccctggagctgcaggcctactttcggagcaagttcccggaactgccctttggggcattcgtgcctggggggccgctctacgacgggctgcaggcgggggctgcggaccatgtgcgtctcctggtgccactggtgctggagccgggcctgtggagcctggtgccgggcgtggacactgtggcgagggaccctcgctgctgggccgtgcgcaggacgcagcttgagttctgcccccgtgggagcagcccctgggaccgcttcctggtcgggggctacctctcctcccgcgtcctgctggagctactccgcaaggcgctggctgcttctgtcaactggccggccattggcagccttctcgggtgcctgatccggcccagcatggcctcggaggagctgctgctcgaggtgcagcacgaacgcctggagctcactgtggctgtgcttgtggcagtccctggggtcgatgctgacgaccgcctcctcttggcctggcccctggaggggctggcggggaacctctggctgcaggacctgtatccagtggaggctgctaggctgcgagccctggacgaccatgacgctgggactcgccggcggctgctgctgctgctgtgtgctgtctgccgtggttgctcggctctggggcagctaggccggggtcacctgacccaggtggtcctgcgtctgggggaggacaacgtggattggacggaggaggccttgggtgagcgcttcctgcaagccctggagctgctcatcggcagcctggagcaggccagcctgccctgccacttcaaccccagcgtgaacctcttcagcagcttgcgtgaggaggagattgacgacattggctatgcgctatacagtggcctacaggagcccgaggggctgctctaggtgggtggaaacgggtggttgccatgttttctaatgctggggagctgcacccacctcccttccagggatttgaatagtggtttttctctagctttttgccagaacaaaggagggtacattacttaaacccagggcatcaggatgtgcttgggctatggtggccataaaccctgagcccagagagcttgggtcactgtcacctgagtgcagctgggctgcctcaggcagcttggagtgccagccattcctgcaagcaccgtttcagctcttggggccaaccccaggacctttggctctgtccatcaccagcaaccaatccaccaacagaatgtggtttctgccatcctgggcagaagctgaaggccagcttcacatttctgctgagagaaggtgacttaacgccttttccggccctagctccaggcgttttgaggcgtctggtgcctgatggtaggtatggtgtgtttgttctgtcccccaggggctggagtcacctggtgcccctgaaggacagatttttggctgttaaaggatggcattttcctgctgtcttctgtgcgtttagttttcttgctgagcgggagctcagtatgacttgccacccacctgatacctcagggcaaggccctttttccctccagccaggtgagtgttttcttcaggcagctgagggtcctgggggagctgaggctctgtgctgcacccccagcccacagctggggcatctcactggagctgttccaggccccactggagagcagaggacctgatcccccactagagaggtccggtgtgcacagccggcctcccagtgtgccaaaatgaactgctctcagctgatggctgtattctgactttgaagcctgttaagaggtagcaagggggctagaggagggagattccacctcccctcccaagtgaccctcctcctgcctctggtatccttccttttgaaacgaagctcagcttcgaagatgtgaacaagaataaaaggaaaaaattctaatgtatatat

SEQ ID NO: 2936 - DNA, 2458 bp, Homo sapiens
ctgaggcctgcgcgaccccgccagagatggggctgagtcccaatttagacaggcagaccatggcagagttctcccagaaacgggggaagcggcgtagcgacgaagggctgggcagcatggtggacttcctcctggccaatgcccgcctggtgctgggcgtgggcggggctgctgtgctgggcattgccaccctggccgtgaagcggttcattgacagggccactagcccgcgggatgaggatgacaccaaggcagacagctggaaggaactgagcctgctcaaggccacaccacacctgcagccccggcctccacctgctgcccttagccagccagtgttgcccttggccccctcgtcgtctgccccagaagggcctgcagaaactgatcctgaggtgacaccacagctcagctccccagcaccgctgtgtctgacactgcaggagaggctgctggccttcgagcgggaccgtgtgaccatcccagcagcccaggtggctttggccaaacagctggctggcgacatcgccctggagctgcaggcctactttcggagcaagttcccggaactgccctttggggcattcgtgcctggggggccgctctacgacgggctgcaggcgggggctgcggaccatgtgcgtctcctggtgccactggtgctggagccgggcctgtggagcctggtgccgggcgtggacactgtggcgagggaccctcgctgctgggccgtgcgcaggacgcagcttgagttctgcccccgtgggagcagcccctgggaccgcttcctggtcgggggctacctctcctcccgcgtcctgctggagctactccgcaaggcgctggctgcttctgtcaactggccggccattggcagccttctcgggtgcctgatccggcccagcatggcctcggaggagctgctgctcgaggtgcagcacgaacgcctggagctcactgtggctgtgcttgtggcagtccctggggtcgatgctgacgaccgcctcctcttggcctggcccctggaggggctggcggggaacctctggctgcaggacctgtatccagtggaggctgctaggctgcgagccctggacgaccatgacgctgggactcgccggcggctgctgctgctgctgtgtgctgtctgccgtggttgctcggctctggggcagctaggccggggtcacctgacccaggtggtcctgcgtctgggggaggacaacgtggattggacggaggaggccttgggtgagcgcttcctgcaagccctggagctgctcatcggcagcctggagcaggccagcctgccctgccacttcaaccccagcgtgaacctcttcagcagcttgcgtgaggaggagattgacgacattggctatgcgctatacagtggcctacaggagcccgaggggctgctctaggtgggtggaaacgggtggttgccatgttttctaatgctggggagctgcacccacctcccttccagggatttgaatagtggtttttctctagctttttgccagaacaaaggagggtacattacttaaacccagggcatcaggatgtgcttgggctatggtggccataaaccctgagcccagagagcttgggtcactgtcacctgagtgcagctgggctgcctcaggcagcttggagtgccagccattcctgcaagcaccgtttcagctcttggggccaaccccaggacctttggctctgtccatcaccagcaaccaatccaccaacagaatgtggtttctgccatcctgggcagaagctgaaggccagcttcacatttctgctgagagaaggtgacttaacgccttttccggccctagctccaggcgttttgaggcgtctggtgcctgatggtaggtatggtgtgtttgttctgtcccccaggggctggagtcacctggtgcccctgaaggacagatttttggctgttaaaggatggcattttcctgctgtcttctgtgcgtttagttttcttgctgagcgggagctcagtatgacttgccacccacctgatacctcagggcaaggccctttttccctccagccaggtgagtgttttcttcaggcagctgagggtcctgggggagctgaggctctgtgctgcacccccagcccacagctggggcatctcactggagctgttccaggccccactggagagcagaggacctgatcccccactagagaggtccggtgtgcacagccggcctcccagtgtgccaaaatgaactgctctcagctgatggctgtattctgactttgaagcctgttaagaggtagcaagggggctagaggagggagattccacctcccctcccaagtgaccctcctcctgcctctggtatccttccttttgaaacgaagctcagcttcgaagatgtgaacaagaataaaaggaaaaaattctaatgtatatataaaaaaaaaaaaaaaaaaa

SEQ ID NO: 2937 - DNA, 5937 bp, Homo sapiens
ctgctcctgcgcggcagctgctttagaaggtctcgagcctcctgtaccttcccagggatgaaccgggccttccctctggaaggcgagggttcgggccacagtgagcgagggccagggcggtgggcgcgcgcagagggaaaccggatcagttgagagagaatcaagagtagcggatgaggcgcttgtggggcgcggcccggaagccctcgggcgcgggctgggagaaggagtgggcggaggcgccgcaggaggctcccggggcctggtcgggccggctgggccccgggcgcagtggaagaaagggacgggcggtgcccggttgggcgtcctggccagctcaccttgccctggcggctcgccccgcccggcacttgggaggagcagggcagggcccgcggcctttgcattctgggaccgcccccttccattcccgggccagcggcgagcggcagcgacggctggagccgcagctacagcatgagagccggtgccgctcctccacgcctgcggacgcgtggcgagcggaggcagcgctgcctgttcgcgccatgggggcaccgtggggctcgccgacggcggcggcgggcgggcggcgcgggtggcgccgaggccgggggctgccatggaccgtctgtgtgctggcggccgccggcttgacgtgtacggcgctgatcacctacgcttgctgggggcagctgccgccgctgccctgggcgtcgccaaccccgtcgcgaccggtgggcgtgctgctgtggtgggagcccttcggggggcgcgatagcgccccgaggccgccccctgactgccggctgcgcttcaacatcagcggctgccgcctgctcaccgaccgcgcgtcctacggagaggctcaggccgtgcttttccaccaccgcgacctcgtgaaggggccccccgactggcccccgccctggggcatccaggcgcacactgccgaggaggtggatctgcgcgtgttggactacgaggaggcagcggcggcggcagaagccctggcgacctccagccccaggcccccgggccagcgctgggtttggatgaacttcgagtcgccctcgcactccccggggctgcgaagcctggcaagtaacctcttcaactggacgctctcctaccgggcggactcggacgtctttgtgccttatggctacctctaccccagaagccaccccggcgacccgccctcaggcctggccccgccactgtccaggaaacaggggctggtggcatgggtggtgagccactgggacgagcgccaggcccgggtccgctactaccaccaactgagccaacatgtgaccgtggacgtgttcggccggggcgggccggggcagccggtgcccgaaattgggctcctgcacacagtggcccgctacaagttctacctggctttcgagaactcgcagcacctggattatatcaccgagaagctctggcgcaacgcgttgctcgctggggcggtgccggtggtgctgggcccagaccgtgccaactacgagcgctttgtgccccgcggcgccttcatccacgtggacgacttcccaagtgcctcctccctggcctcgtacctgcttttcctcgaccgcaaccccgcggtctatcgccgctacttccactggcgccggagctacgctgtccacatcacctccttctgggacgagccttggtgccgggtgtgccaggctgtacagagggctggggaccggcccaagagcatacggaacttggccagctggttcgagcggtgaagccgcgctcccctggaagcgacccaggggaggccaagttgtcagctttttgatcctctactgtgcatctccttgactgccgcatcatgggagtaagttcttcaaacacccatttttgctctatgggaaaaaaacgatttaccaattaatattactcagcacagagatgggggcccggtttccatattttttgcacagctagcaattgggctccctttgctgctgatgggcatcattgtttaggggtgaaggagggggttcttcctcaccttgtaaccagtgcagaaatgaaatagcttagcggcaagaagccgttgaggcggtttcctgaatttccccatctgccacaggccatatttgtggcccgtgcagcttccaaatctcatacacaactgttcccgattcacgtttttctggaccaaggtgaagcaaatttgtggttgtagaaggagccttgttggtggagagtggaaggactgtggctgcaggtgggactttgttgtttggattcctcacagccttggctcctgagaaaggtgaggagggcagtccaagaggggccgctgacttctttcacaagtactatctgttcccctgtcctgtgaatggaagcaaagtgctggattgtccttggaggaaacttaagatgaatacatgcgtgtacctcactttacataagaaatgtattcctgaaaagctgcatttaaatcaagtcccaaattcattgacttaggggagttcagtatttaatgaaaccctatggagaatttatccctttacaatgtgaatagtcatctcctaatttgtttcttctgtctttatgtttttctataacctggattttttaaatcatattaaaattacagatgtgaaaataaagcagaagcaacctttttccctcttcccagaaaaccagtctgtgtttacagacagaagagaaggaagccatagtgtcacttccacacaattatttatttcatgtctttactggacctgaaatttaaactgcaatgccagtcctgcaggagtgctggcattaccctctgcagaacagtgaaaggtattgcactacattatggaatcatgcaaaaggaaaaaaagtttcatgatatctgttgttggcagtttttgtttatctctgacagtttttagttaaatgtttagatcctcagaactacattagtgcctactattaacttactctgtctcttgttaaaggctaaatctgcgcttctccctggtgccagcaggttcccctcacagtcaatgcagtggtatagcatatcctcacatttctagtgcccttgagactgtgctatggaaccaatcttgaacatacatgcattgacttgacaagttactgagtaagcagcatattcagcaggtgccactacatgcctactctgccagacactgagcttggggccctagggaagatagagaattatacaaggcaaagtccttctctttagggctcttacaatctatcacttccaaaaagtaaatggtgactgataaaacaattggcagaacctgtttgattactgtgacagtcttaatgataccataaatcaatattagaaagctagttgacttaaagcctgaaataatgggagttttctcctccacttattagaataaggaccctcagtgactaattattgtgggtagggtcaagattaactagttttatacagagttctgctgtaaatagtcattttgcatttgattagtgcagttctctgaatcataaagcaagttttacctctctgtacatgtttttgcagacatacttgaaaagctcacttaaatctaggtgcttcaattcactttcttgagaggacaaatgaaaagctgtggagaaaatgtcctcattaaagtattaaagtgtgggcagaattacaattacaaagtgccagccaccgaataaagataaaagttcagttcttaaaatgagtttttatgagataacagtcagtgatcttggtgttaccgggattccacatggggcagtgggaaagagttcaggttttgaaggtaacctagtttagatttgaattccagctatgtgacattgggtaaattagtagtagtcctgagcctcagcgtcctcatctataaaatgactggcgaaaatacttcacaagctcattttgagcactttaggaagtaagtgaaagtacctaaaatagcaggcacccaattgatgattttatatcttccttctttgcttgcagtgatttcaggatgtcctcatatctatttataggtctaaaattatatcttaaggtatgttgtagaataaattaaaaggataatctaaatcaccatttagattaagcttgacttgcaaactaggaagaagcacctaggctttctttgaaaatatttttttggttcgttttggtaaagctctataaattggtatctattattttaccaatttttttttagtattaagtccatttagaactaaccatattatttatggaataattagcatgaggaaggtataattgcattttttttttttttagacggagcttgcactgtagccccagctggactgcagtggcgtgatcttggctcactgcaacctccgcctcccaggttcaagcgattctcctgcctcagcctcccgagcagctgagactacaggcgcctgccaccacgcctggccaattttttgtatttttagtagagactgcgtttcaccatgttgggcaggctggtcttgaactcctgaccttgtgatccacctgcctcggcctctcagagagctgggattacaggtgtgagccgccgtgcccagccattgcatttttattcacatacacattgttaatgtggaacaatttaacactaatctcatcagagagcgagatgaatgtggcaattgctcattttattttgcatatattaaattgagtaggttcagctctaacataccttaagaaaaatgcatatcggtgcactgtatgtatttcaaaatgcctttcctatgattgtcatgtcctcctttaaggcttttccctcaaatttattacaaatttagtatttttagtacttgatgactctaattacatgaatgcacctggaatgacatttgtaacagaagacggtctgacttgctttcagtattcacaagttctttccagtttccaagtcttttcctagcagtaatttaggggagacagaggagtttcatgtaaagagcatgcagtttggagtcagaacctgggtatgactctgtggccttgatgaagcaagttacttaaactcttgagttttagctttctcctttacaatgcatgaatgcctatccccctacaaaacaaagattaaatgtgatgatgtatgccaaggtgctttgtatattgtaaagtgctatataattataagatgttctaaattttcaaggatctaaaccagggattggcaaacgtttttccagggagtaaatattttacgctttgcatatataatttatggaggtgttgagaggatagattagacacttgaagtactcaggatagtgcctggcatgtaggaagcacctggaaaatattcgctgtgattaccatcagtccattttaccgaggaaggagccaaggtccaggcccactgaaggacttgcataacattacaatagcagtggcagaaccagccatgcttctgcaaatcacaacctctttgagcctctgtcacctgaactgcaaaatgagtgggttagacaaaatcatctgttgggacctcctagttccacgtgctatcattctactaactggcaccctaaggttgaaagtgcttatctgctttccaatgtggcttccttacagtctggaactgacaatatgcaggagcagtaaactggcagaaaaccaggaatcagagaaagaaaatataatttaactttaaagatgtaaattatatatatagtatattatatatatttttaaagctttatatgcctcaaatatcagggaaaggagccaagtccttggtatttagtttggtgaatacttgcattgaatacatgtcaagatgtcaagtcatttttgaatgtgtctcagggatttctatgctacacattcttttaacaaatcaagtatttatgtacacatgttcagattttttgacaaaatgattaaaataatgagatggaaaatga

SEQ ID NO: 2938 - DNA, 2540 bp, Homo sapiens
agtttggccccgtttgtaaaaggccgcggcaggcgaagagagaagagactatcaagatctccacttagggaagtgggaatcttatttgcggaacattgggcagaagctttgccattggctggtggagaaggaggaggcagaatgtctgcattgttacaccatacagctcaaacttcagaagattttgggttaagcagttatcattagtctgcaaatgatcgtgttttcacctgatcattagaaactaatgaaacaccttttaagtcttatgaattcaggttacactgttttccagatgccttggcagctggtacagggcctctgaaaaatggaaccaaattctctgaggactaaagtcccagctttcttatctgatttggggaaggccacattgaggggaatcagaaagtgtccccgatgtggcacatacaatggaacccggggactgagctgtaagaacaagacatgtggaaccatattccgctacggtgcacgcaagcagcctagtgttgaagctgtcaaaatcattacaggctctgatcttcaggtctactcagtgcggcaaagagaccggggccctgattaccgatgctttgtggagctcggggtttcagagacaacaatccagacagtggatgggacgatcatcactcagctgagctctggacggtgttatgtcccctcatgcctgaaagctgccactcaaggcgttgtggaaaaccagtgccagcacatcaagctggcggtgaactgccaggcagaggccacccctctgaccctgaagagctcggtcctgaatgcaatgcaggcctccccggaaaccaaacagaccatctggcagttggccacggaacccacaggtcctctggtgcagagaattactaaaaacatcttggtggtgaaatgcaaggcaagccagaagcacagtttggggtatttgcatacatcttttgtgcagaaagtcagtggcaaaagcttgcctgagcgccgcttcttctgctcctgtcagactctgaaatcgcacaagtcaaatgcctccaaggatgagacagcccagagatgcattcatttctttgcttgcatctgtgcctttgccagtgatgagacactggctcaggaattctcagacttcctaaattttgattccagcggtcttaaagagattattgtaccccagttaggttgccattcagaatcaacagtatctgcttgtgagtctactgcctctaagtcaaagaagaggagaaaggatgaagtatctggtgcacagatgaacagttcactactgcctcaagatgcagtgagcagtaatctaaggaaaagtggcctgaaaaagcctgtggttgcttcctcgttaaaaaggcaggcctgtggtcagctgttagatgaggcacaagtgactttatccttccaagactggctggccagtgtcacagaacgcatccatcaaaccatgcactatcagtttgatggcaaaccagaaccattggtgttccacattcctcagtcattttttgatgccctgcaacaaagaatatctataggaagtgcaaaaaaacggctccccaactccaccacagcttttgttcggaaagatgccttgccactgggaaccttttccaagtatacttggcatatcactaatatcctgcaagttaaacaaatcttagataccccagagatgcccttggaaatcacccgtagctttatccagaaccgagatgggacttatgagctatttaaatgccctaaagtggaagtagaaagcatagcagaaacctacggtcgtatagaaaaacaaccagtgctgcgacccttggaactaaaaacttttctcaaagttggcaacacttccccagatcaaaaggagccaacacctttcatcatcgagtggatcccagatatccttccccaatctaagattggcgagctgcggatcaagtttgagtatggccaccaccggaatgggcatgtggcggagtaccaagaccagcggccccccttggaccagcccttggaactggcccctctgaccactattactttcccttaaagcaaaacaagataataatcttttgctgcttaatttgcacatccccaccccttgacaactttaaatgctagttaggcacttagatggccctgttccttggtaaactgctcttagctaagatgcaaattctcagtgctttcaagtggattctgttgaagaaaatctcttgtaaatagcctttttgatgctgctgtgtacagtcttcattatgcattgggcagtatttctggctagagttttaaaaggaacagaaagaaaaccagcttattttccttcttacggactcatctttagcgtttatttcaaccttttgctaattctctgagaaatctgcagcactcagccatacaccaacagtgttggaaagttaacaccctggttagggcagaatgttaaagaccatcttggcagagttccagccacgctctttattctgttctcaaataaagcagtgtcactagtttttcctaaaaaaaaaaaaaaaaaa

SEQ ID NO: 2939 - DNA, 2856 bp, Homo sapiens
gcccgccgcccggcgacgcgcccgccggcgtccccggaggtgcccccggcccggccgggtcgtcgccccgccgccgcgcccgcgagccgctttgtctcgggcggggcgcgcgggagaggccgccaggtgccccccgccacgggcccgggccccccgccccggggcggcggcggcggcgccgggccccggggcggggggcgcgccgggatgggccccaagaggcgacagctgacgttccgggagaagtcacggatcatccaggaggtggaggagaatccggacctgcgcaagggcgagatcgcgcggcgcttcaacatcccgccgtccacgctgagcacgatcctgaagaacaagcgcgccatcctggcgtcggagcgcaagtacggggtggcctccacctgccgcaagaccaacaagctgtctccctacgacaagctcgagggcttgctcatcgcctggttccagcagatccgcgccgccggcctgccggtcaagggcatcatcctcaaggagaaggcgctgcgcatagccgaggagctgggcatggacgacttcaccgcctccaacggctggctggaccgcttccgccggcgccacggcgtggtgtcctgcagcggcgtggcccgcgcccgcgcgcgaaacgctgccccccgcaccccggcggcgcctgccagtccggccgcggtgccctcggagggcagtggcgggagcactactggttggcgcgctcgggaggagcagccgccgtcggtggccgagggctacgcctcgcaggacgtgttcagcgccaccgagaccagtctatggtacgacttcctgcccgaccaggccgcggggctgtgcggaggcgacggacggccgcgtcaagccacccagcgcctgagcgtcctgctatgcgccaatgccgacggcagcgagaagctgcccccgctggtggccggcaagtcggccaagccccgcgcaggccaagccggcctgccctgcgactacaccgccaactccaagggtggtgtcaccacccaggccctggccaagtacttgaaggccttggacacccgaatggctgcagagtctcgccgggtcctgctgttggccggccgcttggctgcccagtccttggacacctcgggcctgcggcatgtgcagctggccttcttccctcccggcaccgtgcatccgctggagaggggagtggtccagcaggtgaagggccactaccgccaggccatgctgctcaaggccatggccgcgctagagggccaggatccctcaggcctgcagctgggtctcacggaggccctgcactttgtggctgccgcctggcaggcagtggagccttcggacatagccgcctgctttcgtgaggctggctttgggggtggccctaatgccaccatcaccacttccctcaagagtgagggagaggaagaggaggaggaggaggaagaagaggaggaggaagagggtgaaggagaggaagaggaggaggaaggggaggaggaggaggaggaagggggggaaggagaggaattgggggaggaagaggaggtggaggaggagggtgatgttgatagtgatgaagaagaggaggaagatgaggagagctcctcggagggcttggaggctgaggactgggcccagggagtagtggaggccggtggcagcttcggggcttatggtgcccaggaggaagcccagtgccctactctgcatttcctggaaggtggggaggactctgattcagacagtgaggaagaggacgatgaggaagaggatgatgaagatgaagacgacgatgatgatgaggaggatggtgatgaggtgcctgtacccagctttggggaggccatggcttactttgccatggtcaagaggtacctgacctccttccccattgatgaccgcgtgcagagccacatcctccacttggaacacgatctggttcatgtgaccaggaagaaccacgccaggcaggcgggagttcgaggtcttggacatcaaagctgagtcactggacctagctgtgcccccaacctagattggcagcaccaccccagggcagaggactctctgggcacccgctgtgcatggagccagagtgcagagccccagatcctttagtaatgcttcccctggtcctgcaacaggcccggtcacctcggccgggcccggggctgaggtcagcctcactgcctgcttattgcctctttctcagaatcctctttcctccccatttggccctgggctcaggggaccaggtggggcgggtggggagctgtccggtgctaccacaccgtgccctcagtggactaaccacagcagcagccagggatgggccctggaggttcccggccggagagtgcctctcccctctgccatccacgtcaggtctttggtggggggaccccaaagccattctgggaagggctccagaagaaggtccagcctaggccccctgcaaggctggcagcccccacccccaccccccaggccgccttgagaagcacagtttaactcactgcgggctcctgagcctgcttctgcctgctttccacctccccagtccctttctctggccctgtccatgtgactttggcccttggttttctttccagattggaggtttccaagaggccccccaccgtggaagtaaccaagggcgcttccttgtgggcagctgcaggccccatgcctctcctccctctctggcagggccccatcctgggcagaggggcctggggctgggcccagagtccagccgtccagctgctcctttcccagtttgatttcaataaatctgtccactccccttttgtgggggtgaacgttttaacagccaaaaaaaaaaaaaaaaaa

SEQ ID NO: 2940 - DNA, 2768 bp, Homo sapiens
ggagctttgctgaaactgcacaaaaaatcgagccggggggttccctggtccccggcgatggggcggggagcgctgcgccgggggagggggcgggcgcggcggcgcgggccccgccgaggggggacacctggctgaggcacagctgccgccgtgcctttccgcgcgagcccagagctccgatccctgcgcgggctcgagagctcgccccgaacgggggtcttcctcctccgccgttgacaggttttgacctgtagcagagaaccaattctggagaacagcctcacttctttgattgaatacttacataatgcattggaacatgacatgagattaaggtttaataatgatagaatgaagaccacaataaaagagacctctacttagctcagcaattcttacctttcttacctatttgatgaagatgtcttttgaaaggtgtactgcaaggaacaaaatgtttgtaaattctccttttaccaaggtggataattactgtaccttcctcatggaaaaagttttatttaaagtgttatttctcattgaatactatcaaaaaggaaaaaaaaatgacctaaacttttgagatagatttggctctaggcctactctaggtgcggtacttcactatagtttataaaagatggtccctgtcagcaaagaactgtaacctgtatgagaatattatactaacatacaagaaacaagtagagaataatggaatgtaaactctggcttgctaacttaagtgtggtagaagcttgaaggaaatgtggacttaaacttatcagagaagacttataagaggatatgaaaggtgtaaattttgataccaccattgccgccttcccctcaaaaaaggtgagaactgactaaactactggtacttagaccatgtggagaaggaactgaaaatggaaacagaaacacgtctgtacagagcagagtgtcagataatagctcattttagtagagggcaataaatgccacatgagatgatcacctcagcagaaaactgggatgtggagacgctggtagcggggccaggaaggctccggacggagcaggttttctggaccacagacacactgccccggcgccctccgcaggccgctcctccccaggcccatgacagtgccccgctggtttctgccgcgctgccggactggagctcagacggccttcgccagcccccccaacccacgcagatccctgctgacctgggcaactccccaccctcgctgaaggttcgaggaccaccccgctttcccgagaggagccgggcggcgggtacttatctccgacctccggctagtgggaaaggccgcgcgaccgcccgtcctccaactacagggaccgcacgaacagcgactgggaaactgccactagaaaaagatgactgtccaactaaaacctgcatacacagctacatccttccctggaagagcacagtggaactagatcctagtacagatagcacagggattgtcaacattcttgtcacactgaaatttccttctactgatctccaaacttctaaaaatttgctgttgagaccagctgaaatgtttgaaagaagcaactaaagaaagaaactttgaaagaagcttccaaaagaagcaaccaagtctacaaaggcacagtttgactcaaatggatccaactgattagcaaatggaaaataacatggaggaatatattttgcatgacaagcatagcagctccaagtcatccctaatgaagccaaaaatttaagtgcaacccagagaatggatggttcagaatcttttttttttttgagatggagtctcgctctgtcacctaggctggagtgcggtggcatgatctcggctcactgcaagctccgcctcctgggttcacgccattctcctgcctcagccttccgggtagctgggactacaggtgcctgccaccacgcccggctaattttttgtatttttagtagagacggggtttcaccgtgttagctaggatggtctcaatctcctgacctcgtgatctgcccgcctcagcctcccaaagtgctggaattacaggcgtgagccaccgcgcccggcccagaatcttttttaaattttttattattattattttttctgagatggagtccggctctgtggccaggctggagtgcagtggcacaatctcagctcactgcaacctctgactcccaggtacaagtgattctcctgcctcagcctcctgagtagctgggataacaggcacgtgccaccacgcccagctaatttttgtatttttagtagagacggggtttcaccatgttggccaggatggtctcgatctgcctaccttggcctcccaatgtactgggattacaggcgtgagccaccgtacccggcccagaatctttgccttttgtttgcatagtttaatcttctaaaccagttgctttcccagaaaaggtgacttaaagtcatagcctttgtgttcatcaccatactctccatagttttacaaattattcagtttatttttaaaaggggtaatttttaaaatttttatttttaattccgaagcattccttttaatacattctcttgagggaaaaaaaaaatcacacatagtgattgtgtgtggtagtgattatgtgtggcctaagtggcaattgatcaataccccaatctcaagcctgtacattgttactggttgactggttggttgcctggtgggctttttgtccttccagatgtttttctaccttctgccttttccaataaagcttccattat

SEQ ID NO: 2941 - DNA, 3037 bp, Homo sapiens
agttagttgccattcggagtgaggagtgggtagaagcggcggcggcggcggcggcgtttgcggtggcgcggactccgaggagcgccagcacctcgaggccctttctctctaccctggtccccagaagcaggggtcccggccctccttgcagctgccgggttctcccgtgcgtgcagccctgcgagggctgaggagaaggctgcgagcggccctcggggctgcgtgatccgggccgttgccctgtcagcacgatgcctggagcggtggcggcggcggctccgggctccttgcggccccggccgtgaccgccacaccgagcccagccgggcggttgcggccgttggacgtttgttttcgcagccttcccctcccccctcgccgaggcggcgggggtgtgcgttggggagggggagccccgagactcctcccccacagcgatacccccgcccctcccccttacacactcgcacgcactatcgcgccggctcccacacgctcgcgcgcctcccgccccgcgcctccgtgtcggccggcggcgtccagggcccgcagagccaccatgtccactgcctcctcctcctcctcctccagttcctctcagacccctcatcccccgtcgcagaggatgaggcgcagcgccgcggggtccccgcccgccgtcgccgccgccgggagcgggaacggtgcgggcggcggcggcggcgtgggctgcgccccggctgcgggagccggccggctgctgcagcccatccgcgccacggtgccctaccagctcttgcggggcagccagcacagtcccacgcgtccgcccgtcgccgctgccgccgcctcgctgggcagcctcccggggcccggcgcggcccgcggccccagcccgtccagcccgacgccgccggcggccgcagccccggccgagcaggcgccgcgggccaagggccgcccgagacggtccccagagagccaccggaggagcagctcacctgagagacggagccccggctcgcccgtgtgcagagcggacaaggcaaaatctcagcaagttcggacctctagtacaataaggcgaacctcctctttggatacaataacaggaccttacctcacaggacagtggccacgggatcctcatgttcactacccttcatgcatgaaagacaaagctactcagacacctagctgttgggcagaagagggtgcagaaaagaggtcacatcagcgttctgcgtcatgggggagtgctgatcaactaaaagagcagatcgccaaactgaggcagcaactacaacgcagtaaacagagtagtcgtcacagtaaggagaaagatcgccagtcacctcttcatggcaaccatataacaatcagtcacactcaggctactggatcaaggtcagttcctatgccactgtcaaatatatcagtgccaaaatcatctgtttcgcgtgtgccctgcaatgtagaaggaataagtcctgaattagaaaaggtattcattaaagaaaataatgggaaggaagaagtatccaagccgttggacataccagatggtcgaagagctccacttcctgctcattaccggagcagtagtactcgcagcattgacactcagactccttctgtccaggagcgcagcagtagctgcagcagtcattcaccctgtgtctcccctttttgtcccccggaatcccaggatggtagcccttgctcaacagaagatttgctctatgatcgtgataaagacagtgggagtagctcaccgttacccaagtatgcttcatctcccaaaccaaacaacagctacatgttcaaacgggagcccccagagggatgtgagcgagtgaaggtctttgaggaaatggcgtctcgtcagcctatctcggcccctctcttttcatgtcctgacaaaaacaaggttaatttcatcccaaccggatcagctttctgtcctgtaaaacttctaggccccctcttacctgcttctgaccttatgctcaagaactctcctaactctggccagagctcagctttggcaactctgaccgttgagcagctctcatcccgggtttcctttacgtctctttctgatgacaccagcacagcgggctccatggaggcctctgtccagcagccatcccagcagcagcagctcctgcaggaactgcagggtgaggaccacatctctgctcagaactatgtgatcatctaaaaagggggagctggcctccaccctgtgttccatggattcggaacaagatttcagacatctgcatgagtgacaaactttctgaacaccaccaccaccaataatacttatcagcatcataaagtatctcttaaacactgatcttggcagggacggaactcctattcagcagtttttgtggaaagcagtaatgcttgcaaaacgtgtgtgtcattcagcattttaagtggagactatgcatttcatagtatatttgacagattagtactgtgtcctgtgttttgttccagattcttcagtataaataagctctatatcaaaaagttgcctgtctaaatagaaaatgtcttgctgtgttttgtcctatggaaaatactgtaattcaggattatgtttacaattgatccaggtgtttgtttctaacttctgtaatacatacaatgcaaaaaaaaaaaaaaaaaatggccacaacagttgcacagtgcccaccctatggcctagcttcaggtacttcagttgaagtctaaactcaggtaacttggaatgtatatcatattgggatattaaatatttcacagctaaaaagctaaagagggaacatcactcttttgcctttccttattttatgcatttccctttcctcattacattccacattcttagaataagaagtgcattcaatcctaggagaatgataatcctggacatgggtgaacatgaggagaaccagcaaaatctgtggtgtttgacatcactttgtcatgtggttacaagtaaaacaactgttgcattcactgtttcaaaaaaaaaaaaaaaaaaagaaaaaaaaaaaaaaaa

SEQ ID NO: 2942 - DNA, 2935 bp, Homo sapiens
gtgagggggcgcggtcaccgcccagggttcccacgaacgccaaggcggccacgtcctgctccccctggtgaagaagctgccctgggcttgtcgtcctagggtctccagacatgtctgaggtgaagagccggaagaagtcggggcccaagggagcccctgctgcggagcccgggaagcggagcgagggcgggaagacccccgtggcccggagcagcggaggcgggggctgggcagacccccgaacgtgcctgagcctgctgtcgctggggacgtgcctgggcctggcctggtttgtatttcagcagtcagaaaaatttgcaaaggtggaaaaccaataccagttactgaaactagaaaccaatgaattccaacaacttcaaagtaaaatcagtttaatttcagaaaagcttgagtctactgaaagcatcctgcaggaagctacatcatccatgtctttgatgacccagtttgagcaggaagtatccaacctccaagatatcatgcatgacattcaaaataatgaagaggtgctcactcaaaggatgcaaagccttaatgagaaatttcagaatattacggatttctggaagagaagcctagaagaaatgaacattaatacagacattttcaaatcagaagcaaaacatatacattctcaagtaactgtccaaattaactcagctgagcaggaaataaaattgctcactgaacggctaaaagatttggaagatagcacactaagaaatattagaacagtaaaaagacaagaagaagaagatctcctgcgagtagaggagcagctaggctctgatacaaaggcaattgaaaagttagaagaggaacagcatgccctctttgccagagatgaagatctgactaataaactttccgactacgaacccaaagttgaagaatgcaagacacatttgccaacaattgaaagtgctattcactctgttctcagagtctctcaggatctgatagaaacagaaaagaaaatggaagacttgactatgcagatgtttaatatggaagatgatatgctgaaagcagtgtctgaaataatggagatgcagaaaacccttgaaggaattcagtatgataatagcatattaaagatgcaaaatgaactggatattctaaaagaaaaagttcatgattttatagcatactcaagtacaggagaaaagggaactttaaaagaatataatatagaaaataaaggaattggtggtgatttttaaattcatgacatttattctgatgaaccatatcattatacataaattgattagtccattgattttgagttactttgatacgcctcatcttatcctacattattggaaaataaatgagatgtccacacaaatggattatccacataatcaaagcttatctttttaagcactaaaacttacttcattgtaactatttgaaatagaaatagttctttaaaaatatttctctacttttaaaacaggatacttaatatttttaatgttttttaaagcattaatggacatcatcattaatttcacctattatattgtacccacatatattgatgtctccaggggctaataaagagtatttaccacttcactaaatgaccccaatttgccattttcaaacctatgtctcataccttttctgtcacctgaacttactgtcaggttggttggtaatgtgcctgcctcagccagttcactttcttaggtaattcactgcaggttaagaatccacacaaccaagttcatgggaattttgtgtaaaataaaagataacatgcctgagggagagcctggtgcctttgctatgaattaatatgcactttctgaaaactctaaagcctgggaaacattttagtttttgttaaggttctaaactgtgttacagatacttgtaagacttttaaaatcagagtaagtatgttcttacataaggcctttcttaggaattatgtgtatataaatctttgaaatatctttatatacctgagttttaggttccaactgtgttagacatgagtttgctagatccatggtctctagatggtttacttaaataggccaggcgcagtggctcacacctgtaatcctagcactttgggaggccgaggtgggcagatcacgaagtcaggagatcaagaccatctggctaacagggtgaaaccctgtctctactaaaaaatacaaaaaattagccaggcgtggtggtgggtgcctgtagtcccagctactcaggaggctgaggcaggagaatggtgtgaacccgggaggcagagcttgcagtgagccgagatcgcgccactgcactccagcctgagtggcaaagtgagactctgtctcaataaataaataaataaataaaaataagcctgtggcctgttttgagggaaaagtaacataactctgataattaattatgataataactatgatagttaaaaatacgtcattttaaagatttcccaaaccacaccactaaatttgttttatgaattgattttattttatttgaaattatataatgtagtcaactgcaatatggaagtttgttcttgtttctttgtcaataaccttaccagttttataatgcagtttttgatggaattaaacacaaagaacttgaaagcagtcagttacaaaaaggtagttgtggtcaagtagttttaatatgtaaatttgcaagtttttggagaacccccaaactccttctccactggagttaggagggcctgtggtagacagcgtgaatcatgaaaataagcctggagagttctgttattaaggggcatagcattaatttttgcagtcttaaaattacacttcttgacttctgaatgtctcttatttgcgtgcactgacaaaattctatttgtttacttttatattaatggtaataaaatagattataaagaaaaaaaaaaaaa

SEQ ID NO: 2943 - DNA, 1364 bp, Homo sapiens
gtgagggggcgcggtcaccgcccagggttcccacgaacgccaaggcggccacgtcctgctccccctggtgaagaagctgccctgggcttgtcgtcctagggtctccagacatgtctgaggtgaagagccggaagaagtcggggcccaagggagcccctgctgcggagcccgggaagcggagcgagggcgggaagacccccgtggcccggagcagcggaggcgggggctgggcagacccccgaacgtgcctgagcctgctgtcgctggggacgtgcctgggcctggcctggtttgtatttcagcagtcagaaaaatttgcaaaggtggaaaaccaataccagttactgaaactagaaaccaatgaattccaacaacttcaaagtaaaatcagtttaatttcagaaaagtggcagaaatctgaagctatcatggaacaattgaagtcttttcaaataattgctcatctaaagcgtctacaggaagaaattaatgaggtaaaaacttggtccaataggataactgaaaaacaggatatactgaacaacagtctgacgacgctttctcaagacattacaaaagtagaccaaagtacaacttccatggcaaaagatgttggtctcaagattacaagtgtaaaaacagatatacgacggatttcaggtttagtaactgatgtaatatcattgacagattctgtgcaagaactagaaaataaaatagagaaagtagaaaaaaatacagtaaaaaatataggtgatcttctttcaagcagtattgatcgaacagcaacgctccgaaagacagcatctgaaaattcacaaagaattaactctgttaagaagacgctaaccgaactaaagagtgacttcgacaaacatacagatagatttctaagcttagaaggtgacagagccaaagttctgaagacagtgacttttgcaaatgatctaaaaccaaaggtgtataatctaaagaaggacttttcccgtttagaaccattagtaaatgatttaacactacgcattgggagattggttaccgacttactacaaagagagaaagaaattgctttcttaagtgaaaaaatatctaatttaacaatagtccaagctgagattaaggatattaaagatgaaatagcacacatttcagatatgaattagtttgacattattgagattagactaaggtaatttttttaatgggacctctcatgagaagactggtaaatcaaaaataatgatattttggagcaaaagtcattttatatttaatcctattttgtacagtaaaaataaaactttaaaacaggttgattttccaaaataaatatgctaaaacctaaaaaaaaaaaaaaaaaaaaa

SEQ ID NO: 2944 - DNA, 1246 bp, Homo sapiens
gtgagggggcgcggtcaccgcccagggttcccacgaacgccaaggcggccacgtcctgctccccctggtgaagaagctgccctgggcttgtcgtcctagggtctccagacatgtctgaggtgaagagccggaagaagtcggggcccaagggagcccctgctgcggagcccgggaagcggagcgagggcgggaagacccccgtggcccggagcagcggaggcgggggctgggcagacccccgaacgtgcctgagcctgctgtcgctggggacgtgcctgggcctggcctgtggcagaaatctgaagctatcatggaacaattgaagtcttttcaaataattgctcatctaaagcgtctacaggaagaaattaatgaggtaaaaacttggtccaataggataactgaaaaacaggatatactgaacaacagtctgacgacgctttctcaagacattacaaaagtagaccaaagtacaacttccatggcaaaagatgttggtctcaagattacaagtgtaaaaacagatatacgacggatttcaggtttagtaactgatgtaatatcattgacagattctgtgcaagaactagaaaataaaatagagaaagtagaaaaaaatacagtaaaaaatataggtgatcttctttcaagcagtattgatcgaacagcaacgctccgaaagacagcatctgaaaattcacaaagaattaactctgttaagaagacgctaaccgaactaaagagtgacttcgacaaacatacagatagatttctaagcttagaaggtgacagagccaaagttctgaagacagtgacttttgcaaatgatctaaaaccaaaggtgtataatctaaagaaggacttttcccgtttagaaccattagtaaatgatttaacactacgcattgggagattggttaccgacttactacaaagagagaaagaaattgctttcttaagtgaaaaaatatctaatttaacaatagtccaagctgagattaaggatattaaagatgaaatagcacacatttcagatatgaattagtttgacattattgagattagactaaggtaatttttttaatgggacctctcatgagaagactggtaaatcaaaaataatgatattttggagcaaaagtcattttatatttaatcctattttgtacagtaaaaataaaactttaaaacaggttgattttccaaaataaatatgctaaaacctaaaaaaaaaaaaaaaaaaaaa

SEQ ID NO: 2945 - DNA, 1246 bp, Homo sapiens; identical to SEQ ID NO: 2944

SEQ ID NO: 2946 - DNA, 1100 bp, Homo sapiens
ggcctcccacttggttgctcgtacgcggctagtgggtcctcagtggatgtaggctgggcgccgcgatgttcgacgggacaccggcggagagcgacctcggggttaaggggtggggctggacgtcaggagccaagatggcggcggtggtcgcactctccttgaggcgccggttgccggccacaacccttggcggagcctgcctgcaggcctcccgaggagcccagacagctgcagccacagctccccgtatcaagaaatttgccatctatcgatgggacccagacaaggctggagacaaacctcatatgcagacttataaggttgaccttaataaatgtggccccatggtattggatgctttaatcaagattaagaatgaagttgactctactttgaccttccgaagatcatgcagagaaggcatctgtggctcttgtgcaatgaacatcaatggaggcaacactctagcttgcacccgaaggattgacaccaacctcaataaggtctcaaaaatctaccctcttccacacatgtatgtgataaaggatcttgttcccgatttgagcaacttctatgcacagtacaaatccattgagccttatttgaagaagaaggatgaatctcaggaaggcaagcagcagtatctgcagtccatagaagagcgtgagaaactggacgggctctacgagtgcattctctgtgcctgctgtagcaccagctgccccagctactggtggaacggagacaaatatctggggcctgcagttcttatgcaggcctatcgctggatgattgactccagagatgacttcacagaggagcgcctggccaagctgcaggacccattctctctataccgctgccacaccatcatgaactgcacaaggacctgtcctaagggtctgaatccagggaaagctattgcagagatcaagaaaatgatggcaacctataaggagaagaaagcttcagtttaactgtttccatgctaaacatgatttataaccagctcagagctgaacataatttatatctaatttgagttcctttaaagatcttggttttccatgaatacagcatgtataataaaaattttaaga

SEQ ID NO: 2947 - DNA, 901 bp, Homo sapiens
gcctcggtgatgtcgtgggttcaagcagcctccttgatccagggccctggagacaaaggggacgtgtttgacgaagaagcagacgagtcgctcctggcgcagcgggaatggcagagtaacatgcaaagacgagtcaaagaaggttatagagatggaatagatgctggcaaagcagttactcttcaacagggcttcaatcaaggttataagaaaggtgcagaagtcattttaaactatggacgactccgaggaacattgagtgctttgctctcctggtgtcaccttcataataataattcaactttgatcaataaaataaacaatcttctggatgcagttggccagtgtgaagagtatgtgctcaaacatctgaaatcaatcactccaccgtcccatgttgtagatttattggactccattgaggatatggacctttgtcatgtagttccagctgagaaaaagattgatgaagctaaagatgaaagactctgtgaaaataatgctgagtttaacaaaaactgtagcaagagccatagtgggatagattgttcatatgtagaatgttgtagaacacaggagcatgcacattcagaaaacccaagccccacatggattttggaacagacagccagtttagttaaacagctgggcctatcagtagatgtattacaacacctcaaacaactataaaattaccttcccttttctaatgaaaataatgttcagaacatttggtttcctaacaatcgaaatttgtactggtttctgcatcaaacacctcaactgtagggttaccctttatggaagtttgaaattaacactattgtcttcaaaattaacactattaaatgtaatataagcctttaaaaaaaaaaaaaaaaaaaaaaaaaaaaaaaaaaaa

SEQ ID NO: 2948 - DNA, 3052 bp, Homo sapiens
catttcaggccccggacaggaggcagtgccgcttcggccgaaggcccgagcgcccgaggcgtctgggatggtgtgggaccggcaaaccaagatggagtatgagtggaaacctgacgagcaagggcttcagcaaatcctgcagctgttgaaggagtcccagtccccagacaccaccatccagagaaccgtgcaacaaaaactggaacaacttaatcagtatccagactttaacaactacttgatttttgttcttacaaaattaaaatctgaagatgaacccacaagatcattgagtggtcttatcttgaagaataatgtgaaagcacactttcagaacttcccaaatggtgtaacagactttattaaaagtgaatgtttaaataatattggtgactcctctcctctgattagagccactgttggtattttgatcacaactatagcctccaagggagaattgcagaattggcctgacctcttaccaaaactctgtagcctgttggattctgaagattataatacctgtgagggagcatttggtgcccttcagaagatttgtgaagattctgctgagattttagacagtgatgttttagatcgtcctctcaacatcatgattcccaaatttttacagttcttcaagcatagtagtccaaaaataaggtctcacgctgttgcatgtgtcaatcagtttatcatcagtaggactcaagctctaatgttgcacattgattcttttattgagaatctctttgcattagctggtgatgaagaaccagaggtacggaaaaatgtgtgccgagcacttgtgatgttgctcgaagttcgaatggatcgcctgcttcctcacatgcataatatagttgagtacatgctacagaggactcaagatcaagatgaaaatgtggctttagaagcctgtgaattttggctaactttagctgaacagccaatatgcaaagatgtactcgtaaggcatcttcctaagttgattcctgtgttagtgaatggcatgaagtactcagacatagatattatcctacttaagggtgatgttgaagaagacgaaacgattcctgatagtgaacaggatatacggccacgttttcaccgatcgaggacggtggctcagcagcatgatgaagatggaattgaagaggaagatgatgatgatgatgaaattgatgatgatgatacaatttctgactggaatctaagaaaatgttctgctgctgccctggatgttcttgcaaatgtgtatcgtgatgaactgctgccacatattttgccccttttgaaagaattactttttcatcatgaatgggttgttaaagaatcaggcattttggttttaggagcaattgctgaaggttgcatgcagggcatgattccatacttgcctgagcttattcctcaccttattcagtgcctctctgataaaaaggctcttgtgcgttccataacatgctggactcttagccgctatgcacactgggtggtcagccagccgccagacacgtacctgaagccattaatgacagaattgctaaagcgcatcctggacagcaacaagagagtacaagaagctgcctgcagtgcctttgctaccctagaagaggaggcttgtacagaacttgttccttaccttgcttatatacttgataccctggtctttgcatttagtaaataccagcataagaacctgctcattctttacgatgccataggaacattagcagattcagtaggacatcatttaaacaaaccagaatatattcagatgctaatgcctccactgatccagaaatggaacatgttaaaggatgaagataaagatctcttccctttacttgagtgcctatcttcagttgccacagcactgcagtctggattccttccgtactgtgaacctgtgtatcagcgttgtgtaaacctagtacagaagactcttgcacaagccatgctaaacaatgctcaaccagatcaatatgaagctccagataaagattttatgatagtggctcttgatttactgagtggcctggctgaaggacttggaggcaacattgaacagctggtagcccgaagtaacatcctgacactaatgtatcagtgcatgcaggataaaatgccagaagttcgacagagttcttttgccctgttaggtgacctcacaaaagcttgctttcagcatgttaagccttgtatagctgatttcatgccaatattgggaaccaacctaaatccagaattcatttcagtctgcaacaatgccacatgggcaattggagaaatctccattcaaatgggtatagagatgcagccttatattcctatggtgttgcaccagcttgtagaaatcattaacagacccaacacaccaaagacgttgttagagaatacagcaataacaattggtcgtcttggttacgtttgtcctcaagaggtggcccccatgctacagcagtttataagaccctggtgcacctctctgagaaacataagagacaatgaggaaaaggattcagcattccgtggaatttgtaccatgatcagtgtgaatcccagtggcgtaatccaagattttatatttttttgtgatgccgttgcatcatggattaacccaaaagatgatctcagagacatgttctgtaagatccttcatggatttaaaaatcaagttggcgatgaaaattggaggcgtttctctgaccagtttcctcttcccttaaaagagcgtcttgcagctttttatggtgtttaatctaatacacttaagctgcagtcccaaaattaggggtccttcagtcttggagactataagggagcctctgcacccagggaaaatgttaccctttacaggggggaagggtaaaccagtagggaatacagtacaatcccaaccctactgggaggggcgggagggaggtgttgccgtcactgtattaagtcgatgttgggaaacgttttaacatctggagcctttgtgggtggaaatatgtctccagttacaactccgcagtggatgtgaagaagcaaaaaaaaaaaaaaa

SEQ ID NO: 2949 - DNA, 3026 bp, Homo sapiens
ggagcagttccgccgggtttcactgtccgtgacttccttcggggcacctcaggcagcaaaccaagatggagtatgagtggaaacctgacgagcaagggcttcagcaaatcctgcagctgttgaaggagtcccagtccccagacaccaccatccagagaaccgtgcaacaaaaactggaacaacttaatcagtatccagactttaacaactacttgatttttgttcttacaaaattaaaatctgaagatgaacccacaagatcattgagtggtcttatcttgaagaataatgtgaaagcacactttcagaacttcccaaatggtgtaacagactttattaaaagtgaatgtttaaataatattggtgactcctctcctctgattagagccactgttggtattttgatcacaactatagcctccaagggagaattgcagaattggcctgacctcttaccaaaactctgtagcctgttggattctgaagattataatacctgtgagggagcatttggtgcccttcagaagatttgtgaagattctgctgagattttagacagtgatgttttagatcgtcctctcaacatcatgattcccaaatttttacagttcttcaagcatagtagtccaaaaataaggtctcacgctgttgcatgtgtcaatcagtttatcatcagtaggactcaagctctaatgttgcacattgattcttttattgagaatctctttgcattagctggtgatgaagaaccagaggtacggaaaaatgtgtgccgagcacttgtgatgttgctcgaagttcgaatggatcgcctgcttcctcacatgcataatatagttgagtacatgctacagaggactcaagatcaagatgaaaatgtggctttagaagcctgtgaattttggctaactttagctgaacagccaatatgcaaagatgtactcgtaaggcatcttcctaagttgattcctgtgttagtgaatggcatgaagtactcagacatagatattatcctacttaagggtgatgttgaagaagacgaaacgattcctgatagtgaacaggatatacggccacgttttcaccgatcgaggacggtggctcagcagcatgatgaagatggaattgaagaggaagatgatgatgatgatgaaattgatgatgatgatacaatttctgactggaatctaagaaaatgttctgctgctgccctggatgttcttgcaaatgtgtatcgtgatgaactgctgccacatattttgccccttttgaaagaattactttttcatcatgaatgggttgttaaagaatcaggcattttggttttaggagcaattgctgaaggttgcatgcagggcatgattccatacttgcctgagcttattcctcaccttattcagtgcctctctgataaaaaggctcttgtgcgttccataacatgctggactcttagccgctatgcacactgggtggtcagccagccgccagacacgtacctgaagccattaatgacagaattgctaaagcgcatcctggacagcaacaagagagtacaagaagctgcctgcagtgcctttgctaccctagaagaggaggcttgtacagaacttgttccttaccttgcttatatacttgataccctggtctttgcatttagtaaataccagcataagaacctgctcattctttacgatgccataggaacattagcagattcagtaggacatcatttaaacaaaccagaatatattcagatgctaatgcctccactgatccagaaatggaacatgttaaaggatgaagataaagatctcttccctttacttgagtgcctatcttcagttgccacagcactgcagtctggattccttccgtactgtgaacctgtgtatcagcgttgtgtaaacctagtacagaagactcttgcacaagccatgctaaacaatgctcaaccagatcaatatgaagctccagataaagattttatgatagtggctcttgatttactgagtggcctggctgaaggacttggaggcaacattgaacagctggtagcccgaagtaacatcctgacactaatgtatcagtgcatgcaggataaaatgccagaagttcgacagagttcttttgccctgttaggtgacctcacaaaagcttgctttcagcatgttaagccttgtatagctgatttcatgccaatattgggaaccaacctaaatccagaattcatttcagtctgcaacaatgccacatgggcaattggagaaatctccattcaaatgggtatagagatgcagccttatattcctatggtgttgcaccagcttgtagaaatcattaacagacccaacacaccaaagacgttgttagagaatacagcaataacaattggtcgtcttggttacgtttgtcctcaagaggtggcccccatgctacagcagtttataagaccctggtgcacctctctgagaaacataagagacaatgaggaaaaggattcagcattccgtggaatttgtaccatgatcagtgtgaatcccagtggcgtaatccaagattttatatttttttgtgatgccgttgcatcatggattaacccaaaagatgatctcagagacatgttctgtaagatccttcatggatttaaaaatcaagttggcgatgaaaattggaggcgtttctctgaccagtttcctcttcccttaaaagagcgtcttgcagctttttatggtgtttaatctaatacacttaagctgcagtcccaaaattaggggtccttcagtcttggagactataagggagcctctgcacccagggaaaatgttaccctttacaggggggaagggtaaaccagtagggaatacagtacaatcccaaccctactgggaggggcgggagggaggtgttgccgtcactgtattaagtcgatgttgggaaacgttttaacatctggagcctttgtgggtggaaatatgtctccagttacaactccgcagtggatgtgaagaagcaaaaaaaaaaaaaaa

SEQ ID NO: 2950 - DNA, 4163 bp, Homo sapiens
gagggagtgaaatgcttaattcaggaatggattttggagtttctgggtgctgaagaaatagggcctttccgcctgcgggcccagtgagtcgacacggtgggggcccgcgatccccgggacttaccactgaataaatccagtccagcgtgcgacgacttactggcttcatggggtcgcagccgccgctggggtctccgctgtctcgcgaggagggtgaagcgcccccgcctgctcccgcttcggagggtaggcggagaagtcgccgggtacgccttcgcggatcctgccgacaccgacctagctttctgggctgccgggagctcgcggcgagcgccccagccaggcctgcgccggcatcctccgagataatggcatcagctgctaaggaatttaaaatggacaacttttcacctaaagctggcactagcaaattgcaacagacagtaccagctgatgcatctcctgattctaagtgtcctatatgcttggatagatttgataatgtgtcttacttagatcgctgcttacataagttctgttttcgctgtgtacaggagtggtcaaaaaacaaagctgaatgcccactatgtaaacagccctttgattctattttccattctgtgagggcagaagatgacttcaaggagtatgtcctaaggccttcgtataatggttcttttgtcacccctgatcgacgatttcgctaccgtacaactctgacaagggaacgaaatgcttctgtgtattcacctagtggtcctgtgaacagaagaacaacaactccaccggatagtggagtactgtttgaagggttaggcatttcaacaagacctagagatgttgaaattcctcagtttatgagacagattgcagtaaggaggccaactacggcagatgaaagatctttgcggaaaattcaagaacaagatattattaattttagacgaactctttatcgtgctggtgctcgagttagaaatattgaagatggtggccgctacagggatatttcagctgaatttttccgtagaaatccagcttgccttcacagattagtcccctggttaaaacgtgaacttacagttctttttggagctcatggatctttagtgaatattgtccagcatattatcatgagtaatgttactcgctatgacttggagagtcaggcatttgtgtctgatttaagaccatttttacttaatcgaactgagcattttatacatgaatttatcagttttgcccgatctccttttaacatggcagcctttgaccagcatgccaattatgattgccctgctccttcatacgaagaaggcagccattctgattcttcagtcataacaatatctccagatgaggctgagacccaagagctggatattaatgtagccactgttagtcaggcaccatgggatgatgaaactccaggaccatcttactcaagctcagagcaggtacacgttactatgtcttctcttttaaatacttctgacagttcagatgaagaacttgtcacaggaggagccacgtctcagatacaaggagtacaaaccaatgacgacctaaataatgacagtgatgattcttcagataattgtgtcattgttgggtttgttaaaccactagctgagaggaccccagaacttgttgaactgtcctctgattctgaggacttaggttcttatgagaaaatggagacagtgaagacacaagaacaggagcaatcttacagttctggtgatagcgatgttagtagatgctcatctccacactctgtccttggaaaggatgaacaaataaataaaggtcattgtgattctagtacaagaatcaaatcaaagaaggaagagaaacgatctacatcattgtcatctcccagaaacctgaactcatctgtaagaggagacagagtatattctccatataaccatagacacagaaagaggggaagatcaagaagttcagattcacgttctcagagtagaagtgggcatgatcagaagaatcatagaaagcatcatgggaagaaaagaatgaaaagtaaacgatccagaagcagggaaagtagcagacctagagggagaagagacaaaaagagatcaagaactagagatagcagttggtccagaagaagccaaactctgtctctaagtagtgaaagcacaagcagatcaaggtctcgtagcagtgatcatggtaaaagaagatcacggagcagaaatagagatcgttattatttaagaaataattatggaagcagatacaaatgggagtatacttattacagtagaaacaaggacagggatgggtacgaatcatcttacaggaggaggactctgtccagagctcattattctagacagtcttcaagtccagaatttagagttcagtccttttctgaaagaacaaatgctaggaaaaaaaataatcacagtgagaggaagtattactactatgaaaggcacagatcaaggagcctgtctagtaacagatcaaggactgcatctaccgggactgaccgggtgagaaatgaaaagcctggagggaaacgaaaatacaaaacacggcatttggagggtactaacgaagtggctcagccatctcgtgaatttgcttctaaagcaaaggacagtcattaccaaaaatcttcatcaaaattggatggaaactacaaaaatgagagtgataccttttcagacagccgatcatcagacagagagacaaaacacaaaaggagaaaaaggaagacccggagcctaagtgtagagatagtttatgaaggaaaagctactgatacaactaaacaccataaaaagaaaaagaagaaacataagaagaagcataagaaacaccatggagataatgcttcacgttccccagttgtaattaccattgacagtgacagtgataaggattctgaagtaaaggaggatacagaatgtgacaatagtggtcctcaagaccctctacaaaatgagtttttggctccttccttggaaccatttgaaactaaagatgtagttacaatagaagctgaatttggtgtgctggacaaggaatgtgatattgccacacttagtaacaacttgaataatgccaacaaaactgtagataatattccacctctggcagcttcagttgaacaaactctcgatgtaagagaagagagcacctttgtttctgatttggagaaccagcccagtaacattgtgtctcttcaaactgagccatcaaggcaattgccatcgccacggacatcattaatgtcagtatgtcttggtagagactgtgatatgtcttaaaactgccaaagcatttcattgagaattatgatgttataaaaaggaaaaaggaagaatgtcgtctactgcagtctatttaaagatgacatttggtgaaaactctcttcctccttacaatattttaaatgattttttttttggtgttaatttgtaaaaatcattatttgttcaaaatgtatgtcccaccctcaaagatatgcacttttaagtgaagaaaatgatactgctagcagcttatttaaaacttggggtcctttttaaataagaaaaattatataaattttagaagttatttcataaagccatacggtattgacatatttttaaggtagtcaatgagtatttttgaattttttttttttgagagttattctggaaatgtgttataagctaggagaatccctttggacagtctttatttttcttcttaaaaatttatatgattcaaaaccatttcttcaggttaaattgaggcattttaatctgcacagtttatcttctgccaaaataaaaatttactatttcctttatatacttgtttatctggactgccagtaaaacaaatgtgtattcaacaaaagaaaaaaaataaaacagtaacactttaaaacaagaatcagacattttcctatgcagtatttttttttaaagtttattttagtaaagttaaaatcttgaaagtagctaagggcataattatgtcataaatactgaacttcaggtgaacaaatactttatagttttaattattttctttgattttgaggagtatcttatttgctttctatcatcagtaaaaacagcatttaacttgctaaataaacatgaaaaacccttgtcataaaaaaaaaaaaaaaa

SEQ ID NO: 2951 - DNA, 1098 bp, Homo sapiens
tggtcgcctaagctgtttagtgaaacttcttccacctttctccattcctctaggtgctttttctgaacctggatgtgaggcattaaaggatccgacggaaatagaattgaaggcattctaaaatggctaaccgtacagtgaaggatgcgcacagcatccatggcaccaaccctcaatatctggtggagaagatcattcgaacgcgaatctatgagtccaagtactggaaagaggagtgctttggacttacagctgaacttgtagtcgataaagccatggagttaagaaacgctatgtattagaggaagctgagcaactggagcctcgagttagtgctctggaagaggacatggatgatgtggagtccagtgaagaggaagaagaggaggatgagaagttggaaagagtgccatcacctgatcaccgccggagaagctaccgagacttggacaagccccgtcgctctcccacactgcgctacaggaggagtaggagccggtctcccagaaggcggagtcgatctcccaaaaggagaagcccctcccctcgccgagaaaggcatcggagcaagagtccaagacgtcaccgcagcaggtcccgagatcggcggcacagatcccgttccaagtccccaggtcatcaccgtagtcacagacacaggagccactcaaagtctcccgaaaggtctaagaagagccacaagaagagccggagagggaatgagtaatggactcagtttggttttagtccacatggcctcctgtggatatgaggatatctgtatgtggaaggattaagatctcccccaggcagctataagaatattttagtttttttcttatcaagtttctcaacctttatttttaatgaaggaggtgctgagttttgtatctttttaatcataatcaacatcagtttttgacccaactaaccttgactgtattcaaacttatgagagtataaaggatctggaggttggggatatgactgacaaggaaaggctgtggccacctgatgaccctttccctttttattaaaccggacacacctgtttcccataaaaaaaaaaaaaaaaaaaaaaaaaaaaaaaaaaaaaaa

SEQ ID NO: 2952 - DNA, 2613 bp, Homo sapiens
attgattcgataggcgacgcggggagcggaagccctttacactacggtgtttccggcttcaagatggtcgcctaagctgtttagtgaaacttcttccacctttctccattcctctaggtgctttttctgaacctggatgtgaggcattaaaggatccgacggaaatagaattgaaggcattctaaaatggctaaccgtacagtgaaggatgcgcacagcatccatggcaccaaccctcaatatctggtggagaagatcattcgaacgcgaatctatgagtccaagtactggaaagaggagtgctttggacttacagctgaacttgtagtcgataaagccatggagttaaggtttgtgggtggcgtctatggtggcaacataaaaccaacaccctttctgtgtttaaccttgaagatgcttcaaattcaacccgagaaggatatcattgtagagtttatcaaaaatgaagatttcaagtatgtccgcatgctgggggcactttacatgaggctgacaggcactgcaattgattgctacaagtacttggaacctttgtacaatgactatcgaaaaatcaagagccagaaccgaaatggggagtttgaattgatgcatgttgatgagtttattgatgaactattgcacagtgagagagtctgtgatatcattctgccccgactacagaaacgctatgtattagaggaagctgagcaactggagcctcgagttagtgctctggaagaggacatggatgatgtggagtccagtgaagaggaagaagaggaggatgagaagttggaaagagtgccatcacctgatcaccgccggagaagctaccgagacttggacaagccccgtcgctctcccacactgcgctacaggaggagtaggagccggtctcccagaaggcggagtcgatctcccaaaaggagaagcccctcccctcgccgagaaaggcatcggagcaagagtccaagacgtcaccgcagcaggtcccgagatcggcggcacagatcccgttccaagtccccaggtcatcaccgtagtcacagacacaggagccactcaaagtctcccgaaaggtctaagaagagccacaagaagagccggagagggaatgagtaatggactcagtttggttttagtccacatggcctcctgtggatatgaggatatctgtatgtggaaggattaagatctcccccaggcagctataagaatattttagtttttttcttatcaagtttctcaacctttatttttaatgaaggaggtgctgagttttgtatctttttaatcataatcaacatcagtttttgacccaactaaccttgactgtattcaaacttatgagagtataaaggatctggaggttggggatatgactgacaaggaaaggctgtggccacctgatgaccctttccctttttattaaaccggacacacctgtttcccatttcgctgtagtttagtttttggtttgttgtggttggaactgctttgagaatcctgggatttgtgctgctgctgttattcaaagatcaaaggagtaaaacatagttgctcctaacttttttccagcagcagcaagtggtaataaacatgaaaactggtttgtagcagttttgaaagaatagaatgcattcaaatgtaaggctgcttctggatcattaaagccagtttcatcaaacagttcaacagagagcagcacttaataccctttatacagcccgttttttcatagtttcatttgttcttgcccacaagcttgaaatccaggttaaggtatccagcctttatcatataagcattgacattatccaggcctagtcagtagcagtagggtaacgggattgaaaaagatttgatggagaggaaagtatctaatattagtcatggttttgacctaaattgctagacagtcgtgccattcacaaagtcagaaaatacagcaggaagagacagcttttagaggggcagagaattagaggatggtggtagtaatgaaaatgatgcattcagtttaacaagtttaatttgagacagctatggtatagctaaaaacaaaagcccataaagttggagatagggaccagagtttaacatagcgatctaggccagaattgacaatgtttaagtaatggtggaatctgtcaataagacttcccagagtgttaatatatatcagaaatgcacacaacagaaccataggcaacaccaacacaggaagaaatagaagtcacctattgaaaactggaatggcccattcagaaagacaggagaattaggagagagtgagtgaaagaagccaagggtcaagaatgcagaagcaaaggaaggactaaaaagcctccacggacatcgataatcaagagattattaagatctttgctagaagagttcctttacctgtacttaactcccttaaaaagagaaaagtgatggaatgacttctgcaactgtagtcccagcaggaactgtgaagaccagctgccctgcaggatccagtttttcttgggaggttgtatctggtcataaggtaaacattctatatattctatgcctgctctagaattgaaagacttcagcagtattaaagcattttttaatctt

SEQ ID NO: 2953 - DNA, 3567 bp, Homo sapiens
cggccgcccctcggccccggagcccctcggcggcgccaccatgtactcgggagccggccccgcacttgcacctcctgcgccgccgccccccatccaaggatatgccttcaagcctccacctagacccgactttgggacctccgggagaacaatcaaattacaggccaatttcttcgaaatggacatccccaaaattgacatctatcattatgaattggatatcaagccagagaagtgcccgaggagagttaacagggaaatcgtggaacacatggtccagcactttaaaacacagatctttggggatcggaagcccgtgtttgacggcaggaagaatctatacacagccatgccccttccgattgggagggacaaggtggagctggaggtcacgctgccaggagaaggcaaggatcgcatcttcaaggtgtccatcaagtgggtgtcctgcgtgagcttgcaggcgttacacgatgcactttcagggcggctgcccagcgtcccttttgagacgatccaggccctggacgtggtcatgaggcacttgccatccatgaggtacacccccgtgggccgctccttcttcaccgcgtccgaaggctgctctaaccctcttggcgggggccgagaagtgtggtttggcttccatcagtccgtccggccttctctctggaaaatgatgctgaatattgatgtgtcagcaacagcgttttacaaggcacagccagtaatcgagtttgtttgtgaagttttggattttaaaagtattgaagaacaacaaaaacctctgacagattcccaaagggtaaagtttaccaaagaaattaaaggtctaaaggtggagataacgcactgtgggcagatgaagaggaagtaccgtgtctgcaatgtgacccggcggcccgccagtcaccaaacattcccgctgcagcaggagagcgggcagacggtggagtgcacggtggcccagtatttcaaggacaggcacaagttggttctgcgctacccccacctcccatgtttacaagtcggacaggagcagaaacacacctaccttcccctggaggtctgtaacattgtggcaggacaaagatgtattaaaaaattaacggacaatcagacctcaaccatgatcagagcgactgctaggtcggcgcccgatcggcaagaagagattagcaaattgatgcgaagtgcaagtttcaacacagatccatacgtccgtgaatttggaatcatggtcaaagatgagatgacagacgtgactgggcgggtgctgcagccgccctccatcctctacgggggcaggaataaagctattgcgacccctgtccagggcgtctgggacatgcggaacaagcagttccacacgggcatcgagatcaaggtgtgggccattgcgtgcttcgccccccagcgccagtgcacggaagtccatctgaagtccttcacagagcagctcagaaagatctcgagagacgccggcatgcccatccagggccagccgtgcttctgcaaatacgcgcagggggcggacagcgtggagcccatgttccggcacctgaagaacacgtatgcgggcctgcagctggtggtggtcatcctgcccggcaagacgcccgtgtacgccgaggtcaagcgcgtgggagacacggtgctggggatggccacgcagtgcgtgcagatgaagaacgtgcagaggaccacgccacagaccctgtccaacctctgcctgaagatcaacgtcaagctgggaggcgtgaacaacatcctgctgccccagggcaggccgccggtgttccagcagcccgtcatctttctgggagcagacgtcactcacccccccgccggggatgggaagaagccctccattgccgccgtggtgggcagcatggacgcccaccccaatcgctactgcgccaccgtgcgcgtgcagcagcaccggcaggagatcatacaagacctggccgccatggtccgcgagctcctcatccagttctacaagtccacgcgcttcaagcccacccgcatcatcttctaccgcgacggtgtctctgaaggccagttccagcaggttctccaccacgagttgctggccatccgtgaggcctgtatcaagctagaaaaagactaccagcccgggatcaccttcatcgtggtgcagaagaggcaccacacccggctcttctgcactgacaagaacgagcgggttgggaaaagtggaaacattccagcaggcacgactgtggacacgaaaatcacccaccccaccgagttcgacttctacctgtgtagtcacgctggcatccaggggacaagcaggccttcgcactatcacgtcctctgggacgacaatcgtttctcctctgatgagctgcagatcctaacctaccagctgtgtcacacctacgtgcgctgcacacgctccgtgtccatcccagcgccagcatactacgctcacctggtggccttccgggccaggtaccacctggtggataaggaacatgacagtgctgaaggaagccatacctctgggcagagtaacgggcgagaccaccaagcactggccaaggcggtccaggttcaccaagacactctgcgcaccatgtactttgcttgacatgttttagtgtttagcgattgtgtaccgagtgggattcacgagaccagctacactcagaccaacagatggccagcccttccgtgacagccagcatcgaacatgagacgtcattgattttattagattctccgttttccagaatgccttccgtcccagatttcaaacttggattttgaactgcagacctgtatgagaacccaatgtcataggaaatatggtttgctaaaatctataagctgcttattaaaacaaagtcccatgtgtcctaaaaatctcctaaaaccagtctatgaactcagggctttaaaacatttttaatttatttggtcattcaatttacttgtttttaatacatgattctctatgaaattgatgggctcaaactagctgtgaatcttctgagagtgaaagcaacacaaaacacaagtgtggttttaaagccttgaacattctgatgttgtcactaaagttgatttccaggcgatgctcgtgtgcccctggcgtggctcacccaagttcctcgactgagggccggtggccatgcagaggcgtccgcaggtgccgtgttctgccagcaccgcccttcacccggcctgaactaaggagcagtggcagaaggtgggccccgtgtgtttacagcatttccaggtccagagaggttggcagacaagtgccattttaataaaaaatgtatttaaaaaaagaaaaaagacaatatactgacagtctaatcatcagatttgtcctataggactgtgacatttattttccaaagtttttaaagaatacgggtctgtggtgataaatacagtacaatcctttttcactgttatgtctttaatgtaagagaaaaatatatatatctggtttgcagtaaaaaaaaaaaaaaaaaaaaaaaaaaaaaaaaaaaaaaaaaaaaaaaaaaaaaaaaaaaaaaaaaaaaa

SEQ ID NO: 2954 - DNA, 1031 bp, Homo sapiens
cgacagccggaagtcccgcctgccgtgtagtcgccgccgtcgctgccgctgccgctgccgccgtcgttgttgttgtgctcggtgcgctgagctccgcggctccgcgagccggttccgtccccttcccgccgccgccatgaagtggatgttcaaggaggaccactcgctggaacacagatgcgtggagtccgcgaagattcgagcgaaatatcccgacagggttccggtgattgtggaaaaggtctcaggctctcagattgttgacattgacaaacggaagtacttggttccatctgatatcactgtggctcagttcatgtggatcatcaggaaaaggatccagcttccttctgaaaaggcgatcttcctgtttgtggataagacagtcccacagtccagcctaactatgggacagctttacgagaaggaaaaagatgaagatggattcttatatgtggcctacagcggagagaacacttttggcttctgagggccattgctgggctaggtgcaccgtaactgcttgtgtatcttgtaaatagccagccattttcagttattataccagaacctcttcacatagacctattagtgcatttgtaactggatttatttcttaatatattggaaggttttgtttccttagactagtaaattatcatacagagttttattttgagtttttctttttgtgcattgtcctcatgcctgtattctccaggaaacttgtccttctggaaatcatattgaatgatatttctatatcgaagtgaggtaggtgcggtattaaagtgaaagggaaggtgatgcatttattctgggttatgcttgaagtgttagatggctaagtattaaaattatccaaattaaatccttagcagtcagaacacttgcttcactagaatatgccaactgccaatcatgttggactgagctaatttgttcctctttctgaaactattaaggtaaataattaacaataaaaattctcttataaaggcaaaaaaaaaaaaaaaaaaaaaaaaaaaaaa

SEQ ID NO: 2955 - DNA, 3246 bp, Homo sapiens
cgagcttctcacggagcctctcttgagcctcttggcagtttccccctctgtgcccctcacgtttccaccagaaacgtgaaggcagaggccacagattctccctgagccacctcacttggaagcaccatgtccggatgagatcgcacttcctgcagtgggcattagccacgtccaggtagaaccaaacctgttgcttttgtatgttgggtcaacttggcctgacgtttcagaggtagacacgagatagggagtttgttgcgggggtggggagaagtggtagacatgctggctaactgattatgattaagagaaacttagaagctgaagccagagagcatctcaaaggttcctgatacaatggatggtgtcactccaaccctttcgacaatcagagggaggaccttggagtccagcactctgcatgtgactccccgcagcctggacagaaataaagaccagatcaccaacatcttttccgggtttgcgggactcctcgccatcctcctggtcgttgcggttttctgcatcttgtggaattggaataaacggaagaagcgacaagttccttacctccgagttaccgtcatgcccttgctgactttgccacaaaccagacaaagagccaaaaatatttatgacatcttgccttggcgacaggaagacctggggagacatgagtcgaggagtatgcgcattttcagtactgagagcctcctctccagaaattctgagagcccggagcatgtgccctcccaagcaggcaatgccttccaggagcatacagcccacatccatgccacagagtacgcggtgggtatctatgacaacgccatggtcccccagatgtgtgggaacctcactccctcggcacactgcatcaatgtcagagcttccagagactgcgcaagcatttcttcagaggattcgcatgattatgtcaatgtccccacagcagaagagattgctgagactctagcttctaccaaaagcccttccagaaatctctttgttcttcccagtacccagaagctggagtttactgaggaaagagatgagggctgtggagatgctggtgactgcaccagtttgtattctccaggagctgaggacagtgattcactcagcaatggagaaggttcttctcagatctcaaatgactatgtcaacatgacagggttggatctcagtgccatccaggaaaggcagctctgggtggcttttcagtgctgcagagactatgaaaatgttccagcagcagatcccagtggaagccagcagcaggctgagaaagatgtgccatcctcaaacataggtcatgtcgaggacaagacagatgatcccgggacccatgtccaatgtgtcaaaaggacattccttgcttcaggggattatgcagactttcagccattcacacagagtgaggacagtcagatgaaacatagagaagagatgtcaaatgaggactccagtgactatgaaaatgtgctaactgccaagttaggaggcagggactctgagcaggggcctggcactcagctccttcctgatgaatgaagacccaggtacccagccataaagccacattgagtagtctatcccataggattgactactgcagagtctagtgcagacccgtgatcaccttagtgcttcagtggattcactggttagattaaaaagaggctgagatgagcagtgaactaagaggccacacaaaagcagaggtttgggaattccagaagggaattcttctcaagcagagtgtggttatctcctgtaccagcctaagaatgtttgctgaaactgcttcctagaactgtgaagaaagcaggaaagtagtgcacagtagtctaagattattaccttcattaataccaacaggctgcaaagcaagagtatagattattgtataatccagtcagaggtcaaaaggaaggaagaagttggagtggagtggggtgggcaatttccattttaaagagtgtaggcaggccaggtgcagtggctcatgcctgtaatcccagcattttggtaggccgaggagggcagatcacttggtgccaggagttctagaccagcctggccaacatgacccatctttactaaaaatacaaaaattagccaggcgtggtggtgtgcccctgtaatcccagctactcaggaggctgaagcaggagaatcgcttgaacccgggaggtggaggttgcagcaagccgagattgtgccactgtactccagcctggtgacagagcgagactccctctcaaaaaaacaaaacaaacaaaaaagaagtgtgggcaaccaaatgtaggtaaggatgaagaagaacaggaactctcactggtggctgatgggattgcaaagcgtcagggcagctttgaaaaacttttcagcagtttcttataagcataacttatcatatggcccagccatttcactactagaaattgacccaagtgaactgaaaacttatgttcacacaaaaactcgcacatgactgtttatagcagcttcattcataattaccaaaaactagaaataacccagatatccttcaacaggtgattggataagctgttgatatccattccttgagtttatccatactcaacagtaaaaaatgaactcttggttcacacaataatatagacatatcttaaatccattttgctaagtgaaagaagctaggcctaaaagtctacatgttgggcgattctatttatatgacattctggaaaaggcaaaactatagggatgaagaacagatcagttgttgtcaggtttgagaaaaggagggaagtttgctacaaaggggctgcaaagggaataggctgatggagctgttctgtatggtactgtgtggtggatacatgacaatatccatttgcaaacacaagaactatacacatggccaggcgcggtggctcacacccgtaatcccagcactttgcggggccgaggcaggggaacacaaggtcaggagatcaagactgtcctggacaacatggtgaaaccctgtctctactgtctctaacatttgtaaacctgtctctaatttgtaatttgtaaaccctgtctctcatatttgtaaaaatacaaaaattagcttggcatggtggtgtgcgcctgtagtcccagctactaggaggctgaggcaggagaatcacttgaaccaggaaggcggactgcattccagcctgggcaacagagaaagactctgtctcaaaaaaaaaaaaaaaaaaaaaa

SEQ ID NO: 2956 - DNA, 2795 bp, Homo sapiens
atcagcgagggattcacggcgaaatgagactgttcgtgagtgatggcgtcccgggttgcttgccggtgctggccgccgccgggagagcccggggcagagcagaggtgctcatcagcactgtaggcccggaagattgtgtggtcccgttcctgacccggcctaaggtccctgtcttgcagctggatagcggcaactacctcttctccactagtgcaatctgccgatatttttttttgttatctggctgggagcaagatgacctcactaaccagtggctggaatgggaagcgacagagctgcagccagctttgtctgctgccctgtactatttagtggtccaaggcaagaagggggaagatgttcttggttcagtgcggagagccctgactcacattgaccacagcttgagtcgtcagaactgtcctttcctggctggggagacagaatctctagccgacattgttttgtggggagccctatacccattactgcaagatcccgcctacctccctgaggagctgagtgccctgcacagctggttccagacactgagtacccaggaaccatgtcagcgagctgcagagactgtactgaaacagcaaggtgtcctggctctccggccttacctccaaaagcagccccagcccagccccgctgagggaagggctgtcaccaatgagcctgaggaggaggagctggctaccctatctgaggaggagattgctatggctgttactgcttgggagaagggcctagaaagtttgcccccgctgcggccccagcagaatccagtgttgcctgtggctggagaaaggaatgtgctcatcaccagtgccctcccttacgtcaacaatgtcccccaccttgggaacatcattggttgtgtgctcagtgccgatgtctttgccaggtactctcgcctccgccagtggaacaccctctatctgtgtgggacagatgagtatggtacagcaacagagaccaaggctctggaggagggactaaccccccaggagatctgcgacaagtaccacatcatccatgctgacatctaccgctggtttaacatttcgtttgatatttttggtcgcaccaccactccacagcagaccaaaatcacccaggacattttccagcagttgctgaaacgaggttttgtgctgcaagatactgtggagcaactgcgatgtgagcactgtgctcgcttcctggctgaccgcttcgtggagggcgtgtgtcccttctgtggctatgaggaggctcggggtgaccagtgtgacaagtgtggcaagctcatcaatgctgtcgagcttaagaagcctcagtgtaaagtctgccgatcatgccctgtggtgcagtcgagccagcacctgtttctggacctgcctaagctggagaagcgactggaggagtggttggggaggacattgcctggcagtgactggacacccaatgcccagtttatcacccgttcttggcttcgggatggcctcaagccacgctgcataacccgagacctcaaatggggaacccctgtacccttagaaggttttgaagacaaggtattctatgtctggtttgatgccactattggctatctgtccatcacagccaactacacagaccagtgggagagatggtggaagaacccagagcaagtggacctgtatcagttcatggccaaagacaatgttcctttccatagcttagtctttccttgctcagccctaggagctgaggataactataccttggtcagccacctcattgctacagagtacctgaactatgaggatgggaaattctctaagagccgcggtgtgggagtgtttggggacatggcccaggacacggggatccctgctgacatctggcgcttctatctgctgtacattcggcctgagggccaggacagtgctttctcctggacggacctgctgctgaagaataattctgagctgcttaacaacctgggcaacttcatcaacagagctgggatgtttgtgtctaagttctttgggggctatgtgcctgagatggtgctcacccctgatgatcagcgcctgctggcccatgtcaccctggagctccagcactatcaccagctacttgagaaggttcggatccgggatgccttgcgcagtatcctcaccatatctcgacatggcaaccaatatattcaggtgaatgagccctggaagcggattaaaggcagtgaggctgacaggcaacgggcaggaacagtgactggcttggcagtgaatatagctgccttgctctctgtcatgcttcagccttacatgcccacggttagtgccacaatccaggcccagctgcagctcccacctccagcctgcagtatcctgctgacaaacttcctgtgtaccttaccagcaggacaccagattggcacagtcagtcccttgttccaaaaattggaaaatgaccagattgaaagtttaaggcagcgctttggagggggccaggcaaaaacgtccccgaagccagcagttgtagagactgttacaacagccaagccacagcagatacaagcgctgatggatgaagtgacaaaacaaggaaacattgtccgagaactgaaagcacaaaaggcagacaagaacgaggttgctgcggaggtggcgaaactcttggatctaaagaaacagttggctgtagctgaggggaaaccccctgaagcccctaaaggcaagaagaaaaagtaaaagaccttggctcatagaaagtcactttaatagatagggacagtaataaataaatgtacaatctctata

SEQ ID NO: 2957 - DNA, 4181 bp, Homo sapiens
cggaacagcgccccttgcaggccacggcctgcgagtgcctgcgagagctagagagctgcaagcccgggctgctggggggctccctggggttgctgcggggcctgctggggcaggaaggccctgtccagccactcagcctgttgctggccctcgctttgcgcaacaccttggtgctccagtcccgggttggggctggcctggggggactgctcacggataaggtctccccaactgggggtggtccctgggattggacactagtggaggagggcgatggacgccttcagccccaggcacccagctggccggcagctgaggagggagagggggagcgtagccttacagcacgagagcacagccctgaggaggcgcgggagctgcgggctgcggtgatccagcttctggacacctcctatctgctcactcctgtggcccaggcccagctcctgtggctgctgggctgggccctgcggggtctgcagggacagccaccggcactcttcaagccgcagctggtacggctgctaggcacagcacagctgacactgttgcacgccatgcttgcgctcaaggcggcctttggtgaggccttgttcacagcccaggatgaagcgttgctgctccgccggctcaccttggctgcccagcaccctgctctgcctccgcccacccatctcttttaccttcactgcgtcctgagcttccctgagaactggccgctgggccctgaaggtgaggaggctgccccactgctgctagggccccagctatgccgtggtctcctgcccagtctcctgcatgacccaatggccctcctggcccgcctgcatttactgtgcctgctctgtgccgaggaggaagaagaggagaaaggccagcttccaagcccacggcactacctggaagagctgctggctggcttgcggcagcgggcagccctggatgggggcccccgggccttggccactctctgcttccaggcctcgtatctggtggcctgctgcctggctgggcaacctacggtgctgacccccttgatccacggactggcccagctgtaccaagcccggcccatgctggctccccactttgtggacctcttggatcaggtggactctgagctgagggagcccctgaaggtggtgttgcggcaggtggtggtgtccaggccgggcagggatgaagctctttgctggcacctgcaaatgctggcaaaggtggcagatggagatgcccagagtgctaccctcaactttctacaggccgcggctgcccactgcacgaactgggacctacagcagggcctgctgcgggtctgccgggcgctgctgcgggcaggggtgaggggcggcctggtcgacttgctgcaggtgctggccaggcagctggaggaccctgatgggcgtgaccacgcccgcctctactacatcctgctggcacacctggcagcacccaagttgggggtggccctgggcccctcgcttgccgcacctgcactggcctcttcactggtggccgagaaccagggctttgtggcagcactgatggtgcaggaggcaccggccctggtacggctgagcctggggtcccatcgggtcaagggcccactcccagtgttgaagctccagccggaggcgctggagcccatctactctctggagctgcgcttccgtgtggaaggacagctgtatgcacccctggaggctgtccatgtgccctgcctgtgtcctggccgccctgcccgccctctgctcctgcctctgcagccccgatgcccggcccccgcacggctggatgtccatgccctttacaccacatccactggtctcacgtgccatgcccacttgccacccctgttcgtgaactttgccgacctctttctgcctttcccgcagcctccagagggggccgggctgggcttctttgaggagctctgggattcctgcctgccagagggtgctgagagtcgtgtgtggtgtccacttgggccacagggcctggagggcttggtgtcccgccacctggagccttttgtggtggtggcccagcctcctaccagctactgtgtagcaatccacctgcccccggactcaaagctgctgctgcggctggaggcggccctggcagatggagtgcctgtggccctgcggaccgatgactgggccgtgctgcccctggcgggggactacctccgtgggctggcggctgctgtctgagccccgggagaccaggtgggggcaggactgtggcccttgtgggggccaaggcacactcctgtagctctgtcgccaaaaccctgcattccgcagtgccctcgctggcttgttttcttttgggccccggttgggagcaggctcctgggggtgagggtctgtctgagtctgtttttgctgctctagcaagatccctgagacggggtaagttataataaacagaaatgtattggctcagagctctggaggctgggaagtccatagtggagggcccagagcccagtgaggacccttctgcatcttcccatgacagaggacagagtgacaggagtgaggggagagagcgaacccactcccaagataacggcctgagtccacgcaggagggcagagccctcgtggcctgaccacctcttagggtctaatcttatactgttacagtggcaatcgcatttcaacgtgagcgtgggaggggacaaacattcaaaccatagcagggtcataggccccaagaaggcttccagacagaacccggcactgtagagctacagagttccttctcacccagacacactagtgctctccagaatctctgcccaggaggcaggggaaaaatctcctttctgcttcccagagagggtctggccttgcccaaggccactcagtgatttaggaagaaggctgaagctagagtgtggacctgacctgttggacagtacttttctttctttttttttcggggaggggttaaagacaggatctcactctggcgctctggagtgcagtggtgtgattagggatcattgcagactctgcctctcaggctcaggtgatcctcccatctcagcctgcctccgagtagctgggactacaggtgtgagtcaccactgtattttttgcagacaggatctccctgtttcctaggctggtctcgaactcctgggcttaaatgactcttctgcctcagcctcaccaaagtgttgggattactggtgtgagcccccacacctggccgagccagcgcttctcaactcccaaggtttgcaagctccctgccccagggagctcacgccaggcaggccagtgggcctaagccagaaacagaaagacagcagtggccaggtggagagcttcccaagctgtgccgattagagccagctctaggaagggcctgctaataaggtctagggtctgagaccaagttttttctaatctcagcccctaagaaacctaatttgtgcttaggaatcttcccaggtaagaagaactagttcctctagttgttgtttttttttcccaaacatgcaaacactgaggattgagctgtgtggggtcagctgtgctgccaggcacatgtacgttgcctcatttcatccttgcaacagctctgcagggccccgcagatgaggaaatccgtaggcaggagcggttgagtgattttcctaaggtcacccagctgtttggtaatagtgttttgtcatctggtagcaggtttccattaccatgccatcagagcagacctcagccagggccacagaggtcccaaccgtctctgccctcttctgctgcccctgcctcatgggctcccagccacaggttccccatgggccagctttacgcctcctgatccttccgattggggcagactaggagaggaaagacgggcctgggctgggtgcggtggctcatgcctgtaatcccagcactttgagaggctgaggcgggtggatcacctgaggccaggtgtttgagatcagcctggccagcatggcgaaaccctgtgtctaataaaaatacaaaaattagccgggcgtggtggcgggcgcctgtaatcccagctacttgggaggctgaggcaggagaattacttgaacctgggaggcagaagttgcagtgagccgagatcacgccactgcactccagcctgggcgacagagcaaggctctgtctcaaaaaaaaaaaaaaaaaa

SEQ ID NO: 2958 - DNA, 1276 bp, Homo sapiens
cttccctcttcactttgtacctttctctcctcgactgtgaagcgggccgggacctgccaggccagaccaaaccggacctcgggggcgatgcggctgctgcccctgctgcggactgtcctctgggccgcgttcctcggctcccctctgcgcgggggctccagcctccgccacgtagtctactggaactccagtaaccccaggttgcttcgaggagacgccgtggtggagctgggcctcaacgattacctagacattgtctgcccccactacgaaggcccagggccccctgagggccccgagacgtttgctttgtacatggtggactggccaggctatgagtcctgccaggcagagggcccccgggcctacaagcgctgggtgtgctccctgccctttggccatgttcaattctcagagaagattcagcgcttcacacccttctccctcggctttgagttcttacctggagagacttactactacatctcggtgcccactccagagagttctggccagtgcttgaggctccaggtgtctgtctgctgcaaggagaggaagtctgagtcagcccatcctgttgggagccctggagagagtggcacatcagggtggcgagggggggacactcccagccccctctgtctcttgctattactgctgcttctgattcttcgtcttctgcgaattctgtgagccaagcagaccttccctctcatcccaaggagccagagtcctcccaagatcccctggaggaggagggatccctgctgcctgcactgggggtgccaattcagaccgacaagatggagcattgatgggggagatcagagggtctgaggtgactcttgcaggagcctgtcccctcatcacaggctaaagaagagcagtagacagccctggacactctgaagcagaggcaagacaaacacaggcgctttgcaggctgctctgagggtctcagcccatcccccaggaggactgggatttggtatgatcaaatcctcaagccagctgggggcccaggctgaagacctggggacaggtcgattgctggaccagggcaaagaagaagccctgccatctgtgccctgtgggccttttccctggggcagcaccttgccctccccaggggatcactcacttgtcttctatgaagacggactcttcatgaggttgaatttcatgccagtttgtatttttataagtatctagaccaaaccttcaataaaccactcatctttttgttgccctccccaaaaaaaaaaaaaaaaaaaaa

SEQ ID NO: 2959 - DNA, 1110 bp, Homo sapiens
cttccctcttcactttgtacctttctctcctcgactgtgaagcgggccgggacctgccaggccagaccaaaccggacctcgggggcgatgcggctgctgcccctgctgcggactgtcctctgggccgcgttcctcggctcccctctgcgcgggggctccagcctccgccacgtagtctactggaactccagtaaccccaggttgcttcgaggagacgccgtggtggagctgggcctcaacgattacctagacattgtctgcccccactacgaaggcccagggccccctgagggccccgagacgtttgctttgtacatggtggactggccaggctatgagtcctgccaggcagagggcccccgggcctacaagcgctgggtgtgctccctgccctttggccatgttcaattctcagagaagattcagcgcttcacacccttctccctcggctttgagttcttacctggagagacttactactacatctcggtgcccactccagagagttctggccagtgcttgaggctccaggtgtctgtctgctgcaaggagaggagagccagagtcctcccaagatcccctggaggaggagggatccctgctgcctgcactgggggtgccaattcagaccgacaagatggagcattgatgggggagatcagagggtctgaggtgactcttgcaggagcctgtcccctcatcacaggctaaagaagagcagtagacagccctggacactctgaagcagaggcaagacaaacacaggcgctttgcaggctgctctgagggtctcagcccatcccccaggaggactgggatttggtatgatcaaatcctcaagccagctgggggcccaggctgaagacctggggacaggtcgattgctggaccagggcaaagaagaagccctgccatctgtgccctgtgggccttttccctggggcagcaccttgccctccccaggggatcactcacttgtcttctatgaagacggactcttcatgaggttgaatttcatgccagtttgtatttttataagtatctagaccaaaccttcaataaaccactcatctttttgttgccctccccaaaaaaaaaaaaaaaaaaaaa

SEQ ID NO: 2960 - DNA, 1131 bp, Homo sapiens
cttccctcttcactttgtacctttctctcctcgactgtgaagcgggccgggacctgccaggccagaccaaaccggacctcgggggcgatgcggctgctgcccctgctgcggactgtcctctgggccgcgttcctcggctcccctctgcgcgggggctccagcctccgccacgtagtctactggaactccagtaaccccaggttgcttcgaggagacgccgtggtggagctgggcctcaacgattacctagacattgtctgcccccactacgaaggcccagggccccctgagggccccgagacgtttgctttgtacatggtggactggccaggctatgagtcctgccaggcagagggcccccgggcctacaagcgctgggtgtgctccctgccctttggccatgttcaattctcagagaagattcagcgcttcacacccttctccctcggctttgagttcttacctggagagacttactactacatctcggtgcccactccagagagttctggccagtgcttgaggctccaggtgtctgtctgctgcaaggagaggagaccttccctctcatcccaaggagccagagtcctcccaagatcccctggaggaggagggatccctgctgcctgcactgggggtgccaattcagaccgacaagatggagcattgatgggggagatcagagggtctgaggtgactcttgcaggagcctgtcccctcatcacaggctaaagaagagcagtagacagccctggacactctgaagcagaggcaagacaaacacaggcgctttgcaggctgctctgagggtctcagcccatcccccaggaggactgggatttggtatgatcaaatcctcaagccagctgggggcccaggctgaagacctggggacaggtcgattgctggaccagggcaaagaagaagccctgccatctgtgccctgtgggccttttccctggggcagcaccttgccctccccaggggatcactcacttgtcttctatgaagacggactcttcatgaggttgaatttcatgccagtttgtatttttataagtatctagaccaaaccttcaataaaccactcatctttttgttgccctccccaaaaaaaaaaaaaaaaaaaaa

SEQ ID NO: 2961 - DNA, 3224 bp, Homo sapiens
cgaggaccagcacctgaggccgggccgcaggccgacttcacagccaggcgcgcgcgtcgctgctgctgctgcggggctctggcgcgccagccggcgggacagcgggggctggcgggggccggggagcgccagatgatggatttggacatgcttctatgaagaaatgccacatggtccgagagcaaacatgtccaggctactcactttagtgactagggctcggtgccagcacttcccgggtaatcagacgtggtctgaccgaggatcaagaagcacatcatcaccaatgacatcatgacagcaagagagcacagccctcgccatggtgccagggcccgtgcaatgcagcgggcttccaccatcgacgtggcggccgacatgctgggcctctctctggcaggaaatatacaagacccagatgagcccattttagaatttagcttagcttgcagtgagctgcatactccatcgctagatcgaaagccaaatagttttgttgcggtgagtgtcaccacccctcctcaggcattctggacgaagcatgcacagacggagatcattgagggaaccaacaatcctatatttctaagcagtattgccttctttcaagactctcttatcaatcagatgacacaagtcaaactctccgtgtatgatgtcaaagatagatctcagggaacaatgtatttactgggctctggaacgttcattgtcaaagatctgctccaggacaggcatcataggttgcatttaacactaaggtctgcagagagtgaccgtgtaggtaacatcaccgtgattggctggcagatggaggagaagtcagaccaacggccccctgtgacccggtctgtggacactgtcaatgggaggatggttcttcctgtcgatgagagcttgacggaggcgttaggaatccgatccaaatacgcttcattgcgaaaggacactttgctgaaatcggtgttcggtggtgccatctgccgcatgtaccggtttccaaccactgatggtaaccatttgcggatcctggagcagatggcagagagcgtgctctccctgcacgtgccccggcagttcgtgaagctcctactagaggaagatgcagccagagtgtgtgagctggaggagctgggagagctgtccccttgctgggagagcctccggcgccaaattgtcacccagtaccagaccatcatcctcacataccaggagaacctgaccgacctccatcagtacagagggccctcgtttaaagcaagcagtttgaaagcagataaaaagttagaatttgttcccacaaacttgcacatacaaaggatgagagttcaagacgatggaggatcagatcagaactacgacatcgtcaccattggggcgccagcagcacactgccaaggttttaagtcaggaggtctccgcaaaaagctgcacaaatttgaagagaccaagaaacattttgaggagtgttgtacatcatctggctgccagtccataatctacataccccaggatgttgtcagagccaaggagatcatcgcccagatcaacaccctgaaaacccaagtgagttactacgcagagcggctgtcaagggcagccaaggacaggtctgccactggccttgagaggacactcgccatcttggcagacaagacacggcagctggtcacggtctgcgactgcaagctcctggccaactccatccatgggctgaacgctgcacggcctgactacattgcctccaaggcctctcccacttcgactgaggaggagcaggtgatgcttagaaatgaccaggacaccctcatggcccggtggacagggagaaacagccgatcttccctgcaggtggactggcacgaggaggagtgggagaaagtgtggctgaacgtggacaagagcctagagtgcatcattcagcgtgtggacaagctgctgcagaaggagcggctgcatggcgagggctgtgaggatgtcttcccctgtgcaggcagctgcaccagcaagaaagattgcagtccccctcctgaagagtccagcccaggtgaatggagtgaggccctttacccgctgctgaccactctcaccgactgcgtggccatgatgagtgacaaggccaagaaggccatggtattcctgctcatgcaggacagcgcgcccaccatagccacctacctgagcctgcagtaccgccgtgacgtggtcttctgccagacgctgaccgccctcatctgcggcttcatcattaagctgaggaactgcctgcatgacgacggcttcctgcgccagctctacaccatcgggctgctggcccagttcgagagcctgctgagcacctacggggaggagctggcaatgctggaggacatgagccttgggatcatggacttgaggaacgtgaccttcaaagtcactcaggccacttccagcgcctccgcagacatgctgcccgtcatcacaggaaatcgcgacgggtttaacgtgcgggtccctctgccgggcccgctgtttgacgccttgccccgggagatccagagtggcatgctgctgcgagtgcagcccgtcctcttcaacgtgggcatcaatgagcagcagacactggccgagaggtttggcgatacgtctttacaagaagtcatcaacgtggagagtttggtgcggttaaattcctactttgagcagtttaaggaagttttgcctgaggattgcctgcctcggtctcgcagtcagacgtgcctgccagagctgctgcggtttctgggtcagaacgtgcatgcccggaagaataagaacgtcgacattctctggcaagctgctgagatctgccgccgccttaatggggtccggttcaccagctgcaagagcgctaaggaccgtacagccatgtcggtgacactggagcagtgcctgatcctgcaacacgagcatggcatggccccgcaggtcttcacccaggccctggagtgcatgcgcagcattggaacacgggaggtagtcacccagaaaaacttgagcggcctggtgcccatccgagacttaaggctagaccccagcctcctctgttccatccctttattagctctgagccccaatttactgattgtgtggctctttctgagcatagcatacctggtgaccaaattgcgttgcaaatgaatatcattatgaaaaattaataagtcacaagaaaaacaaaagtgccagaagatgtccagccaccg

SEQ ID NO: 2962 - DNA, 3217 bp, Homo sapiens
cgaggaccagcacctgaggccgggccgcaggccgacttcacagccaggcgcgcgcgtcgctgctgctgctgcggggctctggcgcgccagccggcgggacagcgggggctggcgggggccggggagcgccagatgatggatttggacatgcttctatgaagaaatgccacatggtccgagagcaaacatgtccaggctactcactttagtgactagggctcggtgccagcacttcccgggtaatcagacgtggtctgaccgaggatcaagaagcacatcatcaccaatgacatcatgacagcaagagagcacagccctcgccatggtgccagggcccgtgcaatgcagcgggcttccaccatcgacgtggcggccgacatgctgggcctctctctggcaggaaatatacaagacccagatgagcccattttagaatttagcttagcttgcagtgagctgcatactccatcgctagatcgaaagccaaatagttttgttgcggtgagtgtcaccacccctcctcaggcattctggacgaagcatgcacagacggagatcattgagggaaccaacaatcctatatttctaagcagtattgccttctttcaagactctcttatcaatcagatgacacaagtcaaactctccgtgtatgatgtcaaagatagatctcagggaacaatgtatttactgggctctggaacgttcattgtcaaagatctgctccaggacaggcatcataggttgcatttaacactaaggtctgcagagagtgaccgtgtaggtaacatcaccgtgattggctggcagatggaggagaagtcagaccaacggccccctgtgacccggtctgtggacactgtcaatgggaggatggttcttcctgtcgatgagagcttgacggaggcgttaggaatccgatccaaatacgcttcattgcgaaaggacactttgctgaaatcggtgttcggtggtgccatctgccgcatgtaccggtttccaaccactgatggtaaccatttgcggatcctggagcagatggcagagagcgtgctctccctgcacgtgccccggcagttcgtgaagctcctactagaggaagatgcagccagagtgtgtgagctggaggagctgggagagctgtccccttgctgggagagcctccggcgccaaattgtcacccagtaccagaccatcatcctcacataccaggagaacctgaccgacctccatcagtacagagggccctcgtttaaagcaagcagtttgaaagcagataaaaagttagaatttgttcccacaaacttgcacatacaaaggatgagagttcaagacgatggaggatcagatcagaactacgacatcgtcaccattggggcgccagcagcacactgccaaggttttaagtcaggaggtctccgcaaaaagctgcacaaatttgaagagaccaagaaacattttgaggagtgttgtacatcatctggctgccagtccataatctacataccccaggatgttgtcagagccaaggagatcatcgcccagatcaacaccctgaaaacccaagtgagttactacgcagagcggctgtcaagggcagccaaggacaggtctgccactggccttgagaggacactcgccatcttggcagacaagacacggcagctggtcacggtctgcgactgcaagctcctggccaactccatccatgggctgaacgctgcacggcctgactacattgcctccaaggcctctcccacttcgactgaggaggagcaggtgatgcttagaaatgaccaggacaccctcatggcccggtggacagggagaaacagccgatcttccctgcaggtggactggcacgaggaggagtgggagaaagtgtggctgaacgtggacaagagcctagagtgcatcattcagcgtgtggacaagctgctgcagaaggagcggctgcatggcgagggctgtgaggatgtcttcccctgtgcaggcagctgcaccagcaagaaagattgcagtccccctcctgaagagtccagcccaggtgaatggagtgaggccctttacccgctgctgaccactctcaccgactgcgtggccatgatgagtgacaaggccaagaaggccatggtattcctgctcatgcaggacagcgcgcccaccatagccacctacctgagcctgcagtaccgccgtgacgtggtcttctgccagacgctgaccgccctcatctgcggcttcatcattaagctgaggaactgcctgcatgacgacggcttcctgcgccagctctacaccatcgggctgctggcccagttcgagagcctgctgagcacctacggggaggagctggcaatgctggaggacatgagccttgggatcatggacttgaggaacgtgaccttcaaagtcactcaggccacttccagcgcctccgcagacatgctgcccgtcatcacaggaaatcgcgacgggtttaacgtgcgggtccctctgccgggcccgctgtttgacgccttgccccgggagatccagagtggcatgctgctgcgagtgcagcccgtcctcttcaacgtgggcatcaatgagcagcagacactggccgagaggtttggcgatacgtctttacaagaagtcatcaacgtggagagtttggtgcggttaaattcctactttgagcagtttaaggaagttttgcctgaggattgcctgcctcggtctcgcagtcagacgtgcctgccagagctgctgcggtttctgggtcagaacgtgcatgcccggaagaataagaacgtcgacattctctggcaagctgctgagatctgccgccgccttaatggggtccggttcaccagctgcaagagcgctaaggaccgtacagccatgtcggtgacactggagcagtgcctgatcctgcaacacgagcatggcatggccccgcaggtcttcacccaggccctggagtgcatgcgcagtgagggttgtcgaagagaaaatacaatgaagaatgttggaagtcgcaaatatgcatttaattccctgcagctgaaggctttccccaagcattacaggcctcccgaagggacttacggaaaagttgaaacgtgaacacacggtttcctctaattagctgttacataataaatgtgggtacctctagtgtcatatatgaattcttcaggagactgaaggattggtttattttgtgttcttt

SEQ ID NO: 2963 - DNA, 4832 bp, Homo sapiens
agcggaccgccgcggcccgcgctgtaaccgcggctgccgctgctgctccgggcgggcgttggtgccgtgtgccgaggcgccctgtcaggcgatggggagcggctgggcggggagagccgacggccgcggcggcgcctgaggaacgcagccgggctcgggagcggcgagggcgggccggtccagcggcggaggagcgaggcggggcgaggcaggcggcgcggggacccgcgccaagcagcggcggcctcggaggaagaggggtcgccgcccaggtttcttgcggccgccgctcttgtcgtcgcagtatttcctgttcggattatcttttgcttccccccagctgcctccttaccctcacactcccactcctccgtttccgcggtcgaagctgccttcggccccgggtggtctcccccgcccggggaccccctgtgcctcccctcccgggctgcgggggagcccctccgagaccatgaggaaattcaacatcaggaaggtgctggacggcctgaccgccggctcgtcctcggcgtcgcagcagcaacagcagcagcatccgcctgggaaccgggagccggagatccaggaaacgctccagtccgagcactttcagctctgcaagactgttcgccatggatttccctatcaaccctcagccctggcctttgatcctgtacagaagatcctggcagtgggaactcagactggtgctttaaggctctttggtcgtccaggagtagaatgttattgccagcatgacagtggagctgcagtaatccagctccagttcctgattaatgagggagcgcttgtgagtgccttggctgatgacaccttacacttatggaatttacgtcagaagaggcctgccatactacattcgcttaaattttgcagagaaagggttacattttgccatctgcctttccagagtaagtggctctatgtgggcactgaacgaggtaatatacatattgtcaatgtggagtccttcacactctcaggctacgtcattatgtggaataaagccattgaactgtcatctaaatctcacccaggacctgtggtccatataagtgataatccaatggacgagggaaagcttttgattggctttgaatctggaacagtagttttatgggacctcaaatcaaagaaagccgactacagatacacatatgatgaggctatccactctgttgcttggcatcatgaaggaaaacaatttatttgcagtcattcagatggcaccttgactatatggaatgtaaggtcccctgctaaaccagtacagacaatcactccacatggaaaacagttaaaggatgggaagaagccagaaccatgcaaacctatcctcaaggtggaattcaaaacgactagatctggggagccttttattattttatcaggaggtttgtcatatgatactgtaggaagaagaccttgcttaacagtgatgcatgggaaaagcactgctgtgctagaaatggactattcaattgttgattttctaacgctgtgtgaaacaccatacccaaatgattttcaagaaccatatgctgtggttgttcttctagaaaaggatttagtacttatagaccttgcacaaaatggatatcctatatttgaaaatccctaccctttgagtatacatgagtcccctgttacatgttgcgaatattttgcggattgtcctgtggaccttattcctgcactttattctgttggagctagacagaaacgtcaaggttacagcaaaaaggaatggcccatcagcggaggtaattggggcttgggtgctcaaagttacccagaaataattattacagggcatgctgatgggtcagttaagttctgggatgcttctgcaataactctacaagtattatataagctaaagacatctaaagtatttgaaaagtcaagaaataaagatgacaggccaaacacagacattgtagatgaagatccatatgccattcagatcatctcctggtgtccagaaagtagaatgctgtgcatcgctggagtttcagctcatgtcattatttatagattcagcaagcaggaagtaatcacagaagtcattccgatgcttgaagttcgattattatatgagataaatgatgtggaaactccggagggtgagcagccaccacctttgccaacacccgtgggagggtccaaccctcagcccatccctcctcagtctcatccatctaccagtagcagttcatctgatgggcttcgtgataatgtaccttgtttaaaagttaaaaactcaccacttaaacagtctccaggttatcaaacagaactagttattcagttggtttgggtgggtggagaaccaccacaacaaataaccagcctggcagtcaattcttcctatggactggtggtttttggcaattgcaatggcattgctatggttgactacctccagaaagcagtgctgctcaacctgggcactattgaattatatggctctaatgatccttatcggagagaaccccgatctcctcgtaaatctcgacagccttcaggagccggtctgtgtgatattagtgaagggactgttgttccagaggatcgctgcaaatctccaacctctgcaaagatgtcaaggaagttaagcttacctactgacctaaagcctgatttagatgtaaaggataactcctttagccgatcacggagttcaagtgtaacaagcattgacaaagaatcccgagaagcgatctccgctcttcatttctgtgaaacgtttactcgaaagacggactcgtccccttccccttgtctgtgggttggaacaacgctaggaacagtgcttgtcattgcactgaaccttcccccagggggagagcaaagacttcttcagccagtaattgtgtctccaagtggtactatattgaggttaaaaggtgcaatcttgagaatggcatttctggataccacaggctgcttaataccacctgcgtatgaaccctggagagagcacaatgttcctgaagaaaaagacgaaaaggagaaattgaaaaaacggcggcctgtctcagtatccccctcctcttctcaggaaattagtgaaaaccagtatgcagtgatatgttctgaaaagcaagcaaaagtaatctcactgccaacccagaactgtgcttataagcaaaatattacagagacctcgtttgtgcttcgtggagatattgtagcattgagtaacagtatctgccttgcctgtttctgtgccaatggacatataatgacttttagtttgccaagtttaagacctctgttggatgtgtattacttgccccttaccaatatgcggatagccagaacgttctgctttaccaacaatggacaagcattataccttgtttcacctacagaaatccagagacttacttatagtcaagagacctgtgaaaatcttcaggaaatgttgggtgaactcttcactcctgtagaaacacctgaagcaccaaacaggggattctttaaaggcttatttggaggtggtgcacaatctcttgacagagaagaactatttggagaatcgtcctcaggaaaggcttcaaggagccttgcacagcatattcctggccctggtggcattgaaggcgtaaaaggggcagcatctggagttgttggtgaattagcacgagccaggctggcactagatgaaagagggcagaaacttggcgatctggaagaaagaactgcggccatgttatcaagtgcagagtcattttctaaacatgctcatgagattatgttgaaatacaaagataagaagtggtaccagttctgacaaccagaatccaataagtccaacttcagccagaaggaaaaaagttttccatttttattacattctttaggaaagttaacgttaaagggatgttcgtcactgaatactgttctttcctagcacagtcatgcactgttttacctcagtcatgtggctttaactgaggagtgttcacacgcactcgaaatggagtatatggtgtgtgccagttatgagttgaccatttgggaattaaacaggtcacacgtgacagatgaagaaaccaagggggctgctgaggagacctggtgcagggactaatcctggatcattcctgtattaaactttcatatgccaaaagggtttgtgccgttttatctgccatcagtgtttgacctgtttagggcagaggcaataagtcagaagtcttgaagttgaaatagttatatgtgtgtcattggactggattataaacagctgtcttggactttccctctcttaacactgactggtcatcagtatcattagtgaaaaagaaacaaattgtttgttatcatctctttagacagataagctgaatggtgggctttaaataataaaaacatacacatagttgacttgtgtatgagctactcttggattcttgttattatagacttgtatttagttcatattttgtcaaaagcaaaacaagaagatacatcacttttcattgaaaagaaaagtgtagagcatgactgaattgctcatcattctgggagtttccatgtagtggctatgcagtgtggaaagtgagaaaaacctccattgtggtgaggagaatacttcaatgtcccttgtccttgttctcattaattcagctaaaggtggatttgaccaaaataatgctggttaaatttgtagaaatgttgaaattggctgtgttttaaattttgcttgaatttttataaaatgtttaaccaaatgtacctttgcattctttaattaaaattgcttaaaaaaaaactttcattatttcagtaaaaaaaaaaaa

SEQ ID NO: 2964 - DNA, 3745 bp, Homo sapiens
cggcggcgggcccaaggcgtgaggcgccgcccgggtgtccccgcggcgcaggaggcggtggagcgcagagcgggcgagcgcgaaaaatcactaccaatataatggattttatatatcagattgctttattctggatatcatggtaacaatacagaaagtatacataatttcccatttctgcaagtagtcatgactgctgaagaaagaaaaacttaaagctacggcagaattattttatggaaattctgattttgtttttaatttttgataactttttactaaaggtatgaacacacaaagagcttattttgttaggcaaatacacattaataagaatgcctagaagaggactgattcttcacacccggacccactggttgctgttgggccttgctttgctctgcagtttggtattatttatgtacctcctggaatgtgccccccagactgatggaaatgcatctcttcctggtgttgttggggaaaattatggtaaagagtattatcaagccctcctacaggaacaagaagaacattatcagaccagggcaaccagtctgaaacgccaaattgcccaactaaaacaagaattacaagaaatgagtgagaagatgcggtcactgcaagaaagaaggaatgtaggggctaatggcataggctatcagagcaacaaagagcaagcacctagtgatcttttagagtttcttcattcccaaattgacaaagctgaagttagcataggggccaaactacccagtgagtatggggtcattccctttgaaagttttaccttaatgaaagtatttcaattggaaatgggtctcactcgccatcctgaagaaaagccagttagaaaagacaaacgagatgaattggtggaagttattgaagcgggcttggaggtcattaataatcctgatgaagatgatgaacaagaagatgaggagggtccccttggagagaaactgatatttaatgaaaatgacttcgtagaaggttattatcgcactgagagagataagggcacacagtatgaactcttttttaagaaagcagaccttacggaatatagacatgtgaccctcttccgcccttttggacctctcatgaaagtgaagagtgagatgattgacatcactagatcaattattaatatcattgtgccacttgctgaaagaactgaagcatttgtacaatttatgcagaacttcagggatgtttgtattcatcaagacaagaagattcatctcacagtggtgtattttggtaaagaaggactgtctaaagtcaagtctatcctagaatctgtcaccagtgagtctaattttcacaattacaccttggtctcattgaatgaagaatttaatcgtggacgaggactaaatgtgggtgcccgagcttgggacaagggagaggtcttgatgtttttctgtgatgttgatatctatttctcagccgaattccttaacagctgccggttaaatgctgagccaggtaagaaggtgttttaccctgtggtgttcagtctttacaatcctgccattgtttatgccaaccaggaagtgccaccacctgtggagcagcagctggttcacaaaaaggattctggcttttggcgagattttggctttggaatgacttgtcagtatcgttcagatttcctgaccattggtggatttgacatggaagtgaaaggttggggtggagaagatgttcatctttatcgaaaatacttacatggtgacctcattgtgattcggactccggttcctggtcttttccacctctggcatgaaaagcgctgtgctgatgagctgacccccgagcagtaccgcatgtgcatccagtctaaagccatgaatgaggcctctcactcccacctgggaatgctggtcttcagggaggaaatagagacgcatcttcataaacaggcatacaggacaaacagtgaagctgttggttgaaatcataattaatgcgttactgtatgaaccacaaaacagcactatttatttagccttacttctacttccagatgcagtgcctcttttggagaagacatgtttatttttcatgttctttctgacattactttagcaattcaacttgatgtgagaagaaaaaacaaatgtttcaacacaaaatctctgttttgtgagaatactgcactatggaataattgacaaattgaaatctcatatttgtcccaaaagttgttttgagttagttctacctggtgcccatgttctgattgtgtgtgggattgcatggtgtcctgattgcatctaggtggagcggatggaatgtgctgggccactgttgggtggagagcagcacattcttacagaggagatggagcgttatgagcatagtatgtggataggtatcttcacctgcccgcccctgagtcagcctccttgacttgatagcttgaagaatccttttccactgaaatagaggataattaattgacacatctgaaatccccaatcaatcaatcaagagaaaggtagaactaaaaactccttaacttactgttgcttacacccctgaaagtctgtttttaagcaaatgggtaatagtagaaaataggttagaatctatggcttgattaaaaatatgttattacattatcatgttcaggattaggattagtagtcagttgctgtaaactattttgaacaaacagaaaagaacacggaaacatttttaacagagcatttaattatgttggaatacaggatcctagctctgtctgggaacattagtttatgtgagccagctctatcagggtcttcccatggtggttcagaatagatgagcatagcatggttttgtttgtttttgctttcaattttctaatttggcatggatccatatgtatttactatcctttttctaatatattaatatatgctacatttgtatttgcattactataatactttgagttgaaaaagagtttcattgtggagagaaaaagcaaatggtatgccacaagatcactctgatttgagaaaagggaggaggggaagatagtctgaatggaaatctgaaatacggaatgttttagagaaatatgtcacttgcatatagaatgttttaattgaggtataaattaatgagacaaagtgaaaaagaaattatattcagataggactgcactacattatttgtcacacatggatctgttaccatcaggtcaattcctagtatgcataaattttttaacccttttaaaagagacctatgttgaaaacccctgaaaattcactgaagaaaaatcattactctttttctcagtaaatcatatcatctgaaatattacaaatttcaaatttctaggtgctatattaattcaatattacaataactcttacctaattattcttacaagttttaagttgtggtagtttagtgatttttttaaaagatgtgtgaaatgttctctgcaaaataattcaggccactgtctccttttatatattattataattatttattatgaagaccagtgaattacgatatttaaagtgagagaacttaattatttgcaaaggtaagttacagcttgttttttgagagaatcaaatgagtttacttttgttcctgttgtttttaactagctttaagtttaaagatggaagctaagcaatggaaatgctatacgtttttgacatttattaaatggtaccaataaagtattttattaccaaaagttaaaaaaaaaaaaaaaaaaaaaaaa

SEQ ID NO: 2965 - DNA, 13302 bp, Homo sapiens
gaagcgcctgtgctctgccgagactgccgtgcccattgctcgcctcggtcgccgccgctttagccgcctccgggggagcggccgcctattgtctttctccgcggcgaaggtgaagagttgtcccagctcggcccgcgggggagccccgggagccgcacgtgtcctgggtcatgaaacttaatccacagcaagctcccttatatggtgattgtgttgttacagtgctgcttgctgaagaggacaaagctgaagatgatgtagtgttttacttggtatttttgggttccaccctccgtcactgtacaagtactcggaaggtcagttctgatacattggagaccattgctcctggtcatgattgttgtgaaacagtgaaggtgcagctctgtgcttccaaagagggccttcccgtgtttgtggtggctgaagaagactttcatttcgtccaggatgaagcgtatgatgcagctcaattcctagcaaccagtgctggaaatcagcaggctttgaactttacccgttttcttgaccagtcaggacccccatctggggatgtgaattcccttgataagaagttggtgctggcattcaggcacctgaagctgcccacggagtggaatgtattggggacagatcagagtttgcatgatgctggcccgcgagagacattgatgcattttgctgtgcggctgggactgctgaggttgacgtggttcctgttgcagaagccaggtggccgcggagctctcagtatccacaaccaggaaggggcgacgcctgtgagcttggccttggagcgaggctatcacaagctgcaccagcttctaaccgaggagaatgctggagaaccagactcctggagcagtttatcctatgaaataccgtatggagactgttctgtgaggcatcatcgagagttggacatctatacattaacctctgagtctgattcacatcatgaacacccatttcctggagacggttgcactggaccaatttttaaacttatgaacatccaacagcaactaatgaaaacaaacctcaagcagatggacagtcttatgcccttaatgatgacagcacaggatccttccagtgccccagagacagatggccagtttcttccctgtgcaccggagcccacggaccctcagcgactttcttcttctgaagagactgagagcactcagtgctgcccagggagccctgttgcacagactgaaagtccctgtgatttgtcaagcatagttgaggaggagaatacagaccgttcctgtaggaagaaaaataaaggcgtggaaagaaaaggggaagaggtggagccagcacctattgtggactctggaactgtatctgatcaagacagctgccttcagagcttgcctgattgtggagtaaagggcacggaaggcctttcgtcctgtggaaacagaaatgaagaaactggaacaaaatcttctggaatgcccacagaccaggagtccctgagcagtggagatgctgtgcttcagagagacttggtcatggagccaggcacagcccagtattcctctggaggtgaactgggaggcatttcaacaacaaatgtcagtaccccagacactgcaggggaaatggaacatgggctcatgaacccagatgccactgtttggaagaatgtgcttcagggaggggaaagtacaaaggaaagatttgagaactctaatattggcacagctggagcctctgacgtgcacgtcacaagtaagcctgtggataaaatcagtgttccaaactgtgcccctgctgccagttccctggatggtaacaaacctgctgagtcttcacttgcatttagtaatgaagaaacctccactgaaaaaacagcagaaacggaaacttcacgaagtcgtgaggagagtgctgatgctccagtagatcagaattctgtggtgattccagctgctgcaaaagacaagatttcagatggattagaaccttatactctcttagcagcaggcataggtgaggcaatgtcaccctcagatttagcccttcttgggctggaagaagatgtaatgccacaccagaactcagaaacaaattcatctcatgctcaaagccaaaagggcaaatcctcacccatttgttctacaactggagacgataaactttgtgcagactctgcatgtcaacagaacacagtgacttctagtggcgatttggttgcaaaactgtgtgataacatagttagcgagtccgaaagcaccacagcaaggcaacccagctcacaagatccacccgatgcctcccactgtgaagacccacaggctcatacagtcacctctgaccctgtaagggatacccaggaacgtgcggatttttgtcctttcaaagtggtggataacaaaggccaacgaaaagatgtgaaactagataaacctttaacaaatatgcttgaggtggtttcacatccacatccagttgtccctaaaatggagaaagaactggtgccagaccaggcagtaatatcagacagtactttctctctggcaaacagtccaggcagtgaatcagtaaccaaggatgacgcactttcttttgtcccctcccagaaagaaaagggaacagcaactcctgaactacatacagctacagattatagagatggcccagatggaaattcgaatgagcctgatacgcggccactagaagacagggcagtaggcctgtccacatcctccactgctgcagagcttcagcacgggatggggaataccagtctcacaggacttggtggagagcatgagggtcccgcccctccagcaatcccagaagctctgaatatcaaggggaacactgactcttccctgcaaagtgtgggtaaggccactttggctttagattcagttttgactgaagaaggaaaacttctggtggtttcagaaagctctgcagctcaggaacaagataaggataaagcggtgacctgttcctctattaaggaaaatgctctctcttcaggaactttgcaggaagagcagagaacaccacctcctggacaagatactcaacaatttcatgaaaaatcaatctcagctgactgtgccaaggacaaagcacttcagctaagtaattcaccgggtgcatcctctgcctttcttaaggcagaaactgaacataacaaggaagtggccccacaagtctcactgctgactcaaggtggggctgcccagagcctggtgccaccaggagcaagtctggccacagagtcaaggcaggaagccttgggggcagagcacaacagctccgctctgttgccatgtctgttgccagatgggtctgatgggtccgatgctcttaactgcagtcagccttctcctctggatgttggagtgaagaacactcaatcccagggaaaaactagtgcctgtgaggtgagtggagatgtgacggtggatgttacaggggttaatgctctacaaggtatggctgagcccagaagagagaatatatcacacaacacccaagacatcctgattccaaacgtcttgttgagccaagagaagaatgccgttctaggtttgccagtggctctacaggacaaagctgtgactgacccacagggagttggaaccccagagatgatacctcttgattgggagaaagggaagctggagggagcagaccacagctgtaccatgggtgacgctgaggaagcccaaatagacgatgaagcacatcctgtcctactgcagcctgttgccaaggagctccccacagacatggagctctcagcccatgatgatggggccccagctggtgtgagggaagtcatgcgagccccgccttcaggcagggaaaggagcactccctctctaccttgcatggtctctgcccaggacgcacctctgcctaagggggcagacttgatagaggaggctgccagccgtatagtggatgctgtcatcgaacaagtcaaggccgctggagcactgcttactgagggggaggcctgtcacatgtcactgtccagccctgagttgggtcctctcactaaaggactagagagtgcttttacagaaaaagtgagtactttcccacctggggagagcctaccaatgggcagtactcctgaggaagccacggggagccttgcaggatgttttgctggaagggaggagccagagaagatcattttacctgtccaggggcctgagccagcagcagaaatgccagacgtgaaagctgaagatgaagtggattttagagcaagttcaatttctgaagaagtggctgtagggagcatagctgctacactgaagatgaagcaaggcccaatgacccaggcgataaaccgagaaaactggtgtacaatagagccatgccctgatgcagcatctcttctggcttccaagcagagcccagaatgtgagaacttcctggatgttggactgggcagagagtgtacctcaaaacaaggtgtacttaaaagagaatctgggagtgattctgacctctttcactcacccagtgatgacatggacagcatcatcttcccaaagccagaggaagagcatttggcctgtgatatcaccggatccagttcatccaccgatgacacggcttcactggaccgacattcttctcatggcagtgatgtgtctctctcccagattttaaagccaaacaggtcaagagatcggcaaagccttgatggattctacagccatgggatgggagctgagggtcgagaaagtgagagtgagcctgctgacccaggcgacgtggaggaggaggagatggacagtatcactgaagtgcctgcaaactgctctgtcctaaggagctccatgcgctctctttctcccttccggaggcacagctgggggcctgggaaaaatgcagccagcgatgcagaaatgaaccaccggagtatgagctggtgcccctctggtgtgcagtactctgctggcctgagtgctgactttaattacagaagtttcagtctagaaggcttgacaggaggagctggtgtcggaaacaagccatcctcatctctagaagtaagctctgcaaatgccgaagagctcagacacccattcagtggtgaggaacgggttgactctttggtgtcactttcagaagaggatctggagtcagaccagagagaacataggatgtttgatcagcagatatgtcacagatctaagcagcagggatttaattactgtacatcagccatttcctctccattgacaaaatccatctcattaatgacaatcagccatcctggattggacaattcacggcccttccacagtaccttccacaataccagtgctaatctgactgagagtataacagaagagaactataatttcctgccacatagcccctccaagaaagattctgaatggaagagtggaacaaaagtcagtcgtacattcagctacatcaagaataaaatgtctagcagcaagaagagcaaagaaaaggaaaaagaaaaagataagattaaggagaaggagaaagattctaaagacaaggagaaagataagaagactgtcaacgggcacactttcagttccattcctgttgtgggtcccatcagctgtagccagtgtatgaagcccttcaccaacaaagatgcctatacttgtgcaaattgcagtgcttttgtccacaaaggctgccgagaaagtctagcctcctgtgcaaaggtcaaaatgaagcagcccaaagggagccttcaggcacatgacacatcatcactgcccacggtcattatgagaaacaagccctcacagcccaaggagcgtcctcggtccgcagtcctcctggtggatgaaaccgctaccaccccaatatttgccaatagacgatcccagcagagtgtctcgctctccaaaagtgtctccatacagaacattactggagttggcaatgatgagaacatgtcaaacacctggaaattcctgtctcattcaacagactcactaaataaaatcagcaaggtcaatgagtcaacagaatcacttactgatgagggagtaggtacagacatgaatgaaggacaactactgggagactttgagattgagtccaaacagctggaagcagagtcttggagtcggataatagacagcaagtttctaaaacagcaaaagaaagatgtggtcaaacggcaagaagtaatatatgagttgatgcagacagagtttcatcatgtccgcactctcaagatcatgagtggtgtgtacagccaggggatgatggcggatctgctttttgagcagcagatggtagaaaagctgttcccctgtttggatgagctgatcagtatccatagccaattcttccagaggattctggagcggaagaaggagtctctggtggataaaagtgaaaagaactttctcatcaagaggataggggatgtgcttgtaaatcagttttcaggtgagaatgcagaacgtttaaagaagacatatggcaagttttgtgggcaacataaccagtctgtaaactacttcaaagacctttatgccaaggataagcgttttcaagcctttgtaaagaagaagatgagcagttcagttgttagaaggcttggaattccagagtgcatattgcttgtaactcagcggattaccaagtacccagttttattccaaagaatattgcagtgtaccaaagacaatgaagtggagcaggaagatctagcacagtccttgagcctggtgaaggatgtgattggagctgtagacagcaaagtggcaagttatgaaaagaaagtgcgtctcaatgagatttatacaaagacagatagcaagtcaatcatgaggatgaagagtggtcagatgtttgccaaggaagatttgaaacggaagaagcttgtacgtgatgggagtgtgtttctgaagaatgcagcaggaaggttgaaagaggttcaagcagttcttctcactgacattttagttttccttcaagaaaaagaccagaagtacatctttgcatcattggaccagaagtcaacagtgatctctttaaagaagctgattgtgagagaagtggcacatgaggagaaaggtttattcctgatcagcatggggatgacagatccagagatggtagaagtccatgccagctccaaagaggaacgaaacagctggattcagatcattcaggacacaatcaacaccctgaacagagatgaagatgaaggaattcctagtgagaatgaggaagaaaagaaaatgttggacaccagagcccgagaattaaaagaacaacttcaccagaaggaccaaaaaatcctactcttgttggaagagaaggagatgattttccgggacatggctgagtgcagcacccctctcccagaggattgctccccaacacatagccctagagttctcttccgctccaacacagaagaggctctcaaaggaggacctttaatgaaaagtgcaataaatgaggtggagatccttcagggtttggtgagtggaaatctgggaggcacacttgggccgactgtcagcagccccattgagcaagatgtggtcggtcccgtttccctgccccggagagcagagacctttggaggatttgacagccatcagatgaatgcttcaaaaggaggcgagaaggaagagggagatgatggccaagatcttaggagaacggaatcagatagtggcctaaaaaagggtggaaatgctaacctggtatttatgcttaaaagaaacagtgagcaggttgtccagagcgttgttcatctctacgagctcctcagcgctctgcagggtgtggtgctgcagcaggacagctacattgaggaccagaaactggtgctgagcgagagggcgctcactcgcagcttgtcccgcccgagctccctcattgagcaggagaagcagcgcagcctggagaagcagcgccaggacctggccaacctgcagaagcagcaggcccagtacctcgaggagaagcgcaggcgcgagcgtgagtgggaagctcgtgagagggagctgcgggagcgggaggccctcctggcccagcgcgaggaggaggtgcagcaggggcagcaggacctggaaaaggagcgggaggagctccagcagaagaagggcacataccagtatgacctggagcgactgcgtgctgcccagaaacagcttgagagggaacaggagcagctgcgccgggaggcagagcggctcagccagcggcagacagaacgggacctgtgtcaggtttcccatccacataccaagctgatgaggatcccatcgttcttccccagtcctgaggagcccccctcgccatctgcaccttccatagccaaatcagggtcattggactcagaactttcagtgtccccaaaaaggaacagcatctctcggacacacaaagataaggggccttttcacatactgagttcaaccagccagacaaacaaaggaccagaagggcagagccaggcccctgcgtccacctctgcctctacccgcctgtttgggttaacaaagccaaaggaaaagaaggagaaaaaaaagaagaacaaaaccagccgctctcagcccggtgatggtcccgcgtcagaagtatcagcagagggtgaagagatcttctgctgaccctcttcctctctgctgaggcagctgcctcctgatcctggccagcccacctctcctgctgtccccgcgtgcacaagtctcttacactggacgcccactgctcctcagcgtccagtcctcctgggcggccccaggtcctggacaataagcaacagatgatattgagtgtcgggtggggaaggaggcccagactctgcttcggccatgatttgtgactgcccaggactctcaggttgggctggccctactcaggattacactgaaagtaatggcctcgtaagtacaggtgatggttttggacacgtcaggaattcctaaaggctgaaagagtgtatccaagtaaggtctgaacctccgaatgccttttatttgggggaacacaaaaccaaacagcagatgttttggacttgatctgtgtacgtacatggggacctgtctgcatatacacacggggaatgccagaagaaggcccagtctgcaccaggcgtctggtcaacttagcacaagggcagtgcctggacggacccggagcccccgcatatcagcagttcacccagtactcctcagagactggtttccctctaaacccatcccgggcacataccacccgtgttttgcatgtatttctcatttcattttagggatgacaaacatttgtgaaaccagtgagagaaggcttgatgtgtataaaagacgtgatgtgcaccacctcgatctcggtgtttcaggcactaaagcaacaaaacaacccatagtatctcattctgtcatcagatccagaagaaatatcctggttttccagcatgtttacccacatgttttggccatggataaagtgaagaggcctactcaccattatccctgcagcgtgacaccttttgattgtcactgaccactcagaaggggccacggcctcctggctgtgttcctgagcccccgtcgtgcctctcccagacagcagctgtctggcccttgctgggtgagggcacaccactgccaggggtcagcctcgcacccaggccaggcagaagctgtgctctgaagctaggacagctggctgagaagtgggttcaggcgaagggtgaagccatgtgtagcagttcctgccagtgcagatctggagaggagctggcccggaaggcgtggttgtgaaagcgcccttcttatgttaggaggccttggcaaaattggatttcttcaaaaatacatgtaaaggtctgttgttgaattgtactctgcccctggaagcagatacagatggctgcctgctgctcggctttgcttttgcttttcccaccgtgttttcatctttgttcacttgaggctttccccagctggtgtgtgcaggacagttcatggtaatgttgccctctgaggccccgtacaccagaagggaggccctggaaaattttgtgcttccaacgtggccttcaattcttgcttttttgcccctcggaagcatggggcttttgagcacacttaaaaaaagaaaaatctgtaacttggtgcttattgatgaattgcaagctggccttgcagatggagatatttatctttcagtttatttgaaagaggtctggtttaaaatttgtagcctacatttgttttatttattgtatttgtgtgtttgtgtttgtttttttttaagggtgagccaggtctagcccaacagtctaaactatccagtcaataccgagtgaagtggcagccagcactgttcactctgtgtcttttgaagtgccttgaaggcccagatgaaattttaaagggagggggtccatgtccttccctcccccaccccgcctcattctttaatcaaaggatgtcttctcccttgtttgagaatgaagaaactcgccacctctgacctacctttgcctttttctgtcatggagaatactcacccttcagaaacagaccaaaggccaaaacctgctgatttttctattgaaaatatgtccccttgcaaagaccctaaacaaaaagttaagtttctttctttcacctatttgtacaactccaagttacagctgaatctgtcgtgactttcctgagatctacccggggcttggctgtctgttctgggcactggctccgagttcccctcctgggatttgcaggagggcagtactgaacctgcattcttctccttgtaaatgtaggccgggtgcccctgttctccgggtttggaacaatacgaggttggtgctgatgggatttacttgcgtacgtgctcttcacaaaaacaccgtggatgctgaagttagagcacgtcgccacagagcttgacatcaatgttagagggtctcttactccccgcccagctgtgatgtttcatctgctttggttgttttggtggtcttttttaaaaatagagatttcacatctgcccagaccccactcaaaacgatttggtcaggttctggttggacaagtttaaaatcaaagtagtgcccggaattccctcaaaccacccaacttcatccaggaatacagtctgcagtgcagcaacagaaccgcttaccaagaactgtgcttacatacctttgtcatctctcttccccccttggaagttgtcctcagggggatttgttcctgtcctggggatttacctgggatggtggctgcctgtgcttttgctcatggccttgacagtgctctagttgctggatctaatggcctgtcttggtttctatcacatgagaaggggttgtttttttggggtgactcggactgaattccccatactgtttccacgccgggacaccatgttctccatcaagctaaagaaatcacgtgcctgaaactgtgcttaagttttgggggaaagatggagttcctatccagagcccccagatttccagaatcgagtgagcttcctggaaggagactgcgtcttctctcaattccagtcatctcagtcgttgtcgttaggtgacatgtgcactttaaatgctctcatcggttggcttcattttcaagacaatcaaatgtattgactgtgttttcttcttagaaaatggagagggttaaaaacatgcaaactgccactttcaacctttgccagtattccctctacccccgtgagagctatctggggggaagaatccttaccaaggtttttttggaaaggtacgaatcttaacttttttccccttctgtgtctcagggtaatactattcagagtcgcccctttgctcattttctcccgtatttgttaccttcctgaggcctcagtattagtcgtgagcacaaagttttgagacctttggcgttgtttcttgatgtgggaggggaggtgttagtgcatgcaagggttgaactagatagaccctgccttagtagagggtgggactataaccttagaggccagaacttgatccagaagttgctgtccacagaagtgctttctatttcatcatttttgtttctagggctctttttctgtagccaggtcttcccaaggattttagtatttgcattggagttgaggtttactctaatgatggtggcccagctgtgcccagaggacagccaggcaggccctgggagggagtttagaaagacagtcctggtgaatgggcttcaagtggtcacaaagagggtggctgtgaggtgaccccagacactgcagaacgatgtgcaccctctgcgttttggatgtccttggaatgtgggagcctagaaataaccctgtggatggaattggggcagcggctgctggagatctgtgtgccttgccttccttcagcaggaccgtctaggtgcgcagccacctatggatgcgtcccagccagccccgtcgctctcgtccatcctcagagacaaagaagagggcagggagtttgggcttggttttgaactttcctttcaatgtagcaaagcattcctagttaaccagagccttggaatctactgcctgctggccaggctttaaaatgaaaagtgttttaatgctgccataaaagggaggcgggggggaggaagggaaaataaaggcatctttccaagtactcatctaatttaattgtcaaaagattgataggccatgaattacttctccatctcactaagggttaaaggcgtgcaaccccccactggctgtgtcccctgccaccgaagtgagtgacctgccctacaaccaggtgggaccacctgtgctgcagtccggaggggcttctgcaggaagcactcaccccccacaccttccccggcctgagcttcccctacctttcgtcaccacctgagggcatgagcacaggccatggggcgtgcctggtgagtctgcctgtggttcaggcttagcctgtggtctcctgtgtgctgctgcccgcatgggatgcgcaggggaggcgtggggatccgcaggagggtggttgggatacaccggatacctctgctctcattgcttgtttgcaaatgctctatggacatttgtgtgctaaatcctattaaataaaaaagacgggttaaaacccagatgctgtatattcatttgtaattatgtataaagtgaagcagttttaaactgtaaagatttttttcagtgtgttttctcgaattttgccacaacatactggcttcgtattttatttatctttctttctagttaccagcttcagacccttgtaaagtctccctcagccctttcaaaaaataataaatttcctgtgaagtt

SEQ ID NO: 2966 - DNA, 13290 bp, Homo sapiens
gaagcgcctgtgctctgccgagactgccgtgcccattgctcgcctcggtcgccgccgctttagccgcctccgggggagcggccgcctattgtctttctccgcggcgaaggtgaagagttgtcccagctcggcccgcgggggagccccgggagccgcacgtgtcctgggtcatgaaacttaatccacagcaagctcccttatatggtgattgtgttgttacagtgctgcttgctgaagaggacaaagctgaagatgatgtagtgttttacttggtatttttgggttccaccctccgtcactgtacaagtactcggaaggtcagttctgatacattggagaccattgctcctggtcatgattgttgtgaaacagtgaaggtgcagctctgtgcttccaaagagggccttcccgtgtttgtggtggctgaagaagactttcatttcgtccaggatgaagcgtatgatgcagctcaattcctagcaaccagtgctggaaatcagcaggctttgaactttacccgttttcttgaccagtcaggacccccatctggggatgtgaattcccttgataagaagttggtgctggcattcaggcacctgaagctgcccacggagtggaatgtattggggacagatcagagtttgcatgatgctggcccgcgagagacattgatgcattttgctgtgcggctgggactgctgaggttgacgtggttcctgttgcagaagccaggtggccgcggagctctcagtatccacaaccaggaaggggcgacgcctgtgagcttggccttggagcgaggctatcacaagctgcaccagcttctaaccgaggagaatgctggagaaccagactcctggagcagtttatcctatgaaataccgtatggagactgttctgtgaggcatcatcgagagttggacatctatacattaacctctgagtctgattcacatcatgaacacccatttcctggagacggttgcactggaccaatttttaaacttatgaacatccaacagcaactaatgaaaacaaacctcaagcagatggacagtcttatgcccttaatgatgacagcacaggatccttccagtgccccagagacagatggccagtttcttccctgtgcaccggagcccacggaccctcagcgactttcttcttctgaagagactgagagcactcagtgctgcccagggagccctgttgcacagactgaaagtccctgtgatttgtcaagcatagttgaggaggagaatacagaccgttcctgtaggaagaaaaataaaggcgtggaaagaaaaggggaagaggtggagccagcacctattgtggactctggaactgtatctgatcaagacagctgccttcagagcttgcctgattgtggagtaaagggcacggaaggcctttcgtcctgtggaaacagaaatgaagaaactggaacaaaatcttctggaatgcccacagaccaggagtccctgagcagtggagatgctgtgcttcagagagacttggtcatggagccaggcacagcccagtattcctctggaggtgaactgggaggcatttcaacaacaaatgtcagtaccccagacactgcaggggaaatggaacatgggctcatgaacccagatgccactgtttggaagaatgtgcttcagggaggggaaagtacaaaggaaagatttgagaactctaatattggcacagctggagcctctgacgtgcacgtcacaagtaagcctgtggataaaatcagtgttccaaactgtgcccctgctgccagttccctggatggtaacaaacctgctgagtcttcacttgcatttagtaatgaagaaacctccactgaaaaaacagcagaaacggaaacttcacgaagtcgtgaggagagtgctgatgctccagtagatcagaattctgtggtgattccagctgctgcaaaagacaagatttcagatggattagaaccttatactctcttagcagcaggcataggtgaggcaatgtcaccctcagatttagcccttcttgggctggaagaagatgtaatgccacaccagaactcagaaacaaattcatctcatgctcaaagccaaaagggcaaatcctcacccatttgttctacaactggagacgataaactttgtgcagactctgcatgtcaacagaacacagtgacttctagtggcgatttggttgcaaaactgtgtgataacatagttagcgagtccgaaagcaccacagcaaggcaacccagctcacaagatccacccgatgcctcccactgtgaagacccacaggctcatacagtcacctctgaccctgtaagggatacccaggaacgtgcggatttttgtcctttcaaagtggtggataacaaaggccaacgaaaagatgtgaaactagataaacctttaacaaatatgcttgaggtggtttcacatccacatccagttgtccctaaaatggagaaagaactggtgccagaccaggcagtaatatcagacagtactttctctctggcaaacagtccaggcagtgaatcagtaaccaaggatgacgcactttcttttgtcccctcccagaaagaaaagggaacagcaactcctgaactacatacagctacagattatagagatggcccagatggaaattcgaatgagcctgatacgcggccactagaagacagggcagtaggcctgtccacatcctccactgctgcagagcttcagcacgggatggggaataccagtctcacaggacttggtggagagcatgagggtcccgcccctccagcaatcccagaagctctgaatatcaaggggaacactgactcttccctgcaaagtgtgggtaaggccactttggctttagattcagttttgactgaagaaggaaaacttctggtggtttcagaaagctctgcagctcaggaacaagataaggataaagcggtgacctgttcctctattaaggaaaatgctctctcttcaggaactttgcaggaagagcagagaacaccacctcctggacaagatactcaacaatttcatgaaaaatcaatctcagctgactgtgccaaggacaaagcacttcagctaagtaattcaccgggtgcatcctctgcctttcttaaggcagaaactgaacataacaaggaagtggccccacaagtctcactgctgactcaaggtggggctgcccagagcctggtgccaccaggagcaagtctggccacagagtcaaggcaggaagccttgggggcagagcacaacagctccgctctgttgccatgtctgttgccagatgggtctgatgggtccgatgctcttaactgcagtcagccttctcctctggatgttggagtgaagaacactcaatcccagggaaaaactagtgcctgtgaggtgagtggagatgtgacggtggatgttacaggggttaatgctctacaaggtatggctgagcccagaagagagaatatatcacacaacacccaagacatcctgattccaaacgtcttgttgagccaagagaagaatgccgttctaggtttgccagtggctctacaggacaaagctgtgactgacccacagggagttggaaccccagagatgatacctcttgattgggagaaagggaagctggagggagcagaccacagctgtaccatgggtgacgctgaggaagcccaaatagacgatgaagcacatcctgtcctactgcagcctgttgccaaggagctccccacagacatggagctctcagcccatgatgatggggccccagctggtgtgagggaagtcatgcgagccccgccttcaggcagggaaaggagcactccctctctaccttgcatggtctctgcccaggacgcacctctgcctaagggggcagacttgatagaggaggctgccagccgtatagtggatgctgtcatcgaacaagtcaaggccgctggagcactgcttactgagggggaggcctgtcacatgtcactgtccagccctgagttgggtcctctcactaaaggactagagagtgcttttacagaaaaagtgagtactttcccacctggggagagcctaccaatgggcagtactcctgaggaagccacggggagccttgcaggatgttttgctggaagggaggagccagagaagatcattttacctgtccaggggcctgagccagcagcagaaatgccagacgtgaaagctgaagatgaagtggattttagagcaagttcaatttctgaagaagtggctgtagggagcatagctgctacactgaagatgaagcaaggcccaatgacccaggcgataaaccgagaaaactggtgtacaatagagccatgccctgatgcagcatctcttctggcttccaagcagagcccagaatgtgagaacttcctggatgttggactgggcagagagtgtacctcaaaacaaggtgtacttaaaagagaatctgggagtgattctgacctctttcactcacccagtgatgacatggacagcatcatcttcccaaagccagaggaagagcatttggcctgtgatatcaccggatccagttcatccaccgatgacacggcttcactggaccgacattcttctcatggcagtgatgtgtctctctcccagattttaaagccaaacaggtcaagagatcggcaaagccttgatggattctacagccatgggatgggagctgagggtcgagaaagtgagagtgagcctgctgacccaggcgacgtggaggaggaggagatggacagtatcactgaagtgcctgcaaactgctctgtcctaaggagctccatgcgctctctttctcccttccggaggcacagctgggggcctgggaaaaatgcagccagcgatgcagaaatgaaccaccggagttcaatgcgagttcttggggatgttgtcaggagacctcccattcataggagaagtttcagtctagaaggcttgacaggaggagctggtgtcggaaacaagccatcctcatctctagaagtaagctctgcaaatgccgaagagctcagacacccattcagtggtgaggaacgggttgactctttggtgtcactttcagaagaggatctggagtcagaccagagagaacataggatgtttgatcagcagatatgtcacagatctaagcagcagggatttaattactgtacatcagccatttcctctccattgacaaaatccatctcattaatgacaatcagccatcctggattggacaattcacggcccttccacagtaccttccacaataccagtgctaatctgactgagagtataacagaagagaactataatttcctgccacatagcccctccaagaaagattctgaatggaagagtggaacaaaagtcagtcgtacattcagctacatcaagaataaaatgtctagcagcaagaagagcaaagaaaaggaaaaagaaaaagataagattaaggagaaggagaaagattctaaagacaaggagaaagataagaagactgtcaacgggcacactttcagttccattcctgttgtgggtcccatcagctgtagccagtgtatgaagcccttcaccaacaaagatgcctatacttgtgcaaattgcagtgcttttgtccacaaaggctgccgagaaagtctagcctcctgtgcaaaggtcaaaatgaagcagcccaaagggagccttcaggcacatgacacatcatcactgcccacggtcattatgagaaacaagccctcacagcccaaggagcgtcctcggtccgcagtcctcctggtggatgaaaccgctaccaccccaatatttgccaatagacgatcccagcagagtgtctcgctctccaaaagtgtctccatacagaacattactggagttggcaatgatgagaacatgtcaaacacctggaaattcctgtctcattcaacagactcactaaataaaatcagcaaggtcaatgagtcaacagaatcacttactgatgagggagtaggtacagacatgaatgaaggacaactactgggagactttgagattgagtccaaacagctggaagcagagtcttggagtcggataatagacagcaagtttctaaaacagcaaaagaaagatgtggtcaaacggcaagaagtaatatatgagttgatgcagacagagtttcatcatgtccgcactctcaagatcatgagtggtgtgtacagccaggggatgatggcggatctgctttttgagcagcagatggtagaaaagctgttcccctgtttggatgagctgatcagtatccatagccaattcttccagaggattctggagcggaagaaggagtctctggtggataaaagtgaaaagaactttctcatcaagaggataggggatgtgcttgtaaatcagttttcaggtgagaatgcagaacgtttaaagaagacatatggcaagttttgtgggcaacataaccagtctgtaaactacttcaaagacctttatgccaaggataagcgttttcaagcctttgtaaagaagaagatgagcagttcagttgttagaaggcttggaattccagagtgcatattgcttgtaactcagcggattaccaagtacccagttttattccaaagaatattgcagtgtaccaaagacaatgaagtggagcaggaagatctagcacagtccttgagcctggtgaaggatgtgattggagctgtagacagcaaagtggcaagttatgaaaagaaagtgcgtctcaatgagatttatacaaagacagatagcaagtcaatcatgaggatgaagagtggtcagatgtttgccaaggaagatttgaaacggaagaagcttgtacgtgatgggagtgtgtttctgaagaatgcagcaggaaggttgaaagaggttcaagcagttcttctcactgacattttagttttccttcaagaaaaagaccagaagtacatctttgcatcattggaccagaagtcaacagtgatctctttaaagaagctgattgtgagagaagtggcacatgaggagaaaggtttattcctgatcagcatggggatgacagatccagagatggtagaagtccatgccagctccaaagaggaacgaaacagctggattcagatcattcaggacacaatcaacaccctgaacagagatgaagatgaaggaattcctagtgagaatgaggaagaaaagaaaatgttggacaccagagcccgagaattaaaagaacaacttcaccagaaggaccaaaaaatcctactcttgttggaagagaaggagatgattttccgggacatggctgagtgcagcacccctctcccagaggattgctccccaacacatagccctagagttctcttccgctccaacacagaagaggctctcaaaggaggacctttaatgaaaagtgcaataaatgaggtggagatccttcagggtttggtgagtggaaatctgggaggcacacttgggccgactgtcagcagccccattgagcaagatgtggtcggtcccgtttccctgccccggagagcagagacctttggaggatttgacagccatcagatgaatgcttcaaaaggaggcgagaaggaagagggagatgatggccaagatcttaggagaacggaatcagatagtggcctaaaaaagggtggaaatgctaacctggtatttatgcttaaaagaaacagtgagcaggttgtccagagcgttgttcatctctacgagctcctcagcgctctgcagggtgtggtgctgcagcaggacagctacattgaggaccagaaactggtgctgagcgagagggcgctcactcgcagcttgtcccgcccgagctccctcattgagcaggagaagcagcgcagcctggagaagcagcgccaggacctggccaacctgcagaagcagcaggcccagtacctcgaggagaagcgcaggcgcgagcgtgagtgggaagctcgtgagagggagctgcgggagcgggaggccctcctggcccagcgcgaggaggaggtgcagcaggggcagcaggacctggaaaaggagcgggaggagctccagcagaagaagggcacataccagtatgacctggagcgactgcgtgctgcccagaaacagcttgagagggaacaggagcagctgcgccgggaggcagagcggctcagccagcggcagacagaacgggacctgtgtcaggtttcccatccacataccaagctgatgaggatcccatcgttcttccccagtcctgaggagcccccctcgccatctgcaccttccatagccaaatcagggtcattggactcagaactttcagtgtccccaaaaaggaacagcatctctcggacacacaaagataaggggccttttcacatactgagttcaaccagccagacaaacaaaggaccagaagggcagagccaggcccctgcgtccacctctgcctctacccgcctgtttgggttaacaaagccaaaggaaaagaaggagaaaaaaaagaagaacaaaaccagccgctctcagcccggtgatggtcccgcgtcagaagtatcagcagagggtgaagagatcttctgctgaccctcttcctctctgctgaggcagctgcctcctgatcctggccagcccacctctcctgctgtccccgcgtgcacaagtctcttacactggacgcccactgctcctcagcgtccagtcctcctgggcggccccaggtcctggacaataagcaacagatgatattgagtgtcgggtggggaaggaggcccagactctgcttcggccatgatttgtgactgcccaggactctcaggttgggctggccctactcaggattacactgaaagtaatggcctcgtaagtacaggtgatggttttggacacgtcaggaattcctaaaggctgaaagagtgtatccaagtaaggtctgaacctccgaatgccttttatttgggggaacacaaaaccaaacagcagatgttttggacttgatctgtgtacgtacatggggacctgtctgcatatacacacggggaatgccagaagaaggcccagtctgcaccaggcgtctggtcaacttagcacaagggcagtgcctggacggacccggagcccccgcatatcagcagttcacccagtactcctcagagactggtttccctctaaacccatcccgggcacataccacccgtgttttgcatgtatttctcatttcattttagggatgacaaacatttgtgaaaccagtgagagaaggcttgatgtgtataaaagacgtgatgtgcaccacctcgatctcggtgtttcaggcactaaagcaacaaaacaacccatagtatctcattctgtcatcagatccagaagaaatatcctggttttccagcatgtttacccacatgttttggccatggataaagtgaagaggcctactcaccattatccctgcagcgtgacaccttttgattgtcactgaccactcagaaggggccacggcctcctggctgtgttcctgagcccccgtcgtgcctctcccagacagcagctgtctggcccttgctgggtgagggcacaccactgccaggggtcagcctcgcacccaggccaggcagaagctgtgctctgaagctaggacagctggctgagaagtgggttcaggcgaagggtgaagccatgtgtagcagttcctgccagtgcagatctggagaggagctggcccggaaggcgtggttgtgaaagcgcccttcttatgttaggaggccttggcaaaattggatttcttcaaaaatacatgtaaaggtctgttgttgaattgtactctgcccctggaagcagatacagatggctgcctgctgctcggctttgcttttgcttttcccaccgtgttttcatctttgttcacttgaggctttccccagctggtgtgtgcaggacagttcatggtaatgttgccctctgaggccccgtacaccagaagggaggccctggaaaattttgtgcttccaacgtggccttcaattcttgcttttttgcccctcggaagcatggggcttttgagcacacttaaaaaaagaaaaatctgtaacttggtgcttattgatgaattgcaagctggccttgcagatggagatatttatctttcagtttatttgaaagaggtctggtttaaaatttgtagcctacatttgttttatttattgtatttgtgtgtttgtgtttgtttttttttaagggtgagccaggtctagcccaacagtctaaactatccagtcaataccgagtgaagtggcagccagcactgttcactctgtgtcttttgaagtgccttgaaggcccagatgaaattttaaagggagggggtccatgtccttccctcccccaccccgcctcattctttaatcaaaggatgtcttctcccttgtttgagaatgaagaaactcgccacctctgacctacctttgcctttttctgtcatggagaatactcacccttcagaaacagaccaaaggccaaaacctgctgatttttctattgaaaatatgtccccttgcaaagaccctaaacaaaaagttaagtttctttctttcacctatttgtacaactccaagttacagctgaatctgtcgtgactttcctgagatctacccggggcttggctgtctgttctgggcactggctccgagttcccctcctgggatttgcaggagggcagtactgaacctgcattcttctccttgtaaatgtaggccgggtgcccctgttctccgggtttggaacaatacgaggttggtgctgatgggatttacttgcgtacgtgctcttcacaaaaacaccgtggatgctgaagttagagcacgtcgccacagagcttgacatcaatgttagagggtctcttactccccgcccagctgtgatgtttcatctgctttggttgttttggtggtcttttttaaaaatagagatttcacatctgcccagaccccactcaaaacgatttggtcaggttctggttggacaagtttaaaatcaaagtagtgcccggaattccctcaaaccacccaacttcatccaggaatacagtctgcagtgcagcaacagaaccgcttaccaagaactgtgcttacatacctttgtcatctctcttccccccttggaagttgtcctcagggggatttgttcctgtcctggggatttacctgggatggtggctgcctgtgcttttgctcatggccttgacagtgctctagttgctggatctaatggcctgtcttggtttctatcacatgagaaggggttgtttttttggggtgactcggactgaattccccatactgtttccacgccgggacaccatgttctccatcaagctaaagaaatcacgtgcctgaaactgtgcttaagttttgggggaaagatggagttcctatccagagcccccagatttccagaatcgagtgagcttcctggaaggagactgcgtcttctctcaattccagtcatctcagtcgttgtcgttaggtgacatgtgcactttaaatgctctcatcggttggcttcattttcaagacaatcaaatgtattgactgtgttttcttcttagaaaatggagagggttaaaaacatgcaaactgccactttcaacctttgccagtattccctctacccccgtgagagctatctggggggaagaatccttaccaaggtttttttggaaaggtacgaatcttaacttttttccccttctgtgtctcagggtaatactattcagagtcgcccctttgctcattttctcccgtatttgttaccttcctgaggcctcagtattagtcgtgagcacaaagttttgagacctttggcgttgtttcttgatgtgggaggggaggtgttagtgcatgcaagggttgaactagatagaccctgccttagtagagggtgggactataaccttagaggccagaacttgatccagaagttgctgtccacagaagtgctttctatttcatcatttttgtttctagggctctttttctgtagccaggtcttcccaaggattttagtatttgcattggagttgaggtttactctaatgatggtggcccagctgtgcccagaggacagccaggcaggccctgggagggagtttagaaagacagtcctggtgaatgggcttcaagtggtcacaaagagggtggctgtgaggtgaccccagacactgcagaacgatgtgcaccctctgcgttttggatgtccttggaatgtgggagcctagaaataaccctgtggatggaattggggcagcggctgctggagatctgtgtgccttgccttccttcagcaggaccgtctaggtgcgcagccacctatggatgcgtcccagccagccccgtcgctctcgtccatcctcagagacaaagaagagggcagggagtttgggcttggttttgaactttcctttcaatgtagcaaagcattcctagttaaccagagccttggaatctactgcctgctggccaggctttaaaatgaaaagtgttttaatgctgccataaaagggaggcgggggggaggaagggaaaataaaggcatctttccaagtactcatctaatttaattgtcaaaagattgataggccatgaattacttctccatctcactaagggttaaaggcgtgcaaccccccactggctgtgtcccctgccaccgaagtgagtgacctgccctacaaccaggtgggaccacctgtgctgcagtccggaggggcttctgcaggaagcactcaccccccacaccttccccggcctgagcttcccctacctttcgtcaccacctgagggcatgagcacaggccatggggcgtgcctggtgagtctgcctgtggttcaggcttagcctgtggtctcctgtgtgctgctgcccgcatgggatgcgcaggggaggcgtggggatccgcaggagggtggttgggatacaccggatacctctgctctcattgcttgtttgcaaatgctctatggacatttgtgtgctaaatcctattaaataaaaaagacgggttaaaacccagatgctgtatattcatttgtaattatgtataaagtgaagcagttttaaactgtaaagatttttttcagtgtgttttctcgaattttgccacaacatactggcttcgtattttatttatctttctttctagttaccagcttcagacccttgtaaagtctccctcagccctttcaaaaaataataaatttcctgtgaagtt
